United States Patent Application Publication US 2011/0183924 A1 - sequence listing, part 123

SEQ ID NO: 349078 - DNA, 3614 bp, Homo sapiens
ggcacgagtggcggaaaggctgcggccccgcgccagagggccggtggctcctccgggcttctgaggacccgcagggagcgggcctcatcatttctgtctcctgtttctccacttccttctctattggttggtccactgatgtatggacttgcacatgatgaactgtgaacttctagccacatgtagtgcccttgggtacttggagggagacacttaccataaggaaccagattgcttagagagcgtgaaggatctgatccgctatttgaggcatgaggatgagacacgagatgtgcggcagcagctgggggcagcccagatcctacagagcgaccttctgcccatcctcacccagcaccaccaggacaagcctctctttgatgctgttatcagactgatggtgaacttgacacaaccagccttgctctgttttggcaatctgcctaaggagcccagctttcggcaccattttttgcaggtgctaacttatttgcaggcctacaaagaggcctttgccagtgagaaggcttttggagtcctcagtgaaaccttgtatgagctgctgcagctgggctgggaggaacggcaggaggaagacaacttgctgattgaacggatcctactgctggtcagaaatattctccatgtcccagctgaccttgatcaggagaagaagattgatgatgacgccagtgcccatgaccagctcctctgggcgattcacctcagcggcctggatgacctgctcctctttctggccagctcgtctgctgaggagcaatggagcctacatgtgctagagattgtctcccttatgtttcgtgaccagaaccccgagcagctggcgggagtagggcagggacgcttagctcaggagcggagtgcagattttgcagaactggaggtattgcgccagcgagagatggcagaaaagaagactcgagccctccagcgaggcaacaggcattctcgatttgggggctcctatattgtccaggggttgaaatccattggggagagggacctcatctttcacaaaggccttcacaacctacgaaactacagttcagatttgggaaagcagccgaaaaaggtgcctaaacgtcgccaggccgcccgagagctgtccattcagcgccgttctgccctcaatgtgaggctcttcctcagagacttctgctctgagttcctggagaactgttacaaccggctcatgggatcagtaaaggatcacctgcttcgggagaaagctcagcagcatgatgagacctattatatgtgggccttggctttcttcatggccttcaaccgagctgcctccttccggccaggcctggtttctgagaccctcagtgtccgtaccttccacttcattgagcagaacctcaccaactactatgagatgatgctgactgaccgcaaggaagctgcctcctgggcacgccggatgcacttggctctgaaggcctatcaggagctgctggcaacagtgaatgagatggacttatctccagatgaggctgtgagggagagcagccgcatcatcaagaacaatattttctatgtgatggagtaccgagaactattcctggcactttttcgaaagtttgatgagagatgccagccccgctctttccttcgtgacctggtggagaccacccacctcttcctcaaaatgttggagcgattctgtcggagccgtgggaacctggtggtgcagaacaaacaaaagaagagaaggaagaagaagaagaaggtcctagaccaggccattgtttctggtaatgtcccatctagcccagaagaagtggaggctgtgtggccagccctggctgagcagctacagtgctgtgcccagaattctgagctcagcatggactccgtggttccctttgatgcggcctcagaggtgccagtggaggagcagcgggcagaagctatggtacggatccaagactgtctcctggctggccaggccccacaggccctgactctcctgaggtctgctcgggaggtgtggcctgaaggagatgtgtttggctctcaagacatttctccagaggaagagatccagttgctgaaacaaatcctctctgctccacttccccggcagcagggcccagaggaacgtggggcagaggaagaagaagaggaggaggaggaggaagaggaggagttgcaagtggtccaggtgtcggagaaagaatttaattttctggactacctgaaacgctttgcatgttcaactgtcgttcgagcctatgtgctgctactaaggagctaccagcagaatagtgcccacactaaccattgcattgtgaagatgctgcaccggctggcccatgacctcaaaatggaagccctactttttcagctgtcagtcttctgcctcttcaatcgtctgcttagtgaccctgctgctggagcctacaaagagctagtgacttttgccaaatacatcctgggcaaattttttgcactggctgcagtcaaccaaaaagcctttgtggagctgttgttctggaagaacacagctgtggttcgagagatgactgagggctatggctccctggatgacaggtcttccagtcgcagagcacctacatggagccccgaagaagaggctcatcttcgggagctgtacctcgccaataaggacgtggaagggcaggatgtggtggaagccatcttggcccacctgaatactgttcctcgaacacgcaagcagatcatccaccatctggtacagatgggactggctgacagtgtcaaggacttccaaaggaaaggaacccatattgtactgtggacgggggatcaggagttggagctgcagcggctttttgaggaattccgggactcagatgatgtcctgggtcatatcatgaagaatatcacagccaaacgctcacgggcccgaatagtggataaactcttggctctggggctggtggctgagcggcgggagctgtacaagaaacggcagaaaaagttggcatcctccatcttgccaaatggagcggagtccctgaaagatttttgccaggaagatctggaagaagaggaaaacctgcctgaggaagacagcgaagaggaagaagaagggggctcagaagcagaacaagtccagggtagcttagtcctttcaaatgaaaaccttggtcaaagcctgcatcaggaaggcttttctatcccgctcctatggctccagaactgcctgatccgagcagctgatgatcgggaagaggatggctgctcccaggccgttccattggtgccactcacagaggaaaatgaggaagccatggaaaacgaacagtttcagcagctgttgcgcaagctaggggttcggccccctgcctctgggcaggaaaccttctggcgaattccagccaagctgagtcctacccagctccggagggcagcagcttctttgagtcaaccagaggaggaacagaagctgcagccagagctgcagcctaaagtccctggagagcaaggctctgatgaggagcactgtaaagagcaccgagcacaagccctgagggccctcttgctagcccacaagaagaaagcgggcctggcatccccagagggtaatagtgcgacagcca

SEQ ID NO: 349079 - DNA, 428 bp, Homo sapiens
tgtctcaggtggagggcttgggagtagggtcaaatgtaagtttccctcatttccttaggcttttctatcccgctcctatggctccagaactgcctgatccgagcagctgatgatcgggaagaggatggtgagtggacaggtgacacttttaggagaagagccctggaggctattggagacctacctggtcatgggatggagaaccagttcttcccttatatcttcaccatatgactattgaccctgtcttaggctgctcccaggccgttccattggtgccactcacagaggaaaatgaggaagccatggaaaacgaacagtttcagcagctgttgcgcaagctaggggttcggccccctgcctctgggcaggtaaatatgtcagttacagtgtcaaccaaggcgtgttagtcctatttccaaatacat

SEQ ID NO: 349080 - DNA, 320 bp, Homo sapiens
aagtgtcatttttggatgaattgaggtaccctctttccagagacctctgatttattttactcatctctttccctgttacccttgggtattcacatgcttgctttttatagatgtcctgggtcatatcatgaagaatatcacagccaaacgctcacgggcccgaatagtggataaactcttggctctggggctggtggctgagcggcgggagctgtacaagaaacggcagaaaaagttggcatcctccatcttggtaacaatctgaccctagctctgctggcatgggctcacttcccttgaagtggtccttaggagcagtc

SEQ ID NO: 349081 - DNA, 5114 bp, Homo sapiens
ggcacgagtggcggaaaggctgcggccccgcgccagagggccggtggctcctccgggcttctgaggacccgcagggagcgggcctcatcatttctgtctcctgtttctccacttccttctctattggttggtccactgatgtatggacttgcacatgatgaactgtgaacttctagccacatgtagtgcccttgggtacttggagggagacacttaccataaggaaccagattgcttagagagcgtgaaggatctgatccgctatttgaggcatgaggatgagacacgagatgtgcggcagcagctgggggcagcccagatcctacagagcgaccttctgcccatcctcacccagcaccaccaggacaagcctctctttgatgctgttatcagactgatggtgaacttgacacaaccagccttgctctgttttggcaatctgcctaaggagcccagctttcggcaccattttttgcaggtgctaacttatttgcaggcctacaaagaggcctttgccagtgagaaggcttttggagtcctcagtgaaaccttgtatgagctgctgcagctgggctgggaggaacggcaggaggaagacaacttgctgattgaacggatcctactgctggtcagaaatattctccatgtcccagctgaccttgatcaggagaagaagattgatgatgacgccagtgcccatgaccagctcctctgggcgattcacctcagcggcctggatgacctgctcctctttctggccagctcgtctgctgaggagcaatggagcctacatgtgctagagattgtctcccttatgtttcgtgaccagaaccccgagcagctggcgggagtagggcagggacgcttagctcaggagcggagtgcagattttgcagaactggaggtattgcgccagcgagagatggcagaaaagaagactcgagccctccagcgaggcaacaggcattctcgatttgggggctcctatattgtccaggggttgaaatccattggggagagggacctcatctttcacaaaggccttcacaacctacgaaactacagttcagatttgggaaagcagccgaaaaaggtgcctaaacgtcgccaggccgcccgagagctgtccattcagcgccgttctgccctcaatgtgaggctcttcctcagagacttctgctctgagttcctggagaactgttacaaccggctcatgggatcagtaaaggatcacctgcttcgggagaaagctcagcagcatgatgagacctattatatgtgggccttggctttcttcatggccttcaaccgagctgcctccttccggccaggcctggtttctgagaccctcagtgtccgtaccttccacttcattgagcagaacctcaccaactactatgagatgatgctgactgaccgcaaggaagctgcctcctgggcacgccggatgcacttggctctgaaggcctatcaggagctgctggcaacagtgaatgagatggacttatctccagatgaggctgtgagggagagcagccgcatcatcaagaacaatattttctatgtgatggagtaccgagaactattcctggcactttttcgaaagtttgatgagagatgccagccccgctctttccttcgtgacctggtggagaccacccacctcttcctcaaaatgttggagcgattctgtcggagccgtgggaacctggtggtgcagaacaaacaaaagaagagaaggaagaagaagaagaaggtcctagaccaggccattgtttctggtaatgtcccatctagcccagaagaagtggaggctgtgtggccagccctggctgagcagctacagtgctgtgcccagaattctgagctcagcatggactccgtggttccctttgatgcggcctcagaggtgccagtggaggagcagcgggcagaagctatggtacggatccaagactgtctcctggctggccaggccccacaggccctgactctcctgaggtctgctcgggaggtgtggcctgaaggagatgtgtttggctctcaagacatttctccagaggaagagatccagttgctgaaacaaatcctctctgctccacttccccggcagcagggcccagaggaacgtggggcagaggaagaagaagaggaggaggaggaggaagaggaggagttgcaagtggtccaggtgtcggagaaagaatttaattttctggactacctgaaacgctttgcatgttcaactgtcgttcgagcctatgtgctgctactaaggagctaccagcagaatagtgcccacactaaccattgcattgtgaagatgctgcaccggctggcccatgacctcaaaatggaagccctactttttcagctgtcagtcttctgcctcttcaatcgtctgcttagtgaccctgctgctggagcctacaaagagctagtgacttttgccaaatacatcctgggcaaattttttgcactggctgcagtcaaccaaaaagcctttgtggagctgttgttctggaagaacacagctgtggttcgagagatgactgagggctatggctccctggatgacaggtcttccagtcgcagagcacctacatggagccccgaagaagaggctcatcttcgggagctgtacctcgccaataaggacgtggaagggcaggatgtggtggaagccatcttggcccacctgaatactgttcctcgaacacgcaagcagatcatccaccatctggtacagatgggactggctgacagtgtcaaggacttccaaaggaaaggaacccatattgtactgtggacgggggatcaggagttggagctgcagcggctttttgaggaattccgggactcagatgatgtcctgggtcatatcatgaagaatatcacagccaaacgctcacgggcccgaatagtggataaactcttggctctggggctggtggctgagcggcgggagctgtacaagaaacggcagaaaaagttggcatcctccatcttgccaaatggagcggagtccctgaaagatttttgccaggaagatctggaagaagaggaaaacctgcctgaggaagacagcgaagaggaagaagaagggggctcagaagcagaacaagtccagggtagcttagtcctttcaaatgaaaaccttggtcaaagcctgcatcaggaaggcttttctatcccgctcctatggctccagaactgcctgatccgagcagctgatgatcgggaagaggatggctgctcccaggccgttccattggtgccactcacagaggaaaatgaggaagccatggaaaacgaacagtttcagcagctgttgcgcaagctaggggttcggccccctgcctctgggcaggaaaccttctggcgaattccagccaagctgagtcctacccagctccggagggcagcagcttctttgagtcaaccagaggaggaacagaagctgcagccagagctgcagcctaaagtccctggagagcaaggctctgatgaggagcactgtaaagagcaccgagcacaagccctgagggccctcttgctagcccacaagaagaaagcgggcctggcatccccagaggaggaagacgctgttggtaaagagccgctgaaggcagcacccaagaaacgacaattgctggacagcgacgaggaacaggaagaagatgagggcaggaacagagcaccagagttgggagctccaggaatccaaaagaagaaacgataccagattgaggatgatgaggatgactgaagagctaagaagcctaggggtagagatagacacgtttttagatggtgcattcaagtcagagttggaagggtcatacaggacccagaagctcctcttactggacagagcagtagaatcccaggctctttcacggatttaggctgagaaacttcagcagcagtattggacttctctgctgtcagtctttgtttctcccagtttttatcggtatgccccagcagctctctggagatttagttctcttcttctaggaaccatttcttttggttattggagctccttagcaaataagaggagtgagtgaaatagagaaagcaccccggaccccttttattggtctgttcctttggctttctcttggaggtgggtcgcagcaccagatggggagctttatgacatgacaggcgggagttttgtaccacttttagaagataccagatgcctctgtcctcattttgtttcctatgatcatcctctagataccagatagaggcccattcctgcatttgagatagggttggaatatagtactctagatgatgaatgtgtttgctttgtgtttggtattaaacatgtaagattagaagttctcatctcagtctgacttggcgatatgtctaagttccccagcccttcccctgctgtgctcttgaaagaagaacttaacaattttagggtaaaaagagaccaacagaccggcacagtggctcaaacctgttgtcctagcactttgggaggctgaggcgggcggatcacctgaggtcaggagtttgagaccggcctggacaatatggcgaaatcccatctccactaaaaatacaaaaattagccggccatggtggcatgcgcctgtaatcccagccactcgggtggctgaggcaggagaattgcctgaacccaggaggcagaggttgcagtgagctaaggtcacgccagtgcatatgcctgggcgacagagcaagactctgtctcaaaaaaaaagaaaaaaaaaaaagaccaacaaccttcccttttcttccgctttccctacagaagacacagaaaagcatttttgcctctagatccttttgtctagggtaaattcttagggtgacaagagtatgcggcaggaagaaggaggagccataaaggaagagaagccagcttgttggcatggggcatagaaaaggacaaaatctaggcatgaaaaggatggataaatactgcaaatattatgttcttacccattcttggaaacgtcagctttcttgcttcctgtgcttccagccgaggtagggcaaaggtgagattgagaaaatagccattcagctcaggaaggcttctaagtaaaggatggatttggatt

SEQ ID NO: 349082 - DNA, 5330 bp, Homo sapiens
ggcacgagtggcggaaaggctgcggccccgcgccagagggccggtggctcctccgggcttctgaggacccgcagggagcgggcctcatcatttctgtctcctgtttctccacttccttctctattggttggtccactgatgtatggacttgcacatgatgaactgtgaacttctagccacatgtagtgcccttgggtacttggagggagacacttaccataaggaaccagattgcttagagagcgtgaaggatctgatccgctatttgaggcatgaggatgagacacgagatgtgcggcagcagctgggggcagcccagatcctacagagcgaccttctgcccatcctcacccagcaccaccaggacaagcctctctttgatgctgttatcagactgatggtgaacttgacacaaccagccttgctctgttttggcaatctgcctaaggagcccagctttcggcaccattttttgcaggtgctaacttatttgcaggcctacaaagaggcctttgccagtgagaaggcttttggagtcctcagtgaaaccttgtatgagctgctgcagctgggctgggaggaacggcaggaggaagacaacttgctgattgaacggatcctactgctggtcagaaatattctccatgtcccagctgaccttgatcaggagaagaagattgatgatgacgccagtgcccatgaccagctcctctgggcgattcacctcagcggcctggatgacctgctcctctttctggccagctcgtctgctgaggagcaatggagcctacatgtgctagagattgtctcccttatgtttcgtgaccagaaccccgagcagctggcgggagtagggcagggacgcttagctcaggagcggagtgcagattttgcagaactggaggtattgcgccagcgagagatggcagaaaagaagactcgagccctccagcgaggcaacaggcattctcgatttgggggctcctatattgtccaggggttgaaatccattggggagagggacctcatctttcacaaaggccttcacaacctacgaaactacagttcagatttgggaaagcagccgaaaaaggtgcctaaacgtcgccaggccgcccgagagctgtccattcagcgccgttctgccctcaatgtgaggctcttcctcagagacttctgctctgagttcctggagaactgttacaaccggctcatgggatcagtaaaggatcacctgcttcgggagaaagctcagcagcatgatgagacctattatatgtgggccttggctttcttcatggccttcaaccgagctgcctccttccggccaggcctggtttctgagaccctcagtgtccgtaccttccacttcattgagcagaacctcaccaactactatgagatgatgctgactgaccgcaaggaagctgcctcctgggcacgccggatgcacttggctctgaaggcctatcaggagctgctggcaacagtgaatgagatggacttatctccagatgaggctgtgagggagagcagccgcatcatcaagaacaatattttctatgtgatggagtaccgagaactattcctggcactttttcgaaagtttgatgagagatgccagccccgctctttccttcgtgacctggtggagaccacccacctcttcctcaaaatgttggagcgattctgtcggagccgtgggaacctggtggtgcagaacaaacaaaagaagagaaggaagaagaagaagaaggtcctagaccaggccattgtttctggtaatgtcccatctagcccagaagaagtggaggctgtgtggccagccctggctgagcagctacagtgctgtgcccagaattctgagctcagcatggactccgtggttccctttgatgcggcctcagaggtgccagtggaggagcagcgggcagaagctatggtacggatccaagactgtctcctggctggccaggccccacaggccctgactctcctgaggtctgctcgggaggtgtggcctgaaggagatgtgtttggctctcaagacatttctccagaggaagagatccagttgctgaaacaaatcctctctgctccacttccccggcagcagggcccagaggaacgtggggcagaggaagaagaagaggaggaggaggaggaagaggaggagttgcaagtggtccaggtgtcggagaaagaatttaattttctggactacctgaaacgctttgcatgttcaactgtcgttcgagcctatgtgctgctactaaggagctaccagcagaatagtgcccacactaaccattgcattgtgaagatgctgcaccggctggcccatgacctcaaaatggaagccctactttttcagctgtcagtcttctgcctcttcaatcgtctgcttagtgaccctgctgctggagcctacaaagagctagtgacttttgccaaatacatcctgggcaaattttttgcactggctgcagtcaaccaaaaagcctttgtggagctgttgttctggaagaacacagctgtggttcgagagatgactgagggctatggctccctggatgacaggtcttccagtcgcagagcacctacatggagccccgaagaagaggctcatcttcgggagctgtacctcgccaataaggacgtggaagggcaggatgtggtggaagccatcttggcccacctgaatactgttcctcgaacacgcaagcagatcatccaccatctggtacagatgggactggctgacagtgtcaaggacttccaaaggaaaggaacccatattgtactgtggacgggggatcaggagttggagctgcagcggctttttgaggaattccgggactcagatgatgtcctgggtcatatcatgaagaatatcacagccaaacgctcacgggcccgaatagtggataaactcttggctctggggctggtggctgagcggcgggagctgtacaagaaacggcagaaaaagttggcatcctccatcttggtaacaatctgaccctagctctgctggcatgggctcacttcccttgaagtggtccttaggagcagtccacctggattcttcctgcctgaggctgttctgaccaggtccttccgagagagcaggcgcgggggggtgcggtggtcaggaacgaggagactccactaagttccttgtgttgccttcattttcattcccccaacccccaatgaattttagccaaatggagcggagtccctgaaagatttttgccaggaagatctggaagaagaggaaaacctgcctgaggaagacagcgaagaggaagaagaagggggctcagaagcagaacaagtccagggtagcttagtcctttcaaatgaaaaccttggtcaaagcctgcatcaggaaggcttttctatcccgctcctatggctccagaactgcctgatccgagcagctgatgatcgggaagaggatggctgctcccaggccgttccattggtgccactcacagaggaaaatgaggaagccatggaaaacgaacagtttcagcagctgttgcgcaagctaggggttcggccccctgcctctgggcaggaaaccttctggcgaattccagccaagctgagtcctacccagctccggagggcagcagcttctttgagtcaaccagaggaggaacagaagctgcagccagagctgcagcctaaagtccctggagagcaaggctctgatgaggagcactgtaaagagcaccgagcacaagccctgagggccctcttgctagcccacaagaagaaagcgggcctggcatccccagaggaggaagacgctgttggtaaagagccgctgaaggcagcacccaagaaacgacaattgctggacagcgacgaggaacaggaagaagatgagggcaggaacagagcaccagagttgggagctccaggaatccaaaagaagaaacgataccagattgaggatgatgaggatgactgaagagctaagaagcctaggggtagagatagacacgtttttagatggtgcattcaagtcagagttggaagggtcatacaggacccagaagctcctcttactggacagagcagtagaatcccaggctctttcacggatttaggctgagaaacttcagcagcagtattggacttctctgctgtcagtctttgtttctcccagtttttatcggtatgccccagcagctctctggagatttagttctcttcttctaggaaccatttcttttggttattggagctccttagcaaataagaggagtgagtgaaatagagaaagcaccccggaccccttttattggtctgttcctttggctttctcttggaggtgggtcgcagcaccagatggggagctttatgacatgacaggcgggagttttgtaccacttttagaagataccagatgcctctgtcctcattttgtttcctatgatcatcctctagataccagatagaggcccattcctgcatttgagatagggttggaatatagtactctagatgatgaatgtgtttgctttgtgtttggtattaaacatgtaagattagaagttctcatctcagtctgacttggcgatatgtctaagttccccagcccttcccctgctgtgctcttgaaagaagaacttaacaattttagggtaaaaagagaccaacagaccggcacagtggctcaaacctgttgtcctagcactttgggaggctgaggcgggcggatcacctgaggtcaggagtttgagaccggcctggacaatatggcgaaatcccatctccactaaaaatacaaaaattagccggccatggtggcatgcgcctgtaatcccagccactcgggtggctgaggcaggagaattgcctgaacccaggaggcagaggttgcagtgagctaaggtcacgccagtgcatatgcctgggcgacagagcaagactctgtctcaaaaaaaaagaaaaaaaaaaaagaccaacaaccttcccttttcttccgctttccctacagaagacacagaaaagcatttttgcctctagatccttttgtctagggtaaattcttagggtgacaagagtatgcggcaggaagaaggaggagccataaaggaagagaagccagcttgttggcatggggcatagaaaaggacaaaatctaggcatgaaaaggatggataaatactgcaaatattatgttcttacccattcttggaaacgtcagctttcttgcttcctgtgcttccagccgaggtagggcaaaggtgagattgagaaaatagccattcagctcaggaaggcttctaagtaaaggatggatttggatt

SEQ ID NO: 349083 - DNA, 5234 bp, Homo sapiens
ggcacgagtggcggaaaggctgcggccccgcgccagagggccggtggctcctccgggcttctgaggacccgcagggagcgggcctcatcatttctgtctcctgtttctccacttccttctctattggttggtccactgatgtatggacttgcacatgatgaactgtgaacttctagccacatgtagtgcccttgggtacttggagggagacacttaccataaggaaccagattgcttagagagcgtgaaggatctgatccgctatttgaggcatgaggatgagacacgagatgtgcggcagcagctgggggcagcccagatcctacagagcgaccttctgcccatcctcacccagcaccaccaggacaagcctctctttgatgctgttatcagactgatggtgaacttgacacaaccagccttgctctgttttggcaatctgcctaaggagcccagctttcggcaccattttttgcaggtgctaacttatttgcaggcctacaaagaggcctttgccagtgagaaggcttttggagtcctcagtgaaaccttgtatgagctgctgcagctgggctgggaggaacggcaggaggaagacaacttgctgattgaacggatcctactgctggtcagaaatattctccatgtcccagctgaccttgatcaggagaagaagattgatgatgacgccagtgcccatgaccagctcctctgggcgattcacctcagcggcctggatgacctgctcctctttctggccagctcgtctgctgaggagcaatggagcctacatgtgctagagattgtctcccttatgtttcgtgaccagaaccccgagcagctggcgggagtagggcagggacgcttagctcaggagcggagtgcagattttgcagaactggaggtattgcgccagcgagagatggcagaaaagaagactcgagccctccagcgaggcaacaggcattctcgatttgggggctcctatattgtccaggggttgaaatccattggggagagggacctcatctttcacaaaggccttcacaacctacgaaactacagttcagatttgggaaagcagccgaaaaaggtgcctaaacgtcgccaggccgcccgagagctgtccattcagcgccgttctgccctcaatgtgaggctcttcctcagagacttctgctctgagttcctggagaactgttacaaccggctcatgggatcagtaaaggatcacctgcttcgggagaaagctcagcagcatgatgagacctattatatgtgggccttggctttcttcatggccttcaaccgagctgcctccttccggccaggcctggtttctgagaccctcagtgtccgtaccttccacttcattgagcagaacctcaccaactactatgagatgatgctgactgaccgcaaggaagctgcctcctgggcacgccggatgcacttggctctgaaggcctatcaggagctgctggcaacagtgaatgagatggacttatctccagatgaggctgtgagggagagcagccgcatcatcaagaacaatattttctatgtgatggagtaccgagaactattcctggcactttttcgaaagtttgatgagagatgccagccccgctctttccttcgtgacctggtggagaccacccacctcttcctcaaaatgttggagcgattctgtcggagccgtgggaacctggtggtgcagaacaaacaaaagaagagaaggaagaagaagaagaaggtcctagaccaggccattgtttctggtaatgtcccatctagcccagaagaagtggaggctgtgtggccagccctggctgagcagctacagtgctgtgcccagaattctgagctcagcatggactccgtggttccctttgatgcggcctcagaggtgccagtggaggagcagcgggcagaagctatggtacggatccaagactgtctcctggctggccaggccccacaggccctgactctcctgaggtctgctcgggaggtgtggcctgaaggagatgtgtttggctctcaagacatttctccagaggaagagatccagttgctgaaacaaatcctctctgctccacttccccggcagcagggcccagaggaacgtggggcagaggaagaagaagaggaggaggaggaggaagaggaggagttgcaagtggtccaggtgtcggagaaagaatttaattttctggactacctgaaacgctttgcatgttcaactgtcgttcgagcctatgtgctgctactaaggagctaccagcagaatagtgcccacactaaccattgcattgtgaagatgctgcaccggctggcccatgacctcaaaatggaagccctactttttcagctgtcagtcttctgcctcttcaatcgtctgcttagtgaccctgctgctggagcctacaaagagctagtgacttttgccaaatacatcctgggcaaattttttgcactggctgcagtcaaccaaaaagcctttgtggagctgttgttctggaagaacacagctgtggttcgagagatgactgagggctatggctccctggatgacaggtcttccagtcgcagagcacctacatggagccccgaagaagaggctcatcttcgggagctgtacctcgccaataaggacgtggaagggcaggatgtggtggaagccatcttggcccacctgaatactgttcctcgaacacgcaagcagatcatccaccatctggtacagatgggactggctgacagtgtcaaggacttccaaaggaaaggaacccatattgtactgtggacgggggatcaggagttggagctgcagcggctttttgaggaattccgggactcagatgatgtcctgggtcatatcatgaagaatatcacagccaaacgctcacgggcccgaatagtggataaactcttggctctggggctggtggctgagcggcgggagctgtacaagaaacggcagaaaaagttggcatcctccatcttgccaaatggagcggagtccctgaaagatttttgccaggaagatctggaagaagaggaaaacctgcctgaggaagacagcgaagaggaagaagaagggggctcagaagcagaacaagtccagggtagcttagtcctttcaaatgaaaaccttggtcaaagcctgcatcaggaaggcttttctatcccgctcctatggctccagaactgcctgatccgagcagctgatgatcgggaagaggatggctgctcccaggccgttccattggtgccactcacagaggaaaatgaggaagccatggaaaacgaacagtttcagcagctgttgcgcaagctaggggttcggccccctgcctctgggcaggaaaccttctggcgaattccagccaagctgagtcctacccagctccggagggcagcagcttctttgagtcaaccagaggaggaacagaagctgcagccagagctgcagcctaaagtccctggagagcaaggctctgatgaggagcactgtaaagagcaccgagcacaagccctgagggccctcttgctagcccacaagaagaaagcgggcctggcatccccagaggaggaagacgctgttggtaaagagccgctgaaggcagcacccaagaaacgacaattgctggacagcgacgaggaacaggaagaagatgagggcaggaacagaggtagggaatttgatgggaccttctttttcttctctaatcctgaagacaaactctaccacgtccttaccccttaacatatttagatattctctctctctctcacccccatcgttcccacagcaccagagttgggagctccaggaatccaaaagaagaaacgataccagattgaggatgatgaggatgactgaagagctaagaagcctaggggtagagatagacacgtttttagatggtgcattcaagtcagagttggaagggtcatacaggacccagaagctcctcttactggacagagcagtagaatcccaggctctttcacggatttaggctgagaaacttcagcagcagtattggacttctctgctgtcagtctttgtttctcccagtttttatcggtatgccccagcagctctctggagatttagttctcttcttctaggaaccatttcttttggttattggagctccttagcaaataagaggagtgagtgaaatagagaaagcaccccggaccccttttattggtctgttcctttggctttctcttggaggtgggtcgcagcaccagatggggagctttatgacatgacaggcgggagttttgtaccacttttagaagataccagatgcctctgtcctcattttgtttcctatgatcatcctctagataccagatagaggcccattcctgcatttgagatagggttggaatatagtactctagatgatgaatgtgtttgctttgtgtttggtattaaacatgtaagattagaagttctcatctcagtctgacttggcgatatgtctaagttccccagcccttcccctgctgtgctcttgaaagaagaacttaacaattttagggtaaaaagagaccaacagaccggcacagtggctcaaacctgttgtcctagcactttgggaggctgaggcgggcggatcacctgaggtcaggagtttgagaccggcctggacaatatggcgaaatcccatctccactaaaaatacaaaaattagccggccatggtggcatgcgcctgtaatcccagccactcgggtggctgaggcaggagaattgcctgaacccaggaggcagaggttgcagtgagctaaggtcacgccagtgcatatgcctgggcgacagagcaagactctgtctcaaaaaaaaagaaaaaaaaaaaagaccaacaaccttcccttttcttccgctttccctacagaagacacagaaaagcatttttgcctctagatccttttgtctagggtaaattcttagggtgacaagagtatgcggcaggaagaaggaggagccataaaggaagagaagccagcttgttggcatggggcatagaaaaggacaaaatctaggcatgaaaaggatggataaatactgcaaatattatgttcttacccattcttggaaacgtcagctttcttgcttcctgtgcttccagccgaggtagggcaaaggtgagattgagaaaatagccattcagctcaggaaggcttctaagtaaaggatggatttggatt

SEQ ID NO: 349084 - DNA, 3162 bp, Homo sapiens
gcggcggaggcggaggcccggcgccctgggcggcgccctgtccccgaagtccgtcctccccgttaggtggcgagcgcccgaggggaggggacagccgggcaagcaggaagctgcggcttaaaagggcaacccgcgcgggacccttcctccctagtcgcggggagtctgagaaagcgcgcctgtttcgcgaccatcacgcacctcccctccgcttgtggccatgtaccgctacctgggcgaagcgctgttgctgtcccgggccgggcccgctgccctgggctcggcgtccgccgactcggccgcgttgctgggctgggcccggggacagcccgccgccgccccgcagccggggctggcattggccgcccggcgccactacagcgaggcggtggccgaccgcgaggacgaccccaacttcttcaagatggtggagggcttcttcgatcgcggcgccagcatcgtggaggacaagctggtggaggacctgaggacccgggagagcgaggagcagaagcggaaccgggtgcgcggcatcctgcggatcatcaagccctgcaaccatgtgctgagtctctccttccccatccggcgcgacgacggctcctgggaggtcatcgaaggctaccgggcccagcacagccagcaccgcacgccctgcaagggaggtatccgttacagcactgatgtgagtgtagatgaagtaaaagctttggcttctctgatgacatacaagtgtgcagtggttgatgtgccgtttgggggtgctaaagctggtgttaagatcaatcccaagaactatactgataatgaattggaaaagatcacaaggaggttcaccatggagctagcaaaaaagggctttattggtcctggcattgatgtgcctgctccagacatgagcacaggtgagcgggagatgtcctggatcgctgatacctatgccagcaccatagggcactatgatattaatgcacacgcctgtgttactggtaaacccatcagccaagggggaatccatggacgcatctctgctactggccgtggtgtcttccatgggattgaaaatttcatcaatgaagcttcttacatgagcattttaggaatgacaccagggtttggagataaaacatttgttgttcagggatttggtaatgtgggcctacactctatgagatatttacatcgttttggtgctaaatgtattgctgttggtgagtctgatgggagtatatggaatccagatggtattgacccaaaggaactggaagacttcaaattgcaacatgggtccattctgggcttccccaaggcaaagccctatgaaggaagcatcttggaggccgactgtgacatactgatcccagctgccagtgagaagcagttgaccaaatccaacgcacccagagtcaaagccaagatcattgctgaaggtgccaatgggccaacaactccagaagctgacaagatcttcctggagagaaacattatggttattccagatctctacttgaatgctggaggagtgacagtatcttactttgagtggctgaagaatctaaatcatgtcagctatggccgtttgaccttcaaatatgaaagggattctaactaccacttgctcatgtctgttcaagagagtttagaaagaaaatttggaaagcatggtggaactattcccattgtacccacggcagagttccaagacaggatatcgggtgcatctgagaaagacatcgtgcactctggcttggcatacacaatggagcgttctgccaggcaaattatgcgcacagccatgaagtataacctgggattggacctgagaacagctgcctatgttaatgccattgagaaagtcttcaaagtgtacaatgaagctggtgtgaccttcacatagatggatcatggctgacttcctcactatcctcttcacatgtaacttctgcagacctatcacaagtttacatgtaaccacagaaatccctttctctcctgactcattaataatggataccattctcaacaagtcaatccaagtcagcccgttaaggagaaagaaattaaggttagcggatcatgtacaagctgagtgtgaaagtagaaatcacctacaccagagagccattttggtattttgcctttaaataaaaagcctcctttatctggctgtgcagccttgctctgtggcttttcccaacacaatcagtgctagtgctggggaggaacagtcaagagcagtcagttgcttgcttattttttctggatgagtctgggacacactgtaactttaacacatttaagaagtaggtgtgtggccttttcagaaggtggcatggtcctcaagtgagttcttagtattttatatcagcaaaataattcaattttgcaggttgcaaacaaatataaaacctgtttctgtttatgaatattattcttttagaatagaataagtacatgctgctgtaataaaattgcctttaatcacttaacaagcctaaccttgactcaaacagtgaatgcctatagaaataataaatgaaaaaaactagtatttttatatcataaaacaatgtcatttatagcttatcattcatgtattgtccagcagacattaaaagccctgtggataattaagttatcttcatacctgcaaaatggtggaggctattttcattaaaactgtcagaatttgcttactataattatgatacagtccaaagaatgcagtcactttttatcatgttaactaattgttctcttttgaagatctatggttgactaattaaacaataattcaagtagagtgtcccagaaaaaaaccacttgggctccctgtttggagtctggctggctctgagcattgccaatggcccctactcacctgactttgtatcctctccttttagaggctttgcattctgcacccagcttcactaacagtgggctgaaaacatccttgggttgagtgtttcatttgggagttatttggccagggccttttgaacagtagtgtccccatgaagtgctagataatatatgtgtaagagtcagctttttttttttttttaactctaacacccttcagaaatttctaactactttgtaactgcatggcttaacctggtgataaaagcagttattaaaagtctacgttttccaaaa

SEQ ID NO: 349085 - DNA, 2591 bp, Homo sapiens
ggcacgtgcctggaataccagctactcaggaggctgaggcaggagaatcgcttgaacctgggaggtggaggttgcgatgagccaagatctcaccattgcactccagcctgagcaacaagagtgaaactccgtctcaaaaacaaacaaacaaacaaacaaacaaaaaaacagaaaatatagtatattttattgtattttctaggaacagaaagctgaaaaagtgagtcttgtctctattggtaaaagtataccttaaatacattcatacacacactcctaattagcatatttttgattaaatgagaatgtgctttgactttaattcattatgttccttcaacagagaaattggacttgacatttcattctttcaattaccccctcttacaggatattaatgcacacgcctgtgttactggtaaacccatcagccaagggggaatccatggacgcatctctgctactggccgtggtgtcttccatgggattgaaaatttcatcaatgaagcttcttacatgagcattttaggaatgacaccagggtttggagataaaacatttgttgttcagggatttggtaatgtgggcctacactctatgagatatttacatcgttttggtgctaaatgtattgctgttggtgagtctgatgggagtatatggaatccagatggtattgacccaaaggaactggaagacttcaaattgcaacatgggtccattctgggcttccccaaggcaaagccctatgaaggaagcatcttggaggccgactgtgacatactgatcccagctgccagtgagaagcagttgaccaaatccaacgcacccagagtcaaagccaagatcattgctgaaggtgccaatgggccaacaactccagaagctgacaagatcttcctggagagaaacattatggttattccagatctctacttgaatgctggaggagtgacagtatcttactttgagtggctgaagaatctaaatcatgtcagctatggccgtttgaccttcaaatatgaaagggattctaactaccacttgctcatgtctgttcaagagagtttagaaagaaaatttggaaagcatggtggaactattcccattgtacccacggcagagttccaagacaggatatcgggtgcatctgagaaagacatcgtgcactctggcttggcatacacaatggagcgttctgccaggcaaattatgcgcacagccatgaagtataacctgggattggacctgagaacagctgcctatgttaatgccattgagaaagtcttcaaagtgtacaatgaagctggtgtgaccttcacatagatggatcatggctgacttcctcactatcctcttcacatgtaacttctgcagacctatcacaagtttacatgtaaccacagaaatccctttctctcctgactcattaataatggataccattctcaacaagtcaatccaagtcagcccgttaaggagaaagaaattaaggttagcggatcatgtacaagctgagtgtgaaagtagaaatcacctacaccagagagccattttggtattttgcctttaaataaaaagcctcctttatctggctgtgcagccttgctctgtggcttttcccaacacaatcagtgctagtgctggggaggaacagtcaagagcagtcagttgcttgcttattttttctggatgagtctgggacacactgtaactttaacacatttaagaagtaggtgtgtggccttttcagaaggtggcatggtcctcaagtgagttcttagtattttatatcagcaaaataattcaattttgcaggttgcaaacaaatataaaacctgtttctgtttatgaatattattcttttagaatagaataagtacatgctgctgtaataaaattgcctttaatcacttaacaagcctaaccttgactcaaacagtgaatgcctatagaaataataaatgaaaaaaactagtatttttatatcataaaacaatgtcatttatagcttatcattcatgtattgtccagcagacattaaaagccctgtggataattaagttatcttcatacctgcaaaatggtggaggctattttcattaaaactgtcagaatttgcttactataattatgatacagtccaaagaatgcagtcactttttatcatgttaactaattgttctcttttgaagatctatggttgactaattaaacaataattcaagtagagtgtcccagaaaaaaaccacttgggctccctgtttggagtctggctggctctgagcattgccaatggcccctactcacctgactttgtatcctctccttttagaggctttgcattctgcacccagcttcactaacagtgggctgaaaacatccttgggttgagtgtttcatttgggagttatttggccagggccttttgaacagtagtgtccccatgaagtgctagataatatatgtgtaagagtcagctttttttttttttttaactctaacacccttcagaaatttctaactactttgtaactgcatggcttaacctggtgataaaagcagttattaaaagtctacgttttccaaaa

SEQ ID NO: 349086 - DNA, 2315 bp, Homo sapiens
cagggcagcccactgtgctaagacactagaacgtacatcaagaagcatccaattctgatttttccctcagagggcttccatttaaagaggaactaaggtgcataagcagataaggatattaatgcacacgcctgtgttactggtaaacccatcagccaagggggaatccatggacgcatctctgctactggccgtggtgtcttccatgggattgaaaatttcatcaatgaagcttcttacatgagcattttaggaatgacaccagggtttggagataaaacatttgttgttcagggatttggtaatgtgggcctacactctatgagatatttacatcgttttggtgctaaatgtattgctgttggtgagtctgatgggagtatatggaatccagatggtattgacccaaaggaactggaagacttcaaattgcaacatgggtccattctgggcttccccaaggcaaagccctatgaaggaagcatcttggaggccgactgtgacatactgatcccagctgccagtgagaagcagttgaccaaatccaacgcacccagagtcaaagccaagatcattgctgaaggtgccaatgggccaacaactccagaagctgacaagatcttcctggagagaaacattatggttattccagatctctacttgaatgctggaggagtgacagtatcttactttgagtggctgaagaatctaaatcatgtcagctatggccgtttgaccttcaaatatgaaagggattctaactaccacttgctcatgtctgttcaagagagtttagaaagaaaatttggaaagcatggtggaactattcccattgtacccacggcagagttccaagacaggatatcgggtgcatctgagaaagacatcgtgcactctggcttggcatacacaatggagcgttctgccaggcaaattatgcgcacagccatgaagtataacctgggattggacctgagaacagctgcctatgttaatgccattgagaaagtcttcaaagtgtacaatgaagctggtgtgaccttcacatagatggatcatggctgacttcctcactatcctcttcacatgtaacttctgcagacctatcacaagtttacatgtaaccacagaaatccctttctctcctgactcattaataatggataccattctcaacaagtcaatccaagtcagcccgttaaggagaaagaaattaaggttagcggatcatgtacaagctgagtgtgaaagtagaaatcacctacaccagagagccattttggtattttgcctttaaataaaaagcctcctttatctggctgtgcagccttgctctgtggcttttcccaacacaatcagtgctagtgctggggaggaacagtcaagagcagtcagttgcttgcttattttttctggatgagtctgggacacactgtaactttaacacatttaagaagtaggtgtgtggccttttcagaaggtggcatggtcctcaagtgagttcttagtattttatatcagcaaaataattcaattttgcaggttgcaaacaaatataaaacctgtttctgtttatgaatattattcttttagaatagaataagtacatgctgctgtaataaaattgcctttaatcacttaacaagcctaaccttgactcaaacagtgaatgcctatagaaataataaatgaaaaaaactagtatttttatatcataaaacaatgtcatttatagcttatcattcatgtattgtccagcagacattaaaagccctgtggataattaagttatcttcatacctgcaaaatggtggaggctattttcattaaaactgtcagaatttgcttactataattatgatacagtccaaagaatgcagtcactttttatcatgttaactaattgttctcttttgaagatctatggttgactaattaaacaataattcaagtagagtgtcccagaaaaaaaccacttgggctccctgtttggagtctggctggctctgagcattgccaatggcccctactcacctgactttgtatcctctccttttagaggctttgcattctgcacccagcttcactaacagtgggctgaaaacatccttgggttgagtgtttcatttgggagttatttggccagggccttttgaacagtagtgtccccatgaagtgctagataatatatgtgtaagagtcagctttttttttttttttaactctaacacccttcagaaatttctaactactttgtaactgcatggcttaacctggtgataaaagcagttattaaaagtctacgttttccaaaa

SEQ ID NO: 349087 - DNA, 2138 bp, Homo sapiens
aaatgttttatctccaaaccctggtgtcattcctaaaatgctcatgtaacatgcttcagtatgatgagcattttaggaatgacaccagggtttggagataaaacatttgttgttcagggatttggtaatgtgggcctacactctatgagatatttacatcgttttggtgctaaatgtattgctgttggtgagtctgatgggagtatatggaatccagatggtattgacccaaaggaactggaagacttcaaattgcaacatgggtccattctgggcttccccaaggcaaagccctatgaaggaagcatcttggaggccgactgtgacatactgatcccagctgccagtgagaagcagttgaccaaatccaacgcacccagagtcaaagccaagatcattgctgaaggtgccaatgggccaacaactccagaagctgacaagatcttcctggagagaaacattatggttattccagatctctacttgaatgctggaggagtgacagtatcttactttgagtggctgaagaatctaaatcatgtcagctatggccgtttgaccttcaaatatgaaagggattctaactaccacttgctcatgtctgttcaagagagtttagaaagaaaatttggaaagcatggtggaactattcccattgtacccacggcagagttccaagacaggatatcgggtgcatctgagaaagacatcgtgcactctggcttggcatacacaatggagcgttctgccaggcaaattatgcgcacagccatgaagtataacctgggattggacctgagaacagctgcctatgttaatgccattgagaaagtcttcaaagtgtacaatgaagctggtgtgaccttcacatagatggatcatggctgacttcctcactatcctcttcacatgtaacttctgcagacctatcacaagtttacatgtaaccacagaaatccctttctctcctgactcattaataatggataccattctcaacaagtcaatccaagtcagcccgttaaggagaaagaaattaaggttagcggatcatgtacaagctgagtgtgaaagtagaaatcacctacaccagagagccattttggtattttgcctttaaataaaaagcctcctttatctggctgtgcagccttgctctgtggcttttcccaacacaatcagtgctagtgctggggaggaacagtcaagagcagtcagttgcttgcttattttttctggatgagtctgggacacactgtaactttaacacatttaagaagtaggtgtgtggccttttcagaaggtggcatggtcctcaagtgagttcttagtattttatatcagcaaaataattcaattttgcaggttgcaaacaaatataaaacctgtttctgtttatgaatattattcttttagaatagaataagtacatgctgctgtaataaaattgcctttaatcacttaacaagcctaaccttgactcaaacagtgaatgcctatagaaataataaatgaaaaaaactagtatttttatatcataaaacaatgtcatttatagcttatcattcatgtattgtccagcagacattaaaagccctgtggataattaagttatcttcatacctgcaaaatggtggaggctattttcattaaaactgtcagaatttgcttactataattatgatacagtccaaagaatgcagtcactttttatcatgttaactaattgttctcttttgaagatctatggttgactaattaaacaataattcaagtagagtgtcccagaaaaaaaccacttgggctccctgtttggagtctggctggctctgagcattgccaatggcccctactcacctgactttgtatcctctccttttagaggctttgcattctgcacccagcttcactaacagtgggctgaaaacatccttgggttgagtgtttcatttgggagttatttggccagggccttttgaacagtagtgtccccatgaagtgctagataatatatgtgtaagagtcagctttttttttttttttaactctaacacccttcagaaatttctaactactttgtaactgcatggcttaacctggtgataaaagcagttattaaaagtctacgttttccaaaa

SEQ ID NO: 349088 - DNA, 3696 bp, Homo sapiens
gcggcggaggcggaggcccggcgccctgggcggcgccctgtccccgaagtccgtcctccccgttaggtggcgagcgcccgaggggaggggacagccgggcaagcaggaagctgcggcttaaaagggcaacccgcgcgggacccttcctccctagtcgcggggagtctgagaaagcgcgcctgtttcgcgaccatcacgcacctcccctccgcttgtggccatgtaccgctacctgggcgaagcgctgttgctgtcccgggccgggcccgctgccctgggctcggcgtccgccgactcggccgcgttgctgggctgggcccggggacagcccgccgccgccccgcagccggggctggcattggccgcccggcgccactacagcgaggcggtggccgaccgcgaggacgaccccaacttcttcaagatggtggagggcttcttcgatcgcggcgccagcatcgtggaggacaagctggtggaggacctgaggacccgggagagcgaggagcagaagcggaaccgggtgcgcggcatcctgcggatcatcaagccctgcaaccatgtgctgagtctctccttccccatccggcgcgacgacggctcctgggaggtcatcgaaggctaccgggcccagcacagccagcaccgcacgccctgcaagggaggtatccgttacagcactgatgtgagtgtagatgaagtaaaagctttggcttctctgatgacatacaagtgtgcagtggttgatgtgccgtttgggggtgctaaagctggtgttaagatcaatcccaagaactatactgataatgaattggaaaagatcacaaggaggttcaccatggagctagcaaaaaagggctttattggtcctggcattgatgtgcctgctccagacatgagcacaggtgagcgggagatgtcctggatcgctgatacctatgccagcaccatagggcactatgatattaatgcacacgcctgtgttactggtaaacccatcagccaagggggaatccatggacgcatctctgctactggccgtggtgtcttccatgggattgaaaatttcatcaatgaagcttcttacatgagcattttaggaatgacaccagggtttggagataaaacatttgttgttcagggatttggtaatgtgggcctacactctatgagatatttacatcgttttggtgctaaatgtattgctgttggtgagtctgatgggagtatatggaatccagatggtattgacccaaaggaactggaagacttcaaattggtattaatacatttttatagcatagacactaaatataaatatttaaaactctggtgcagctattaattgtgattttcaatcaatggcagcaacatgggtccattctgggcttccccaaggcaaagccctatgaaggaagcatcttggaggccgactgtgacatactgatcccagctgccagtgagaagcagttgaccaaatccaacgcacccagagtcaaagccaaggtgacaacattatagaaaccagaaccaacattatcaatgtgaatgacgttaggggggtcatagaagagtctgattgagttttctctttctttttagcagctttattggcacatactgcacataccatacagttcccccatttaaggtacataatttaatggcttttagctaccggcacagagttgtgcaaccattaccaaaacaaacgcatctgcctgacactcctgtaaaaaaaaaaaacaagcaaacaaaaaaaaacctagataaatagaaaagtgaaaggtagttttatacacttggcagagaaaaataacctctatttaactttaactgaaactgtgcttctccccacagccccttgttcatatatgcacatctcttgccctcagtggaggggatttgacggtggtgttcgcatttctctatgttcctgactctcttgcagatcattgctgaaggtgccaatgggccaacaactccagaagctgacaagatcttcctggagagaaacattatggttattccagatctctacttgaatgctggaggagtgacagtatcttactttgagtggctgaagaatctaaatcatgtcagctatggccgtttgaccttcaaatatgaaagggattctaactaccacttgctcatgtctgttcaagagagtttagaaagaaaatttggaaagcatggtggaactattcccattgtacccacggcagagttccaagacaggatatcgggtgcatctgagaaagacatcgtgcactctggcttggcatacacaatggagcgttctgccaggcaaattatgcgcacagccatgaagtataacctgggattggacctgagaacagctgcctatgttaatgccattgagaaagtcttcaaagtgtacaatgaagctggtgtgaccttcacatagatggatcatggctgacttcctcactatcctcttcacatgtaacttctgcagacctatcacaagtttacatgtaaccacagaaatccctttctctcctgactcattaataatggataccattctcaacaagtcaatccaagtcagcccgttaaggagaaagaaattaaggttagcggatcatgtacaagctgagtgtgaaagtagaaatcacctacaccagagagccattttggtattttgcctttaaataaaaagcctcctttatctggctgtgcagccttgctctgtggcttttcccaacacaatcagtgctagtgctggggaggaacagtcaagagcagtcagttgcttgcttattttttctggatgagtctgggacacactgtaactttaacacatttaagaagtaggtgtgtggccttttcagaaggtggcatggtcctcaagtgagttcttagtattttatatcagcaaaataattcaattttgcaggttgcaaacaaatataaaacctgtttctgtttatgaatattattcttttagaatagaataagtacatgctgctgtaataaaattgcctttaatcacttaacaagcctaaccttgactcaaacagtgaatgcctatagaaataataaatgaaaaaaactagtatttttatatcataaaacaatgtcatttatagcttatcattcatgtattgtccagcagacattaaaagccctgtggataattaagttatcttcatacctgcaaaatggtggaggctattttcattaaaactgtcagaatttgcttactataattatgatacagtccaaagaatgcagtcactttttatcatgttaactaattgttctcttttgaagatctatggttgactaattaaacaataattcaagtagagtgtcccagaaaaaaaccacttgggctccctgtttggagtctggctggctctgagcattgccaatggcccctactcacctgactttgtatcctctccttttagaggctttgcattctgcacccagcttcactaacagtgggctgaaaacatccttgggttgagtgtttcatttgggagttatttggccagggccttttgaacagtagtgtccccatgaagtgctagataatatatgtgtaagagtcagctttttttttttttttaactctaacacccttcagaaatttctaactactttgtaactgcatggcttaacctggtgataaaagcagttattaaaagtctacgttttccaaaa

SEQ ID NO: 349089 - DNA, 3479 bp, Homo sapiens
gcggcggaggcggaggcccggcgccctgggcggcgccctgtccccgaagtccgtcctccccgttaggtggcgagcgcccgaggggaggggacagccgggcaagcaggaagctgcggcttaaaagggcaacccgcgcgggacccttcctccctagtcgcggggagtctgagaaagcgcgcctgtttcgcgaccatcacgcacctcccctccgcttgtggccatgtaccgctacctgggcgaagcgctgttgctgtcccgggccgggcccgctgccctgggctcggcgtccgccgactcggccgcgttgctgggctgggcccggggacagcccgccgccgccccgcagccggggctggcattggccgcccggcgccactacagcgaggcggtggccgaccgcgaggacgaccccaacttcttcaagatggtggagggcttcttcgatcgcggcgccagcatcgtggaggacaagctggtggaggacctgaggacccgggagagcgaggagcagaagcggaaccgggtgcgcggcatcctgcggatcatcaagccctgcaaccatgtgctgagtctctccttccccatccggcgcgacgacggctcctgggaggtcatcgaaggctaccgggcccagcacagccagcaccgcacgccctgcaagggaggtatccgttacagcactgatgtgagtgtagatgaagtaaaagctttggcttctctgatgacatacaagtgtgcagtggttgatgtgccgtttgggggtgctaaagctggtgttaagatcaatcccaagaactatactgataatgaattggaaaagatcacaaggaggttcaccatggagctagcaaaaaagggctttattggtcctggcattgatgtgcctgctccagacatgagcacaggtgagcgggagatgtcctggatcgctgatacctatgccagcaccatagggcactatgatattaatgcacacgcctgtgttactggtaaacccatcagccaagggggaatccatggacgcatctctgctactggccgtggtgtcttccatgggattgaaaatttcatcaatgaagcttcttacatgagcattttaggaatgacaccagggtttggagataaaacatttgttgttcagggatttggtaatgtgggcctacactctatgagatatttacatcgttttggtgctaaatgtattgctgttggtgagtctgatgggagtatatggaatccagatggtattgacccaaaggaactggaagacttcaaattgcaacatgggtccattctgggcttccccaaggcaaagccctatgaaggaagcatcttggaggccgactgtgacatactgatcccagctgccagtgagaagcagttgaccaaatccaacgcacccagagtcaaagccaagatcattgctgaaggtgccaatgggccaacaactccagaagctgacaagatcttcctggagagaaacattatggttattccagatctctacttgaatgctggaggagtgacagtatcttactttgagtggctgaagaatctaaatcatgtcagctatggccgtttgaccttcaaatatgaaagggattctaactaccacttgctcatgtctgttcaagagagtttagaaagaaaatttggaaagcatggtggaactattcccattgtacccacggcagagttccaagacaggatatcgggtgcatctgagaaagacatcgtgcactctggcttggcatacacaatggagcgttctgccaggcaaattatgcgcacagccatgaagtataacctgggattggacctgagaacagctgcctatgttaatgccattgagaaagtcttcaaagtgtacaatgaagctggtgtgaccttcacatagatggatcatggctgacttcctcactatcctcttcacatgtaacttctgcagacctatcacaagtttacatgtaaccacagaaatccctttctctcctgactcattaataatggataccattctcaacaagtcaatccaagtcagcccgttaaggagaaagaaattaaggttagcggatcatgtacaagctgagtgtgaaagtagaaatcacctacaccagagagccattttggtattttgcctttaaataaaaagcctcctttatctggctgtgcagccttgctctgtggcttttcccaacacaatcagtgctagtgctggggaggaacagtcaagagcagtcagttgcttgcttattttttctggatgagtctgggacacactgtaactttaacacatttaagaagtaggtgtgtggccttttcagaaggtggcatggtcctcaagtgagttcttagtattttatatcagcaaaataattcaattttgcaggttgcaaacaaatataaaacctgtttctgtttatgaatattattcttttagaatagaataagtacatgctgctgtaataaaattgcctttaatcacttaacaagcctaaccttgactcaaacagtgaatgcctatagaaataataaatgaaaaaaactagtatttttatatcataaaacaatgtcatttatagcttatcattcatgtattgtccagcagacattaaaagccctgtggataattaagttatcttcatacctgcaaaatggtggaggctattttcattaaaactgtcagaatttgcttactataattatgatacagtccaaagaatgcagtcactttttatcatgttaactaattgttctcttttgaagatctatggttgactaattaaacaataattcaagtagagtgtcccagaaaaaaaccacttgggctccctgtttggagtctggctggctctgagcattgccaatggcccctactcacctgactttgtatcctctccttttagaggctttgcattctgcacccagcttcactaacagtgggctgaaaacatccttgggttgagtgtttcatttgggagttatttggccagggccttttgaacagtagtgtccccatgaagtgctagataatatatgtgtaagagtcagctttttttttttttttaactctaacacccttcagaaatttctaactactttgtaactgcatggcttaacctggtgataaaagcagttattaaaagtctacgttttccaaaaaacaaaaaaaaaagaacaacgaataaaaagagaaaaaaaaaaaaacaagaccaaaaacacacacacaacacaaacacaaaaaaaaaaaagacggggggggcgcaccgaccagcaaccgccacagggcggccacaaaaaccagcgcaccaccaatataacacacgcggccacccaaagaaggggagataaaaaaaaagcggagagaggagacgaaaaacaaacgggagtaggagagaaaacgagggaagagaagaaatacagggaagaaacaacacactgtggtgggaggaataagagggcaacacacccacagagaa

SEQ ID NO: 349090 - DNA, 2135 bp, Homo sapiens
tgttatgggtaattgttcttcacagggatttggtaatgtgggcctacactctatgagatatttacatcgttttggtgctaaatgtattgctgttggtgagtctgatgggagtatatggaatccagatggtattgacccaaaggaactggaagacttcaaattggtattaatacatttttatagcatagacactaaatataaatatttaaaactctggtgcagctattaattgtgattttcaatcaatggcagcaacatgggtccattctgggcttccccaaggcaaagccctatgaaggaagcatcttggaggccgactgtgacatactgatcccagctgccagtgagaagcagttgaccaaatccaacgcacccagagtcaaagccaagatcattgctgaaggtgccaatgggccaacaactccagaagctgacaagatcttcctggagagaaacattatggttattccagatctctacttgaatgctggaggagtgacagtatcttactttgagtggctgaagaatctaaatcatgtcagctatggccgtttgaccttcaaatatgaaagggattctaactaccacttgctcatgtctgttcaagagagtttagaaagaaaatttggaaagcatggtggaactattcccattgtacccacggcagagttccaagacaggatatcgggtgcatctgagaaagacatcgtgcactctggcttggcatacacaatggagcgttctgccaggcaaattatgcgcacagccatgaagtataacctgggattggacctgagaacagctgcctatgttaatgccattgagaaagtcttcaaagtgtacaatgaagctggtgtgaccttcacatagatggatcatggctgacttcctcactatcctcttcacatgtaacttctgcagacctatcacaagtttacatgtaaccacagaaatccctttctctcctgactcattaataatggataccattctcaacaagtcaatccaagtcagcccgttaaggagaaagaaattaaggttagcggatcatgtacaagctgagtgtgaaagtagaaatcacctacaccagagagccattttggtattttgcctttaaataaaaagcctcctttatctggctgtgcagccttgctctgtggcttttcccaacacaatcagtgctagtgctggggaggaacagtcaagagcagtcagttgcttgcttattttttctggatgagtctgggacacactgtaactttaacacatttaagaagtaggtgtgtggccttttcagaaggtggcatggtcctcaagtgagttcttagtattttatatcagcaaaataattcaattttgcaggttgcaaacaaatataaaacctgtttctgtttatgaatattattcttttagaatagaataagtacatgctgctgtaataaaattgcctttaatcacttaacaagcctaaccttgactcaaacagtgaatgcctatagaaataataaatgaaaaaaactagtatttttatatcataaaacaatgtcatttatagcttatcattcatgtattgtccagcagacattaaaagccctgtggataattaagttatcttcatacctgcaaaatggtggaggctattttcattaaaactgtcagaatttgcttactataattatgatacagtccaaagaatgcagtcactttttatcatgttaactaattgttctcttttgaagatctatggttgactaattaaacaataattcaagtagagtgtcccagaaaaaaaccacttgggctccctgtttggagtctggctggctctgagcattgccaatggcccctactcacctgactttgtatcctctccttttagaggctttgcattctgcacccagcttcactaacagtgggctgaaaacatccttgggttgagtgtttcatttgggagttatttggccagggccttttgaacagtagtgtccccatgaagtgctagataatatatgtgtaagagtcagctttttttttttttttaactctaacacccttcagaaatttctaactactttgtaactgcatggcttaacctggtgataaaagcagttattaaaagtctacgttttccaaaa

SEQ ID NO: 349091 - DNA, 3457 bp, Homo sapiens
  misc_feature (3449)..(3452): n is a, c, g, or t
  misc_feature (3454)..(3454): n is a, c, g, or t
gcggcggaggcggaggcccggcgccctgggcggcgccctgtccccgaagtccgtcctccccgttaggtggcgagcgcccgaggggaggggacagccgggcaagcaggaagctgcggcttaaaagggcaacccgcgcgggacccttcctccctagtcgcggggagtctgagaaagcgcgcctgtttcgcgaccatcacgcacctcccctccgcttgtggccatgtaccgctacctgggcgaagcgctgttgctgtcccgggccgggcccgctgccctgggctcggcgtccgccgactcggccgcgttgctgggctgggcccggggacagcccgccgccgccccgcagccggggctggcattggccgcccggcgccactacagcgaggcggtggccgaccgcgaggacgaccccaacttcttcaagatggtggagggcttcttcgatcgcggcgccagcatcgtggaggacaagctggtggaggacctgaggacccgggagagcgaggagcagaagcggaaccgggtgcgcggcatcctgcggatcatcaagccctgcaaccatgtgctgagtctctccttccccatccggcgcgacgacggctcctgggaggtcatcgaaggctaccgggcccagcacagccagcaccgcacgccctgcaagggaggtatccgttacagcactgatgtgagtgtagatgaagtaaaagctttggcttctctgatgacatacaagtgtgcagtggttgatgtgccgtttgggggtgctaaagctggtgttaagatcaatcccaagaactatactgataatgaattggaaaagatcacaaggaggttcaccatggagctagcaaaaaagggctttattggtcctggcattgatgtgcctgctccagacatgagcacaggtgagcgggagatgtcctggatcgctgatacctatgccagcaccatagggcactatgatattaatgcacacgcctgtgttactggtaaacccatcagccaagggggaatccatggacgcatctctgctactggccgtggtgtcttccatgggattgaaaatttcatcaatgaagcttcttacatgagcattttaggaatgacaccagggtttggagataaaacatttgttgttcagggatttggtaatgtgggcctacactctatgagatatttacatcgttttggtgctaaatgtattgctgttggtgagtctgatgggagtatatggaatccagatggtattgacccaaaggaactggaagacttcaaattgcaacatgggtccattctgggcttccccaaggcaaagccctatgaaggaagcatcttggaggccgactgtgacatactgatcccagctgccagtgagaagcagttgaccaaatccaacgcacccagagtcaaagccaagatcattgctgaaggtgccaatgggccaacaactccagaagctgacaagatcttcctggagagaaacattatggttattccagatctctacttgaatgctggaggagtgacagtatcttactttgagtggctgaagaatctaaatcatgtcagctatggccgtttgaccttcaaatatgaaagggattctaactaccacttgctcatgtctgttcaagagagtttagaaagaaaatttggaaagcatggtggaactattcccattgtacccacggcagagttccaagacaggatatcgggtgcatctgagaaagacatcgtgcactctggcttggcatacacaatggagcgttctgccaggcaaattatgcgcacagccatgaagtataacctgggattggacctgagaacagctgcctatgttaatgccattgagaaagtcttcaaagtgtacaatgaagctggtgtgaccttcacatagatggatcatggctgacttcctcactatcctcttcacatgtaacttctgcagacctatcacaagtttacatgtaaccacagaaatccctttctctcctgactcattaataatggataccattctcaacaagtcaatccaagtcagcccgttaaggagaaagaaattaaggttagcggatcatgtacaagctgagtgtgaaagtagaaatcacctacaccagagagccattttggtattttgcctttaaataaaaagcctcctttatctggctgtgcagccttgctctgtggcttttcccaacacaatcagtgctagtgctggggaggaacagtcaagagcagtcagttgcttgcttattttttctggatgagtctgggacacactgtaactttaacacatttaagaagtaggtgtgtggccttttcagaaggtggcatggtcctcaagtgagttcttagtattttatatcagcaaaataattcaattttgcaggttgcaaacaaatataaaacctgtttctgtttatgaatattattcttttagaatagaataagtacatgctgctgtaataaaattgcctttaatcacttaacaagcctaaccttgactcaaacagtgaatgcctatagaaataataaatgaaaaaaactagtatttttatatcataaaacaatgtcatttatagcttatcattcatgtattgtccagcagacattaaaagccctgtggataattaagttatcttcatacctgcaaaatggtggaggctattttcattaaaactgtcagaatttgcttactataattatgatacagtccaaagaatgcagtcactttttatcatgttaactaattgttctcttttgaagatctatggttgactaattaaacaataattcaagtagagtgtcccagaaaaaaaccacttgggctccctgtttggagtctggctggctctgagcattgccaatggcccctactcacctgactttgtatcctctccttttagaggctttgcattctgcacccagcttcactaacagtgggctgaaaacatccttgggttgagtgtttcatttgggagttatttggccagggccttttgaacagtagtgtccccatgaagtgctagataatatatgtgtaagagtcagctttttttttttttttaactctaacacccttcagaaatttctaactactttgtaactgcatggcttaacctggtgataaaagcagttattaaaagtctacgttttccaaaaacttacgtttcttttctgtgtttttacatgtggtagtttctcttttcataagttataatactgcaattggatttctgaaatgtttatagcgaccacctgtataacatttccttccactttattgtgagctgcccagattttattcttgaattgttttttttttttttgttcggtgctttacacgttcagagaaacttcccgagtaacgaactatagaaatgatccctgaaagcatagtctttattctcgaattattttgtattttattaaataatatgaacagctannnnanaaa

SEQ ID NO: 349092 - DNA, 3298 bp, Homo sapiens
gcggcggaggcggaggcccggcgccctgggcggcgccctgtccccgaagtccgtcctccccgttaggtggcgagcgcccgaggggaggggacagccgggcaagcaggaagctgcggcttaaaagggcaacccgcgcgggacccttcctccctagtcgcggggagtctgagaaagcgcgcctgtttcgcgaccatcacgcacctcccctccgcttgtggccatgtaccgctacctgggcgaagcgctgttgctgtcccgggccgggcccgctgccctgggctcggcgtccgccgactcggccgcgttgctgggctgggcccggggacagcccgccgccgccccgcagccggggctggcattggccgcccggcgccactacagcgaggcggtggccgaccgcgaggacgaccccaacttcttcaagatggtggagggcttcttcgatcgcggcgccagcatcgtggaggacaagctggtggaggacctgaggacccgggagagcgaggagcagaagcggaaccgggtgcgcggcatcctgcggatcatcaagccctgcaaccatgtgctgagtctctccttccccatccggcgcgacgacggctcctgggaggtcatcgaaggctaccgggcccagcacagccagcaccgcacgccctgcaagggaggtatccgttacagcactgatgtgagtgtagatgaagtaaaagctttggcttctctgatgacatacaagtgtgcagtggttgatgtgccgtttgggggtgctaaagctggtgttaagatcaatcccaagaactatactgataatgaattggaaaagatcacaaggaggttcaccatggagctagcaaaaaagggctttattggtcctggcattgatgtgcctgctccagacatgagcacaggtgagcgggagatgtcctggatcgctgatacctatgccagcaccatagggcactatgatattaatgcacacgcctgtgttactggtaaacccatcagccaagggggaatccatggacgcatctctgctactggccgtggtgtcttccatgggattgaaaatttcatcaatgaagcttcttacatgagcattttaggaatgacaccagggtttggagataaaacatttgttgttcagggatttggtaatgtgggcctacactctatgagatatttacatcgttttggtgctaaatgtattgctgttggtgagtctgatgggagtatatggaatccagatggtattgacccaaaggaactggaagacttcaaattgcaacatgggtccattctgggcttccccaaggcaaagccctatgaaggaagcatcttggaggccgactgtgacatactgatcccagctgccagtgagaagcagttgaccaaatccaacgcacccagagtcaaagccaagatcattgctgaaggtgccaatgggccaacaactccagaagctgacaagatcttcctggagagaaacattatggttattccagatctctacttgaatgctggaggagtgacagtatcttactttgagtggctgaagaatctaaatcatgtcagctatggccgtttgaccttcaaatatgaaagggattctaactaccacttgctcatgtctgttcaagagagtttagaaagaaaatttggaaagcatggtggaactattcccattgtacccacggcagagttccaagacaggatatcgggtgcatctgagaaagacatcgtgcactctggcttggcatacacaatggagcgttctgccaggcaaattatgcgcacagccatgaagtataacctgggattggacctgagaacagctgcctatgttaatgccattgagaaagtcttcaaagtgtacaatgaagctggtgtgaccttcacatagatggatcatggctgacttcctcactatcctcttcacatgtaacttctgcagacctatcacaagtttacatgtaaccacagaaatccctttctctcctgactcattaataatggataccattctcaacaagtcaatccaagtcagcccgttaaggagaaagaaattaaggttagcggatcatgtacaagctgagtgtgaaagtagaaatcacctacaccagagagccattttggtattttgcctttaaataaaaagcctcctttatctggctgtgcagccttgctctgtggcttttcccaacacaatcagtgctagtgctggggaggaacagtcaagagcagtcagttgcttgcttattttttctggatgagtctgggacacactgtaactttaacacatttaagaagtaggtgtgtggccttttcagaaggtggcatggtcctcaagtgagttcttagtattttatatcagcaaaataattcaattttgcaggttgcaaacaaatataaaacctgtttctgtttatgaatattattcttttagaatagaataagtacatgctgctgtaataaaattgcctttaatcacttaacaagcctaaccttgactcaaacagtgaatgcctatagaaataataaatgaaaaaaactagtatttttatatcataaaacaatgtcatttatagcttatcattcatgtattgtccagcagacattaaaagccctgtggataattaagttatcttcatacctgcaaaatggtggaggctattttcattaaaactgtcagaatttgcttactataattatgatacagtccaaagaatgcagtcactttttatcatgttaactaattgttctcttttgaagatctatggttgactaattaaacaataattcaagtagagtgtcccagaaaaaaaccacttgggctccctgtttggagtctggctggctctgagcattgccaatggcccctactcacctgactttgtatcctctccttttagaggctttgcattctgcacccagcttcactaacagtgggctgaaaacatccttgggttgagtgtttcatttgggagttatttggccagggccttttgaacagtagtgtccccatgaagtgctagataatatatgtgtaagagtcagctttttttttttttttaactctaacacccttcagaaatttctaactactttgtaactgcatggcttaacctggtgataaaagcagttattaaaagtctacgttttccaaaatattcatatattttacttattcttatatatattatactaaaactcattgggggtcaccttatcctaattctctcttttttgcgctctaattaaatttcctctgtttgtcttttttataaatcttcagaattgtaaa

SEQ ID NO: 349093 - DNA, 3108 bp, Homo sapiens
gcggcggaggcggaggcccggcgccctgggcggcgccctgtccccgaagtccgtcctccccgttaggtggcgagcgcccgaggggaggggacagccgggcaagcaggaagctgcggcttaaaagggcaacccgcgcgggacccttcctccctagtcgcggggagtctgagaaagcgcgcctgtttcgcgaccatcacgcacctcccctccgcttgtggccatgtaccgctacctgggcgaagcgctgttgctgtcccgggccgggcccgctgccctgggctcggcgtccgccgactcggccgcgttgctgggctgggcccggggacagcccgccgccgccccgcagccggggctggcattggccgcccggcgccactacagcgaggcggtggccgaccgcgaggacgaccccaacttcttcaagatggtggagggcttcttcgatcgcggcgccagcatcgtggaggacaagctggtggaggacctgaggacccgggagagcgaggagcagaagcggaaccgggtgcgcggcatcctgcggatcatcaagccctgcaaccatgtgctgagtctctccttccccatccggcgcgacgacggctcctgggaggtcatcgaaggctaccgggcccagcacagccagcaccgcacgccctgcaagggaggtatccgttacagcactgatgtgagtgtagatgaagtaaaagctttggcttctctgatgacatacaagtgtgcagtggttgatgtgccgtttgggggtgctaaagctggtgttaagatcaatcccaagaactatactgataatgaattggaaaagatcacaaggaggttcaccatggagctagcaaaaaagggctttattggtcctggcattgatgtgcctgctccagacatgagcacaggtgagcgggagatgtcctggatcgctgatacctatgccagcaccatagggcactatgatattaatgcacacgcctgtgttactggtaaacccatcagccaagggggaatccatggacgcatctctgctactggccgtggtgtcttccatgggattgaaaatttcatcaatgaagcttcttacatgagcattttaggaatgacaccagggtttggagataaaacatttgttgttcagggatttggtaatgtgggcctacactctatgagatatttacatcgttttggtgctaaatgtattgctgttggtgagtctgatgggagtatatggaatccagatggtattgacccaaaggaactggaagacttcaaattgcaacatgggtccattctgggcttccccaaggcaaagccctatgaaggaagcatcttggaggccgactgtgacatactgatcccagctgccagtgagaagcagttgaccaaatccaacgcacccagagtcaaagccaagatcattgctgaaggtgccaatgggccaacaactccagaagctgacaagatcttcctggagagaaacattatggttattccagatctctacttgaatgctggaggagtgacagtatcttactttgagtggctgaagaatctaaatcatgtcagctatggccgtttgaccttcaaatatgaaagggattctaactaccacttgctcatgtctgttcaagagagtttagaaagagacaggatatcgggtgcatctgagaaagacatcgtgcactctggcttggcatacacaatggagcgttctgccaggcaaattatgcgcacagccatgaagtataacctgggattggacctgagaacagctgcctatgttaatgccattgagaaagtcttcaaagtgtacaatgaagctggtgtgaccttcacatagatggatcatggctgacttcctcactatcctcttcacatgtaacttctgcagacctatcacaagtttacatgtaaccacagaaatccctttctctcctgactcattaataatggataccattctcaacaagtcaatccaagtcagcccgttaaggagaaagaaattaaggttagcggatcatgtacaagctgagtgtgaaagtagaaatcacctacaccagagagccattttggtattttgcctttaaataaaaagcctcctttatctggctgtgcagccttgctctgtggcttttcccaacacaatcagtgctagtgctggggaggaacagtcaagagcagtcagttgcttgcttattttttctggatgagtctgggacacactgtaactttaacacatttaagaagtaggtgtgtggccttttcagaaggtggcatggtcctcaagtgagttcttagtattttatatcagcaaaataattcaattttgcaggttgcaaacaaatataaaacctgtttctgtttatgaatattattcttttagaatagaataagtacatgctgctgtaataaaattgcctttaatcacttaacaagcctaaccttgactcaaacagtgaatgcctatagaaataataaatgaaaaaaactagtatttttatatcataaaacaatgtcatttatagcttatcattcatgtattgtccagcagacattaaaagccctgtggataattaagttatcttcatacctgcaaaatggtggaggctattttcattaaaactgtcagaatttgcttactataattatgatacagtccaaagaatgcagtcactttttatcatgttaactaattgttctcttttgaagatctatggttgactaattaaacaataattcaagtagagtgtcccagaaaaaaaccacttgggctccctgtttggagtctggctggctctgagcattgccaatggcccctactcacctgactttgtatcctctccttttagaggctttgcattctgcacccagcttcactaacagtgggctgaaaacatccttgggttgagtgtttcatttgggagttatttggccagggccttttgaacagtagtgtccccatgaagtgctagataatatatgtgtaagagtcagctttttttttttttttaactctaacacccttcagaaatttctaactactttgtaactgcatggcttaacctggtgataaaagcagttattaaaagtctacgttttccaaaa

SEQ ID NO: 349094 - DNA, 1742 bp, Homo sapiens
cccgggggagaccagagagacaccagagagtagaaaccagagacccgtgacccgtgagaaaattttacccttagtcttaccccgcccttggaactaaacttccctttttgggttacagttatagtttgggactacttttgattctacttttttttttttttttctgttagcaatatcttgatctcttgttatttttttgtagtgtctgttcaagagagtttagaaagaaaatttggaaagcatggtggaactattcccattgtacccacggcagagttccaagacaggatatcgggtgcatctgagaaagacatcgtgcactctggcttggcatacacaatggagcgttctgccaggcaaattatgcgcacagccatgaagtataacctgggattggacctgagaacagctgcctatgttaatgccattgagaaagtcttcaaagtgtacaatgaagctggtgtgaccttcacatagatggatcatggctgacttcctcactatcctcttcacatgtaacttctgcagacctatcacaagtttacatgtaaccacagaaatccctttctctcctgactcattaataatggataccattctcaacaagtcaatccaagtcagcccgttaaggagaaagaaattaaggttagcggatcatgtacaagctgagtgtgaaagtagaaatcacctacaccagagagccattttggtattttgcctttaaataaaaagcctcctttatctggctgtgcagccttgctctgtggcttttcccaacacaatcagtgctagtgctggggaggaacagtcaagagcagtcagttgcttgcttattttttctggatgagtctgggacacactgtaactttaacacatttaagaagtaggtgtgtggccttttcagaaggtggcatggtcctcaagtgagttcttagtattttatatcagcaaaataattcaattttgcaggttgcaaacaaatataaaacctgtttctgtttatgaatattattcttttagaatagaataagtacatgctgctgtaataaaattgcctttaatcacttaacaagcctaaccttgactcaaacagtgaatgcctatagaaataataaatgaaaaaaactagtatttttatatcataaaacaatgtcatttatagcttatcattcatgtattgtccagcagacattaaaagccctgtggataattaagttatcttcatacctgcaaaatggtggaggctattttcattaaaactgtcagaatttgcttactataattatgatacagtccaaagaatgcagtcactttttatcatgttaactaattgttctcttttgaagatctatggttgactaattaaacaataattcaagtagagtgtcccagaaaaaaaccacttgggctccctgtttggagtctggctggctctgagcattgccaatggcccctactcacctgactttgtatcctctccttttagaggctttgcattctgcacccagcttcactaacagtgggctgaaaacatccttgggttgagtgtttcatttgggagttatttggccagggccttttgaacagtagtgtccccatgaagtgctagataatatatgtgtaagagtcagctttttttttttttttaactctaacacccttcagaaatttctaactactttgtaactgcatggcttaacctggtgataaaagcagttattaaaagtctacgttttccaaaa

SEQ ID NO: 349095 - DNA, 2981 bp, Homo sapiens
gcggcggaggcggaggcccggcgccctgggcggcgccctgtccccgaagtccgtcctccccgttaggtggcgagcgcccgaggggaggggacagccgggcaagcaggaagctgcggcttaaaagggcaacccgcgcgggacccttcctccctagtcgcggggagtctgagaaagcgcgcctgtttcgcgaccatcacgcacctcccctccgcttgtggccatgtaccgctacctgggcgaagcgctgttgctgtcccgggccgggcccgctgccctgggctcggcgtccgccgactcggccgcgttgctgggctgggcccggggacagcccgccgccgccccgcagccggggctggcattggccgcccggcgccactacagcgaggcggtggccgaccgcgaggacgaccccaacttcttcaagatggtggagggcttcttcgatcgcggcgccagcatcgtggaggacaagctggtggaggacctgaggacccgggagagcgaggagcagaagcggaaccgggtgcgcggcatcctgcggatcatcaagccctgcaaccatgtgctgagtctctccttccccatccggcgcgacgacggctcctgggaggtcatcgaaggctaccgggcccagcacagccagcaccgcacgccctgcaagggaggtatccgttacagcactgatgtgagtgtagatgaagtaaaagctttggcttctctgatgacatacaagtgtgcagtggttgatgtgccgtttgggggtgctaaagctggtgttaagatcaatcccaagaactatactgataatgaattggaaaagatcacaaggaggttcaccatggagctagcaaaaaagggctttattggtcctggcattgatgtgcctgctccagacatgagcacaggtgagcgggagatgtcctggatcgctgatacctatgccagcaccatagggcactatgatattaatgcacacgcctgtgttactggtaaacccatcagccaagggggaatccatggacgcatctctgctactggccgtggtgtcttccatgggattgaaaatttcatcaatgaagcttcttacatgagcattttaggaatgacaccagggtttggagataaaacatttgttgttcagggatttggtaatgtgggcctacactctatgagatatttacatcgttttggtgctaaatgtattgctgttggtgagtctgatgggagtatatggaatccagatggtattgacccaaaggaactggaagacttcaaattgcaacatgggtccattctgggcttccccaaggcaaagccctatgaaggaagcatcttggaggccgactgtgacatactgatcccagctgccagtgagaagcagttgaccaaatccaacgcacccagagtcaaagccaagatcattgctgaaggtgccaatgggccaacaactccagaagctgacaagatcttcctggagagaaacattatggttattccagatctctacttgaatgctggaggagtgacagtatcttactttgagtggctgaagaatctaaatcatgtcagctatggccgtttgaccttcaaatatgaaagggattctaactaccacttgctcatgtctgttcaagagagtttagaaagaaaatttggaaagcatggtggaactattcccattgtacccacggcagagttccaagacaggatatcgggtgcatctgagaaagacatcgtgcactctggcttggcatacacaatggagcgttctgccaggcaaattatgcgcacagccatgaagtataacctgggattggacctgagaacagctgcctatgttaatgccattgagaaagtcttcaaagtgtacaatgaagctggtgtgaccttcacatagatggatcatggctgacttcctcactatcctcttcacatgtaacttctgcagacctatcacaagtttacatgtaaccacagaaatccctttctctcctgactcattaataatggataccattctcaacaagtcaatccaagtcagcccgttaaggagaaagaaattaaggttagcggatcatgtacaagctgagtgtgaaagtagaaatcacctacaccagagagccattttggtattttgcctttaaataaaaagcctcctttatctggctgtgcagcagtcagttgcttgcttattttttctggatgagtctgggacacactgtaactttaacacattgtttatgaatattattcttttagaatagaataagtacatgctgctgtaataaaattgcctttaatcacttaacaagcctaaccttgactcaaacagtgaatgcctatagaaataataaatgaaaaaaactagtatttttatatcataaaacaatgtcatttatagcttatcattcatgtattgtccagcagacattaaaagccctgtggataattaagttatcttcatacctgcaaaatggtggaggctattttcattaaaactgtcagaatttgcttactataattatgatacagtccaaagaatgcagtcactttttatcatgttaactaattgttctcttttgaagatctatggttgactaattaaacaataattcaagtagagtgtcccagaaaaaaaccacttgggctccctgtttggagtctggctggctctgagcattgccaatggcccctactcacctgactttgtatcctctccttttagaggctttgcattctgcacccagcttcactaacagtgggctgaaaacatccttgggttgagtgtttcatttgggagttatttggccagggccttttgaacagtagtgtccccatgaagtgctagataatatatgtgtaagagtcagctttttttttttttttaactctaacacccttcagaaatttctaactactttgtaactgcatggcttaacctggtgataaaagcagttattaaaagtctacgttttccaaaa

SEQ ID NO: 349096 - DNA, 2950 bp, Homo sapiens
gcggcggaggcggaggcccggcgccctgggcggcgccctgtccccgaagtccgtcctccccgttaggtggcgagcgcccgaggggaggggacagccgggcaagcaggaagctgcggcttaaaagggcaacccgcgcgggacccttcctccctagtcgcggggagtctgagaaagcgcgcctgtttcgcgaccatcacgcacctcccctccgcttgtggccatgtaccgctacctgggcgaagcgctgttgctgtcccgggccgggcccgctgccctgggctcggcgtccgccgactcggccgcgttgctgggctgggcccggggacagcccgccgccgccccgcagccggggctggcattggccgcccggcgccactacagcgaggcggtggccgaccgcgaggacgaccccaacttcttcaagatggtggagggcttcttcgatcgcggcgccagcatcgtggaggacaagctggtggaggacctgaggacccgggagagcgaggagcagaagcggaaccgggtgcgcggcatcctgcggatcatcaagccctgcaaccatgtgctgagtctctccttccccatccggcgcgacgacggctcctgggaggtcatcgaaggctaccgggcccagcacagccagcaccgcacgccctgcaagggaggtatccgttacagcactgatgtgagtgtagatgaagtaaaagctttggcttctctgatgacatacaagtgtgcagtggttgatgtgccgtttgggggtgctaaagctggtgttaagatcaatcccaagaactatactgataatgaattggaaaagatcacaaggaggttcaccatggagctagcaaaaaagggctttattggtcctggcattgatgtgcctgctccagacatgagcacaggtgagcgggagatgtcctggatcgctgatacctatgccagcaccatagggcactatgatattaatgcacacgcctgtgttactggtaaacccatcagccaagggggaatccatggacgcatctctgctactggccgtggtgtcttccatgggattgaaaatttcatcaatgaagcttcttacatgagcattttaggaatgacaccagggtttggagataaaacatttgttgttcagggatttggtaatgtgggcctacactctatgagatatttacatcgttttggtgctaaatgtattgctgttggtgagtctgatgggagtatatggaatccagatggtattgacccaaaggaactggaagacttcaaattgcaacatgggtccattctgggcttccccaaggcaaagccctatgaaggaagcatcttggaggccgactgtgacatactgatcccagctgccagtgagaagcagttgaccaaatccaacgcacccagagtcaaagccaagatcattgctgaaggtgccaatgggccaacaactccagaagctgacaagatcttcctggagagaaacattatggttattccagatctctacttgaatgctggaggagtgacagtatcttactttgagtggctgaagaatctaaatcatgtcagctatggccgtttgaccttcaaatatgaaagggattctaactaccacttgctcatgtctgttcaagagagtttagaaagaaaatttggaaagcatggtggaactattcccattgtacccacggcagagttccaagacaggatatcgggtgcatctgagaaagacatcgtgcactctggcttggcatacacaatggagcgttctgccaggcaaattatgcgcacagccatgaagtataacctgggattggacctgagaacagctgcctatgttaatgccattgagaaagtcttcaaagtgtacaagctgagtgtgaaagtagaaatcacctacaccagagagccattttggtattttgcctttaaataaaaagcctcctttatctggctgtgcagccttgctctgtggcttttcccaacacaatcagtgctagtgctggggaggaacagtcaagagcagtcagttgcttgcttattttttctggatgagtctgggacacactgtaactttaacacatttaagaagtaggtgtgtggccttttcagaaggtggcatggtcctcaagtgagttcttagtattttatatcagcaaaataattcaattttgcaggttgcaaacaaatataaaacctgtttctgtttatgaatattattcttttagaatagaataagtacatgctgctgtaataaaattgcctttaatcacttaacaagcctaaccttgactcaaacagtgaatgcctatagaaataataaatgaaaaaaactagtatttttatatcataaaacaatgtcatttatagcttatcattcatgtattgtccagcagacattaaaagccctgtggataattaagttatcttcatacctgcaaaatggtggaggctattttcattaaaactgtcagaatttgcttactataattatgatacagtccaaagaatgcagtcactttttatcatgttaactaattgttctcttttgaagatctatggttgactaattaaacaataattcaagtagagtgtcccagaaaaaaaccacttgggctccctgtttggagtctggctggctctgagcattgccaatggcccctactcacctgactttgtatcctctccttttagaggctttgcattctgcacccagcttcactaacagtgggctgaaaacatccttgggttgagtgtttcatttgggagttatttggccagggccttttgaacagtagtgtccccatgaagtgctagataatatatgtgtaagagtcagctttttttttttttttaactctaacacccttcagaaatttctaactactttgtaactgcatggcttaacctggtgataaaagcagttattaaaagtctacgttttccaaaa

SEQ ID NO: 349097 - DNA, 2096 bp, Homo sapiens
gcggcggaggcggaggcccggcgccctgggcggcgccctgtccccgaagtccgtcctccccgttaggtggcgagcgcccgaggggaggggacagccgggcaagcaggaagctgcggcttaaaagggcaacccgcgcgggacccttcctccctagtcgcggggagtctgagaaagcgcgcctgtttcgcgaccatcacgcacctcccctccgcttgtggccatgtaccgctacctgggcgaagcgctgttgctgtcccgggccgggcccgctgccctgggctcggcgtccgccgactcggccgcgttgctgggctgggcccggggacagcccgccgccgccccgcagccggggctggcattggccgcccggcgccactacagcgaggcggtggccgaccgcgaggacgaccccaacttcttcaagatggtggagggcttcttcgatcgcggcgccagcatcgtggaggacaagctggtggaggacctgaggacccgggagagcgaggagcagaagcggaaccgggtgcgcggcatcctgcggatcatcaagccctgcaaccatgtgctgagtctctccttccccatccggcgcgacgacggctcctgggaggtcatcgaaggctaccgggcccagcacagccagcaccgcacgccctgcaagggaggtatccgttacagcactgatgtgagtgtagatgaagtaaaagctttggcttctctgatgacatacaagtgtgcagtggttgatgtgccgtttgggggtgctaaagctggtgttaagatcaatcccaagaactatactgataatgaattggaaaagatcacaaggaggttcaccatggagctagcaaaaaagggctttattggtcctggcattgatgtgcctgctccagacatgagcacaggtgagcgggagatgtcctggatcgctgatacctatgccagcaccatagggcactatgatattaatgcacacgcctgtgttactggtaaacccatcagccaagggggaatccatggacgcatctctgctactggccgtggtgtcttccatgggattgaaaatttcatcaatgaagcttcttacatgagcattttaggaatgacaccagggtttggagataaaacatttgttgttcagggatttggtaatgtgggcctacactctatgagatatttacatcgttttggtgctaaatgtattgctgttggtgagtctgatgggagtatatggaatccagatggtattgacccaaaggaactggaagacttcaaattgcaacatgggtccattctgggcttccccaaggcaaagccctatgaaggaagcatcttggaggccgactgtgacatactgatcccagctgccagtgagaagcagttgaccaaatccaacgcacccagagtcaaagccaagatcattgctgaaggtgccaatgggccaacaactccagaagctgacaagatcttcctggagagaaacattatggttattccagatctctacttgaatgctggaggagtgacagtatcttactttgagtggctgaagaatctaaatcatgtcagctatggccgtttgaccttcaaatatgaaagggattctaactaccacttgctcatgtctgttcaagagagtttagaaagaaaatttggaaagcatggtggaactattcccattgtacccacggcagagttccaagacaggatatcggtgagtgtggtgaccccacagttgtacttcacacatgctccctgctctttccttcagacagagctggttagatggatttcatctgcggcatagtctttgtaattagcttgacagtaagtgcgtgacatgtgtgttttgtacctttccttttcattacattctaaaactggagtaagaatcctactgactactaacaaatataaaataaataaatttggtatttttcacgcacgtgttttaacagtgaaggattattatgtattttaattattttaagcttcagagaaataggaagaattgaaaagcaagcattagattgaactatatgggagtccaagagtttgagaccaacctggggaacatagtgagtccccatctctac

SEQ ID NO: 349098 - DNA, 1475 bp, Homo sapiens
gcggcggaggcggaggcccggcgccctgggcggcgccctgtccccgaagtccgtcctccccgttaggtggcgagcgcccgaggggaggggacagccgggcaagcaggaagctgcggcttaaaagggcaacccgcgcgggacccttcctccctagtcgcggggagtctgagaaagcgcgcctgtttcgcgaccatcacgcacctcccctccgcttgtggccatgtaccgctacctgggcgaagcgctgttgctgtcccgggccgggcccgctgccctgggctcggcgtccgccgactcggccgcgttgctgggctgggcccggggacagcccgccgccgccccgcagccggggctggcattggccgcccggcgccactacagcgaggcggtggccgaccgcgaggacgaccccaacttcttcaagatggtggagggcttcttcgatcgcggcgccagcatcgtggaggacaagctggtggaggacctgaggacccgggagagcgaggagcagaagcggaaccgggtgcgcggcatcctgcggatcatcaagccctgcaaccatgtgctgagtctctccttccccatccggcgcgacgacggctcctgggaggtcatcgaaggctaccgggcccagcacagccagcaccgcacgccctgcaagggaggtatccgttacagcactgatgtgagtgtagatgaagtaaaagctttggcttctctgatgacatacaagtgtgcagtggttgatgtgccgtttgggggtgctaaagctggtgttaagatcaatcccaagaactatactgataatgaattggaaaagatcacaaggaggttcaccatggagctagcaaaaaagggctttattggtcctggcattgatgtgcctgctccagacatgagcacaggtgagcgggagatgtcctggatcgctgatacctatgccagcaccatagggcactatgatattaatgcacacgcctgtgttactggtaaacccatcagccaagggggaatccatggacgcatctctgctactggccgtggtgtcttccatgggattgaaaatttcatcaatgaagcttcttacatgagcattttaggaatgacaccagggtttggagataaaacatttgttgttcagggatttggtaatgtgggcctacactctatgagatatttacatcgttttggtgctaaatgtattgctgttggtgagtctgatgggagtatatggaatccagcttcactaacagtgggctgaaaacatccttgggttgagtgtttcatttgggagttatttggccagggccttttgaacagtagtgtccccatgaagtgctagataatatatgtgtaagagtcagctttttttttttttttaactctaacacccttcagaaatttctaactactttgtaactgcatggcttaacctggtgataaaagcagttattaaaagtctacgttttccaaaa

SEQ ID NO: 349099 - DNA, 719 bp, Homo sapiens
actgcattttctctttcatttcagcaaattatgcgcacagccatgaagtataacctgggattggacctgagaacagctgcctatgttaatgccattgagaaagtcttcaaagtgtacaatgaagctggtgtgaccttcacatagatggatcatggctgacttcctcactatcctcttcacatgtaacttctgcagacctatcacaagtttacatgtaaccacagaaatccctttctctcctgactcattaataatggataccattctcaacaagtcaatccaagtcagcccgttaaggagaaagaaattaaggttagcggatcatgtacaagctgagtgtgaaagtagaaatcacctacaccagagagccattttggtattttgcctttaaataaaaagcctcctttatctggctgtgcagccttgctctgtggcttttcccaacacaatcagtgctagtgctggggaggaacagtcaagagcagtcagttgcttgcttattttttctggatgagtctgggacacactgtaactttaacacatttaagaagtaggtgtgtggccttttcagaaggtggcatggtcctcaagtgagttcttagtattttatatcagcaaaataattcaattttgcaggttgcaaacaaatataaaacctgtttctgtttatgaatattattcttttagaatagaataagtacatgctgctgtaataaaat

SEQ ID NO: 349100 - DNA, 419 bp, Homo sapiens
catgtgttaacatgtattttacttaggagaatcttaattaagttgaaattacttgaaaatagaagtggtggctggacacagtggctcatgcctgtattcccagcactttgggaggccaagacgggtggatcacttgaggccaggagttcgagaccagcctggccaacatggtgaaaccctgtctctactaaaagtagaaaaattaagccgggcgtggtggctcacgcctgtaatcccatcactttgggaggccaaggtgggcagatcacgaggtcaagagatcaagaccatcctggccaacatggtgaaacccggtctccgctaaaaataggaaaattagcagggtgtggtggtacacgcctgtagtcccagctactctggaggctgacgcaggagaatcacttgaacccgggaggtgg

SEQ ID NO: 349101 - DNA, 2440 bp, Homo sapiens
gtttaatcaagacaggatctcactatgttgcccaggcttgtctcaaattcctggactcaagccatcctcctgcctcggcctcccaaagtgctgggattacaggcataagccactgccccggcctagttggaattgttgtttgaggtcctggcattgatgtgcctgctccagacatgagcacaggtgagcgggagatgtcctggatcgctgatacctatgccagcaccatagggcactatgatattaatgcacacgcctgtgttactggtaaacccatcagccaagggggaatccatggacgcatctctgctactggccgtggtgtcttccatgggattgaaaatttcatcaatgaagcttcttacatgagcattttaggaatgacaccagggtttggagataaaacatttgttgttcagggatttggtaatgtgggcctacactctatgagatatttacatcgttttggtgctaaatgtattgctgttggtgagtctgatgggagtatatggaatccagatggtattgacccaaaggaactggaagacttcaaattgcaacatgggtccattctgggcttccccaaggcaaagccctatgaaggaagcatcttggaggccgactgtgacatactgatcccagctgccagtgagaagcagttgaccaaatccaacgcacccagagtcaaagccaagatcattgctgaaggtgccaatgggccaacaactccagaagctgacaagatcttcctggagagaaacattatggttattccagatctctacttgaatgctggaggagtgacagtatcttactttgagtggctgaagaatctaaatcatgtcagctatggccgtttgaccttcaaatatgaaagggattctaactaccacttgctcatgtctgttcaagagagtttagaaagaaaatttggaaagcatggtggaactattcccattgtacccacggcagagttccaagacaggatatcgggtgcatctgagaaagacatcgtgcactctggcttggcatacacaatggagcgttctgccaggcaaattatgcgcacagccatgaagtataacctgggattggacctgagaacagctgcctatgttaatgccattgagaaagtcttcaaagtgtacaatgaagctggtgtgaccttcacatagatggatcatggctgacttcctcactatcctcttcacatgtaacttctgcagacctatcacaagtttacatgtaaccacagaaatccctttctctcctgactcattaataatggataccattctcaacaagtcaatccaagtcagcccgttaaggagaaagaaattaaggttagcggatcatgtacaagctgagtgtgaaagtagaaatcacctacaccagagagccattttggtattttgcctttaaataaaaagcctcctttatctggctgtgcagccttgctctgtggcttttcccaacacaatcagtgctagtgctggggaggaacagtcaagagcagtcagttgcttgcttattttttctggatgagtctgggacacactgtaactttaacacatttaagaagtaggtgtgtggccttttcagaaggtggcatggtcctcaagtgagttcttagtattttatatcagcaaaataattcaattttgcaggttgcaaacaaatataaaacctgtttctgtttatgaatattattcttttagaatagaataagtacatgctgctgtaataaaattgcctttaatcacttaacaagcctaaccttgactcaaacagtgaatgcctatagaaataataaatgaaaaaaactagtatttttatatcataaaacaatgtcatttatagcttatcattcatgtattgtccagcagacattaaaagccctgtggataattaagttatcttcatacctgcaaaatggtggaggctattttcattaaaactgtcagaatttgcttactataattatgatacagtccaaagaatgcagtcactttttatcatgttaactaattgttctcttttgaagatctatggttgactaattaaacaataattcaagtagagtgtcccagaaaaaaaccacttgggctccctgtttggagtctggctggctctgagcattgccaatggcccctactcacctgactttgtatcctctccttttagaggctttgcattctgcacccagcttcactaacagtgggctgaaaacatccttgggttgagtgtttcatttgggagttatttggccagggccttttgaacagtagtgtccccatgaagtgctagataatatatgtgtaagagtcagctttttttttttttttaactctaacacccttcagaaatttctaactactttgtaactgcatggcttaacctggtgataaaagcagttattaaaagtctacgttttccaaaa

SEQ ID NO: 349102 - DNA, 2588 bp, Homo sapiens
tcttacaatgcatttactgtacagttaggaagcaaagtgttaaatggagaagatacttgtttttattaacattttgagatttagataactacattttaactgaatgtctaaagtgattatcttttgtccccccaagttagtcttaaatcttttgggtttgaatgaaggttttacataagaaattattaaaaacaaggggggtgggtaataaatgtatataacattaaataatgtaacgtaggtgtagattcccaaatgcatttggatgtacagatcgactacagagtacttttttcttatgatgattggtgtagaagtgtgtgatttgggtgggcttttacatcttgcctaccattgcatgaaacattggggtttcttcaaaatgtgtgtgtcatacttctgatgggagaagactggggtcccatcagccaagggggaatccatggacgcatctctgctactggccgtggtgtcttccatgggattgaaaatttcatcaatgaagcttcttacatgagcattttaggaatgacaccagggtttggagataaaacatttgttgttcagggatttggtaatgtgggcctacactctatgagatatttacatcgttttggtgctaaatgtattgctgttggtgagtctgatgggagtatatggaatccagatggtattgacccaaaggaactggaagacttcaaattgcaacatgggtccattctgggcttccccaaggcaaagccctatgaaggaagcatcttggaggccgactgtgacatactgatcccagctgccagtgagaagcagttgaccaaatccaacgcacccagagtcaaagccaagatcattgctgaaggtgccaatgggccaacaactccagaagctgacaagatcttcctggagagaaacattatggttattccagatctctacttgaatgctggaggagtgacagtatcttactttgagtggctgaagaatctaaatcatgtcagctatggccgtttgaccttcaaatatgaaagggattctaactaccacttgctcatgtctgttcaagagagtttagaaagaaaatttggaaagcatggtggaactattcccattgtacccacggcagagttccaagacaggatatcgggtgcatctgagaaagacatcgtgcactctggcttggcatacacaatggagcgttctgccaggcaaattatgcgcacagccatgaagtataacctgggattggacctgagaacagctgcctatgttaatgccattgagaaagtcttcaaagtgtacaatgaagctggtgtgaccttcacatagatggatcatggctgacttcctcactatcctcttcacatgtaacttctgcagacctatcacaagtttacatgtaaccacagaaatccctttctctcctgactcattaataatggataccattctcaacaagtcaatccaagtcagcccgttaaggagaaagaaattaaggttagcggatcatgtacaagctgagtgtgaaagtagaaatcacctacaccagagagccattttggtattttgcctttaaataaaaagcctcctttatctggctgtgcagccttgctctgtggcttttcccaacacaatcagtgctagtgctggggaggaacagtcaagagcagtcagttgcttgcttattttttctggatgagtctgggacacactgtaactttaacacatttaagaagtaggtgtgtggccttttcagaaggtggcatggtcctcaagtgagttcttagtattttatatcagcaaaataattcaattttgcaggttgcaaacaaatataaaacctgtttctgtttatgaatattattcttttagaatagaataagtacatgctgctgtaataaaattgcctttaatcacttaacaagcctaaccttgactcaaacagtgaatgcctatagaaataataaatgaaaaaaactagtatttttatatcataaaacaatgtcatttatagcttatcattcatgtattgtccagcagacattaaaagccctgtggataattaagttatcttcatacctgcaaaatggtggaggctattttcattaaaactgtcagaatttgcttactataattatgatacagtccaaagaatgcagtcactttttatcatgttaactaattgttctcttttgaagatctatggttgactaattaaacaataattcaagtagagtgtcccagaaaaaaaccacttgggctccctgtttggagtctggctggctctgagcattgccaatggcccctactcacctgactttgtatcctctccttttagaggctttgcattctgcacccagcttcactaacagtgggctgaaaacatccttgggttgagtgtttcatttgggagttatttggccagggccttttgaacagtagtgtccccatgaagtgctagataatatatgtgtaagagtcagctttttttttttttttaactctaacacccttcagaaatttctaactactttgtaactgcatggcttaacctggtgataaaagcagttattaaaagtctacgttttccaaaa

SEQ ID NO: 349103 - DNA, 3607 bp, Homo sapiens
gcggcggaggcggaggcccggcgccctgggcggcgccctgtccccgaagtccgtcctccccgttaggtggcgagcgcccgaggggaggggacagccgggcaagcaggaagctgcggcttaaaagggcaacccgcgcgggacccttcctccctagtcgcggggagtctgagaaagcgcgcctgtttcgcgaccatcacgcacctcccctccgcttgtggccatgtaccgctacctgggcgaagcgctgttgctgtcccgggccgggcccgctgccctgggctcggcgtccgccgactcggccgcgttgctgggctgggcccggggacagcccgccgccgccccgcagccggggctggcattggccgcccggcgccactacagcgaggcggtggccgaccgcgaggacgaccccaacttcttcaagatggtggagggcttcttcgatcgcggcgccagcatcgtggaggacaagctggtggaggacctgaggacccgggagagcgaggagcagaagcggaaccgggtgcgcggcatcctgcggatcatcaagccctgcaaccatgtgctgagtctctccttccccatccggcgcgacgacggctcctgggaggtcatcgaaggctaccgggcccagcacagccagcaccgcacgccctgcaagggaggtatccgttacagcactgatgtgagtgtagatgaagtaaaagctttggcttctctgatgacatacaagtgtgcagtggttgatgtgccgtttgggggtgctaaagctggtgttaagatcaatcccaagaactatactgataatgaattggaaaagatcacaaggaggttcaccatggagctagcaaaaaagggctttattggtcctggcattgatgtgcctgctccagacatgagcacaggtgagcgggagatgtcctggatcgctgatacctatgccagcaccatagggcactatgatattaatgcacacgcctgtgttactggtaaacccatcagccaagggggaatccatggacgcatctctgctactggccgtggtgtcttccatgggattgaaaatttcatcaatgaagcttcttacatgagcattttaggaatgacaccagggtttggagataaaacatttgttgttcagggatttggtaatgtgggcctacactctatgagatatttacatcgttttggtgctaaatgtattgctgttggtgagtctgatgggagtatatggaatccagatggtattgacccaaaggaactggaagacttcaaattgcaacatgggtccattctgggcttccccaaggcaaagccctatgaaggaagcatcttggaggccgactgtgacatactgatcccagctgccagtgagaagcagttgaccaaatccaacgcacccagagtcaaagccaaggtgacaacattatagaaaccagaaccaacattatcaatgtgaatgacgttaggggggtcatagaagagtctgattgagttttctctttctttttagcagctttattggcacatactgcacataccatacagttcccccatttaaggtacataatttaatggcttttagctaccggcacagagttgtgcaaccattaccaaaacaaacgcatctgcctgacactcctgtaaaaaaaaaaaacaagcaaacaaaaaaaaacctagataaatagaaaagtgaaaggtagttttatacacttggcagagaaaaataacctctatttaactttaactgaaactgtgcttctccccacagccccttgttcatatatgcacatctcttgccctcagtggaggggatttgacggtggtgttcgcatttctctatgttcctgactctcttgcagatcattgctgaaggtgccaatgggccaacaactccagaagctgacaagatcttcctggagagaaacattatggttattccagatctctacttgaatgctggaggagtgacagtatcttactttgagtggctgaagaatctaaatcatgtcagctatggccgtttgaccttcaaatatgaaagggattctaactaccacttgctcatgtctgttcaagagagtttagaaagaaaatttggaaagcatggtggaactattcccattgtacccacggcagagttccaagacaggatatcgggtgcatctgagaaagacatcgtgcactctggcttggcatacacaatggagcgttctgccaggcaaattatgcgcacagccatgaagtataacctgggattggacctgagaacagctgcctatgttaatgccattgagaaagtcttcaaagtgtacaatgaagctggtgtgaccttcacatagatggatcatggctgacttcctcactatcctcttcacatgtaacttctgcagacctatcacaagtttacatgtaaccacagaaatccctttctctcctgactcattaataatggataccattctcaacaagtcaatccaagtcagcccgttaaggagaaagaaattaaggttagcggatcatgtacaagctgagtgtgaaagtagaaatcacctacaccagagagccattttggtattttgcctttaaataaaaagcctcctttatctggctgtgcagccttgctctgtggcttttcccaacacaatcagtgctagtgctggggaggaacagtcaagagcagtcagttgcttgcttattttttctggatgagtctgggacacactgtaactttaacacatttaagaagtaggtgtgtggccttttcagaaggtggcatggtcctcaagtgagttcttagtattttatatcagcaaaataattcaattttgcaggttgcaaacaaatataaaacctgtttctgtttatgaatattattcttttagaatagaataagtacatgctgctgtaataaaattgcctttaatcacttaacaagcctaaccttgactcaaacagtgaatgcctatagaaataataaatgaaaaaaactagtatttttatatcataaaacaatgtcatttatagcttatcattcatgtattgtccagcagacattaaaagccctgtggataattaagttatcttcatacctgcaaaatggtggaggctattttcattaaaactgtcagaatttgcttactataattatgatacagtccaaagaatgcagtcactttttatcatgttaactaattgttctcttttgaagatctatggttgactaattaaacaataattcaagtagagtgtcccagaaaaaaaccacttgggctccctgtttggagtctggctggctctgagcattgccaatggcccctactcacctgactttgtatcctctccttttagaggctttgcattctgcacccagcttcactaacagtgggctgaaaacatccttgggttgagtgtttcatttgggagttatttggccagggccttttgaacagtagtgtccccatgaagtgctagataatatatgtgtaagagtcagctttttttttttttttaactctaacacccttcagaaatttctaactactttgtaactgcatggcttaacctggtgataaaagcagttattaaaagtctacgttttccaaaa

SEQ ID NO: 349104 - DNA, 3024 bp, Homo sapiens
gcggcggaggcggaggcccggcgccctgggcggcgccctgtccccgaagtccgtcctccccgttaggtggcgagcgcccgaggggaggggacagccgggcaagcaggaagctgcggcttaaaagggcaacccgcgcgggacccttcctccctagtcgcggggagtctgagaaagcgcgcctgtttcgcgaccatcacgcacctcccctccgcttgtggccatgtaccgctacctgggcgaagcgctgttgctgtcccgggccgggcccgctgccctgggctcggcgtccgccgactcggccgcgttgctgggctgggcccggggacagcccgccgccgccccgcagccggggctggcattggccgcccggcgccactacagcgaggcggtggccgaccgcgaggacgaccccaacttcttcaagatggtggagggcttcttcgatcgcggcgccagcatcgtggaggacaagctggtggaggacctgaggacccgggagagcgaggagcagaagcggaaccgggtgcgcggcatcctgcggatcatcaagccctgcaaccatgtgctgagtctctccttccccatccggcgcgacgacggctcctgggaggtcatcgaaggctaccgggcccagcacagccagcaccgcacgccctgcaagggaggtatccgttacagcactgatgtgagtgtagatgaagtaaaagctttggcttctctgatgacatacaagtgtgcagtggttgatgtgccgtttgggggtgctaaagctggtgttaagatcaatcccaagaactatactgataatgaattggaaaagatcacaaggaggttcaccatggagctagcaaaaaagggctttattggtcctggcattgatgtgcctgctccagacatgagcacaggtgagcgggagatgtcctggatcgctgatacctatgccagcaccatagggcactatgatattaatgcacacgcctgtgttactggtaaacccatcagccaagggggaatccatggacgcatctctgctactggccgtggtgtcttccatgggattgaaaatttcatcaatgaagcttcttacatgagcattttaggaatgacaccagggtttggagataaaacatttgttgttcagggatttggtaatgtgggcctacactctatgagatatttacatcgttttggtgctaaatgtattgctgttggtgagtctgatgggagtatatggaatccagatggtattgacccaaaggaactggaagacttcaaattgatcattgctgaaggtgccaatgggccaacaactccagaagctgacaagatcttcctggagagaaacattatggttattccagatctctacttgaatgctggaggagtgacagtatcttactttgagtggctgaagaatctaaatcatgtcagctatggccgtttgaccttcaaatatgaaagggattctaactaccacttgctcatgtctgttcaagagagtttagaaagaaaatttggaaagcatggtggaactattcccattgtacccacggcagagttccaagacaggatatcgggtgcatctgagaaagacatcgtgcactctggcttggcatacacaatggagcgttctgccaggcaaattatgcgcacagccatgaagtataacctgggattggacctgagaacagctgcctatgttaatgccattgagaaagtcttcaaagtgtacaatgaagctggtgtgaccttcacatagatggatcatggctgacttcctcactatcctcttcacatgtaacttctgcagacctatcacaagtttacatgtaaccacagaaatccctttctctcctgactcattaataatggataccattctcaacaagtcaatccaagtcagcccgttaaggagaaagaaattaaggttagcggatcatgtacaagctgagtgtgaaagtagaaatcacctacaccagagagccattttggtattttgcctttaaataaaaagcctcctttatctggctgtgcagccttgctctgtggcttttcccaacacaatcagtgctagtgctggggaggaacagtcaagagcagtcagttgcttgcttattttttctggatgagtctgggacacactgtaactttaacacatttaagaagtaggtgtgtggccttttcagaaggtggcatggtcctcaagtgagttcttagtattttatatcagcaaaataattcaattttgcaggttgcaaacaaatataaaacctgtttctgtttatgaatattattcttttagaatagaataagtacatgctgctgtaataaaattgcctttaatcacttaacaagcctaaccttgactcaaacagtgaatgcctatagaaataataaatgaaaaaaactagtatttttatatcataaaacaatgtcatttatagcttatcattcatgtattgtccagcagacattaaaagccctgtggataattaagttatcttcatacctgcaaaatggtggaggctattttcattaaaactgtcagaatttgcttactataattatgatacagtccaaagaatgcagtcactttttatcatgttaactaattgttctcttttgaagatctatggttgactaattaaacaataattcaagtagagtgtcccagaaaaaaaccacttgggctccctgtttggagtctggctggctctgagcattgccaatggcccctactcacctgactttgtatcctctccttttagaggctttgcattctgcacccagcttcactaacagtgggctgaaaacatccttgggttgagtgtttcatttgggagttatttggccagggccttttgaacagtagtgtccccatgaagtgctagataatatatgtgtaagagtcagctttttttttttttttaactctaacacccttcagaaatttctaactactttgtaactgcatggcttaacctggtgataaaagcagttattaaaagtctacgttttccaaaa

SEQ ID NO: 349105 - DNA, 3720 bp, Homo sapiens
  misc_feature (3372)..(3372): n is a, c, g, or t
gcggcggaggcggaggcccggcgccctgggcggcgccctgtccccgaagtccgtcctccccgttaggtggcgagcgcccgaggggaggggacagccgggcaagcaggaagctgcggcttaaaagggcaacccgcgcgggacccttcctccctagtcgcggggagtctgagaaagcgcgcctgtttcgcgaccatcacgcacctcccctccgcttgtggccatgtaccgctacctgggcgaagcgctgttgctgtcccgggccgggcccgctgccctgggctcggcgtccgccgactcggccgcgttgctgggctgggcccggggacagcccgccgccgccccgcagccggggctggcattggccgcccggcgccactacagcgaggcggtggccgaccgcgaggacgaccccaacttcttcaagatggtggagggcttcttcgatcgcggcgccagcatcgtggaggacaagctggtggaggacctgaggacccgggagagcgaggagcagaagcggaaccgggtgcgcggcatcctgcggatcatcaagccctgcaaccatgtgctgagtctctccttccccatccggcgcgacgacggctcctgggaggtcatcgaaggctaccgggcccagcacagccagcaccgcacgccctgcaagggaggtatccgttacagcactgatgtgagtgtagatgaagtaaaagctttggcttctctgatgacatacaagtgtgcagtggttgatgtgccgtttgggggtgctaaagctggtgttaagatcaatcccaagaactatactgataatgaattggaaaagatcacaaggaggttcaccatggagctagcaaaaaagggctttattggtcctggcattgatgtgcctgctccagacatgagcacaggtgagcgggagatgtcctggatcgctgatacctatgccagcaccatagggcactatgatattaatgcacacgcctgtgttactggtaaacccatcagccaagggggaatccatggacgcatctctgctactggccgtggtgtcttccatgggattgaaaatttcatcaatgaagcttcttacatgagcattttaggaatgacaccagggtttggagataaaacatttgttgttcagggatttggtaatgtgggcctacactctatgagatatttacatcgttttggtgctaaatgtattgctgttggtgagtctgatgggagtatatggaatccagatggtattgacccaaaggaactggaagacttcaaattgcaacatgggtccattctgggcttccccaaggcaaagccctatgaaggaagcatcttggaggccgactgtgacatactgatcccagctgccagtgagaagcagttgaccaaatccaacgcacccagagtcaaagccaagatcattgctgaaggtgccaatgggccaacaactccagaagctgacaagatcttcctggagagaaacattatggttattccagatctctacttgaatgctggaggagtgacagtatcttactttgagtggctgaagaatctaaatcatgtcagctatggccgtttgaccttcaaatatgaaagggattctaactaccacttgctcatgtctgttcaagagagtttagaaagaaaatttggaaagcatggtggaactattcccattgtacccacggcagagttccaagacaggatatcgggtgcatctgagaaagacatcgtgcactctggcttggcatacacaatggagcgttctgccaggcaaattatgcgcacagccatgaagtataacctgggattggacctgagaacagctgcctatgttaatgccattgagaaagtcttcaaagtgtacaatgaagctggtgtgaccttcacatagatggatcatggctgacttcctcactatcctcttcacatgtaacttctgcagacctatcacaagtttacatgtaaccacagaaatccctttctctcctgactcattaataatggataccattctcaacaagtcaatccaagtcagcccgttaaggagaaagaaattaaggttagcggatcatgtacaagctgagtgtgaaagtagaaatcacctacaccagagagccattttggtattttgcctttaaataaaaagcctcctttatctggctgtgcagccttgctctgtggcttttcccaacacaatcagtgctagtgctggggaggaacagtcaagagcagtcagttgcttgcttattttttctggatgagtctgggacacactgtaactttaacacatttaagaagtaggtgtgtggccttttcagaaggtggcatggtcctcaagtgagttcttagtattttatatcagcaaaataattcaattttgcaggttgcaaacaaatataaaacctgtttctgtttatgaatattattcttttagaatagaataagtacatgctgctgtaataaaattgcctttaatcacttaacaagcctaaccttgactcaaacagtgaatgcctatagaaataataaatgaaaaaaactagtatttttatatcataaaacaatgtcatttatagcttatcattcatgtattgtccagcagacattaaaagccctgtggataattaagttatcttcatacctgcaaaatggtggaggctattttcattaaaactgtcagaatttgcttactataattatgatacagtccaaagaatgcagtcactttttatcatgttaactaattgttctcttttgaagatctatggttgactaattaaacaataattcaagtagagtgtcccagaaaaaaaccacttgggctccctgtttggagtctggctggctctgagcattgccaatggcccctactcacctgactttgtatcctctccttttagaggctttgcattctgcacccagcttcactaacagtgggctgaaaacatccttgggttgagtgtttcatttgggagttatttggccagggccttttgaacagtagtgtccccatgaagtgctagataatatatgtgtaagagtcagctttttttttttttttaactctaacacccttcagaaatttctaactactttgtaactgcatggcttaacctggtgataaaagcagttattaaaagtctacgttttccaaaacttccatattgagactagggactagtgcacagacgtaaatcctctttagtcaggggtaatatctttgctccaaatcaggcccgagcttacttgtctaagactgtgcctttcttggcagagccattcctcctaactgaggcttccatatcacttcggaaattttaacaaaccggaataggctattgggctcatattattgaccctccaaanccgagcatgaaacccttggatgtcttcggtacccaccgaatggccattgacgggcaacatccccccttgccggtctataaaccacccgcttggtattgggaatcaatcccaactgcttcatgaaattttttaaaaccgctcccccacaaattccatcgataacacattggcccctctttccccccactggaaaatcttattggaaaaaggttgcttcgaaataattggttgtaataaaaaaggggttacaacaaaaaaaatttttaaaacccaccttttctcatggggggggggccctctttttttgcgggtaaagaagccccgacaaaacggttctttttgtgttga

SEQ ID NO: 349106 - DNA, 3115 bp, Homo sapiens
gcggcggaggcggaggcccggcgccctgggcggcgccctgtccccgaagtccgtcctccccgttaggtggcgagcgcccgaggggaggggacagccgggcaagcaggaagctgcggcttaaaagggcaacccgcgcgggacccttcctccctagtcgcggggagtctgagaaagcgcgcctgtttcgcgaccatcacgcacctcccctccgcttgtggccatgtaccgctacctgggcgaagcgctgttgctgtcccgggccgggcccgctgccctgggctcggcgtccgccgactcggccgcgttgctgggctgggcccggggacagcccgccgccgccccgcagccggggctggcattggccgcccggcgccactacagcgaggcggtggccgaccgcgaggacgaccccaacttcttcaagatggtggagggcttcttcgatcgcggcgccagcatcgtggaggacaagctggtggaggacctgaggacccgggagagcgaggagcagaagcggaaccgggtgcgcggcatcctgcggatcatcaagccctgcaaccatgtgctgagtctctccttccccatccggcgcgacgacggctcctgggaggtcatcgaaggctaccgggcccagcacagccagcaccgcacgccctgcaagggaggtatccgttacagcactgatgtgagtgtagatgaagtaaaagctttggcttctctgatgacatacaagtgtgcagtggttgatgtgccgtttgggggtgctaaagctggtgttaagatcaatcccaagaactatactgataatgaattggaaaagatcacaaggaggttcaccatggagctagcaaaaaagggctttattggtcctggcattgatgtgcctgctccagacatgagcacaggtgagcgggagatgtcctggatcgctgatacctatgccagcaccatagggcactatgatattaatgcacacgcctgtgttactggtaaacccatcagccaagggggaatccatggacgcatctctgctactggccgtggtgtcttccatgggattgaaaatttcatcaatgaagcttcttacatgagcattttaggaatgacaccagggtttggagataaaacatttgttgttcagggatttggtaatgtgggcctacactctatgagatatttacatcgttttggtgctaaatgtattgctgttggtgagtctgatgggagtatatggaatccagatggtattgacccaaaggaactggaagacttcaaattgcaacatgggtccattctgggcttccccaaggcaaagccctatgaaggaagcatcttggaggccgactgtgacatactgatcccagctgccagtgagaagcagttgaccaaatccaacgcacccagagtcaaagccaagatcattgctgaaggtgccaatgggccaacaactccagaagctgacaagatcttcctggagagaaacattatggttattccagatctctacttgaatgctggaggagtgacagtatcttactttgagtggctgaagaatctaaatcatgtcagctatggccgtttgaccttcaaatatgaaagggattctaactaccacttgctcatgtctgttcaagagagtttagaaagaaaatttggaaagcatggtggaactattcccattgtacccacggcagagttccaagacaggatatcgggtgcatctgagaaagacatcgtgcactctggcttggcatacacaatggagcgttctgccaggcaaattatgcgcacagccatgaagtataacctgggattggacctgagaacagctgcctatgttaatgccattgagaaagtcttcaaagtgtacaatgaagctggtgtgaccttcacatagatggatcatggctgacttcctcactatcctcttcacatgtaacttctgcagacctatcacaagtttacatgtaaccacagaaatccctttctctcctgactcattaataatggataccattctcaacaagtcaatccaagtcagcccgttaaggagaaagaaattaaggttagcggatcatgtacaagctgagtgtgaaagtagaaatcacctacaccagagagccattttggtattttgcctttaaataaaaagcctcctttatctggctgtgcagccttgctctgtggcttttcccaacacaatcagtgctagtgctggggaggaacagtcaagagcagtcagttgcttgcttattttttctggatgagtctgggacacactgtaactttaacacatttaagaagtaggtgtgtggccttttcagaaggtggcatggtcctcaagtgagttcttagtattttatatcagcaaaataattcaattttgcaggttgcaaacaaatataaaacctgtttctgtttatgaatattattcttttagaatagaataagtacatgctgctgtaataaaattgcctttaatcacttaacaagcctaaccttgactcaaacagtgaatgcctatagaaataataaatgaaaaaaactagtatttttatatcataaaacaatgtcatttatagcttatcattcatgtattgtccagcagacattaaaagccctgtggataattaagttatcttcatacctgcaaaatggtggaggctattttcattaaaactgtcagaatttgcttactataattatgatacagtccaaagaatgcagtcactttttatcatgttaactaattgttctcttttgaagatctatggttgactaattaaacaataattcaagtagagtgtcccagaaaaaaaccacttgggctccctgtttggagtctggctggctctgagcattgccaatggcccctactcacctgactttgtatcctctccttttagaggctttgcattctgcacccagcttcactaacagtgggctgaaaacatccttgggttgagtgtttcatttgggagttatttggccagggccttttgaacagtagtgtccccatgagagtcttaactctgtcacccaggctggagtgcagtggtgcaatctccttgatggcaagcttggtggagagggctgaagctgttgctgggggccg

SEQ ID NO: 349107 - DNA, 3400 bp, Homo sapiens
  misc_feature (3392)..(3395): n is a, c, g, or t
  misc_feature (3397)..(3397): n is a, c, g, or t
gcggcggaggcggaggcccggcgccctgggcggcgccctgtccccgaagtccgtcctccccgttaggtggcgagcgcccgaggggaggggacagccgggcaagcaggaagctgcggcttaaaagggcaacccgcgcgggacccttcctccctagtcgcggggagtctgagaaagcgcgcctgtttcgcgaccatcacgcacctcccctccgcttgtggccatgtaccgctacctgggcgaagcgctgttgctgtcccgggccgggcccgctgccctgggctcggcgtccgccgactcggccgcgttgctgggctgggcccggggacagcccgccgccgccccgcagccggggctggcattggccgcccggcgccactacagcgaggcggtggccgaccgcgaggacgaccccaacttcttcaagatggtggagggcttcttcgatcgcggcgccagcatcgtggaggacaagctggtggaggacctgaggacccgggagagcgaggagcagaagcggaaccgggtgcgcggcatcctgcggatcatcaagccctgcaaccatgtgctgagtctctccttccccatccggcgcgacgacggctcctgggaggtcatcgaaggctaccgggcccagcacagccagcaccgcacgccctgcaagggaggtatccgttacagcactgatgtgagtgtagatgaagtaaaagctttggcttctctgatgacatacaagtgtgcagtggttgatgtgccgtttgggggtgctaaagctggtgttaagatcaatcccaagaactatactgataatgaattggaaaagatcacaaggaggttcaccatggagctagcaaaaaagggctttattggtcctggcattgatgtgcctgctccagacatgagcacaggtgagcgggagatgtcctggatcgctgatacctatgccagcaccatagggcactatgatattaatgcacacgcctgtgttactggtaaacccatcagccaagggggaatccatggacgcatctctgctactggccgtggtgtcttccatgggattgaaaatttcatcaatgaagcttcttacatgagcattttaggaatgacaccagggtttggagataaaacatttgttgttcagggatttggtaatgtgggcctacactctatgagatatttacatcgttttggtgctaaatgtattgctgttggtgagtctgatgggagtatatggaatccagatggtattgacccaaaggaactggaagacttcaaattgcaacatgggtccattctgggcttccccaaggcaaagccctatgaaggaagcatcttggaggccgactgtgacatactgatcccagctgccagtgagaagcagttgaccaaatccaacgcacccagagtcaaagccaagatcattgctgaaggtgccaatgggccaacaactccagaagctgacaagatcttcctggagagaaacattatggttattccagatctctacttgaatgctggaggagtgacagtatcttactttgagtggctgaagaatctaaatcatgtcagctatggccgtttgaccttcaaatatgaaagggattctaactaccacttgctcatgtctgttcaagagagtttagaaagaaaatttggaaagcatggtggaactattcccattgtacccacggcagagttccaagacaggatatcgggtgcatctgagaaagacatcgtgcactctggcttggcatacacaatggagcgttctgccaggcaaattatgcgcacagccatgaagtataacctgggattggacctgagaacagctgcctatgttaatgccattgagaaagtcttcaaagtgtacaatgaagctggtgtgaccttcacatagatggatcatggctgacttcctcactatcctcttcacatgtaacttctgcagacctatcacaagtttacatgtaaccacagaaatccctttctctcctgactcattaataatggataccattctcaacaagtcaatccaagtcagcccgttaaggagaaagaaattaaggttagcggatcatgtacaagctgagtgtgaaagtagaaatcacctacaccagagagccattttggtattttgcctttaaataaaaagcctcctttatctggctgtgcagccttgctctgtggcttttcccaacacaatcagtgctagtgctggggaggaacagtcaagagcagtcagttgcttgcttattttttctggatgagtctgggacacactgtaactttaacacatttaagaagtaggtgtgtggccttttcagaaggtggcatggtcctcaagtgagttcttagtattttatatcagcaaaataattcaattttgcaggttgcaaacaaatataaaacctgtttctgtttatgaatattattcttttagaatagaataagtacatgctgctgtaataaaattgcctttaatcacttaacaagcctaaccttgactcaaacagtgaatgcctatagaaataataaatgaaaaaaactagtatttttatatcataaaacaatgtcatttatagcttatcattcatgtattgtccagcagacattaaaagccctgtggataattaagttatcttcatacctgcaaaatggtggaggctattttcattaaaactgtcagaatttgcttactataattatgatacagtccaaagaatgcagtcactttttatcatgttaactaattgttctcttttgaagatctatggttgactaattaaacaataattcaagtagagtgtcccaggcccctactcacctgactttgtatcctctccttttagaggctttgcattctgcacccagcttcactaacagtgggctgaaaacatccttgggttgagtgtttcatttgggagttatttggccagggccttttgaacagtagtgtccccatgaagtgctagataatatatgtgtaagagtcagctttttttttttttttaactctaacacccttcagaaatttctaactactttgtaactgcatggcttaacctggtgataaaagcagttattaaaagtctacgttttccaaaaacttacgtttcttttctgtgtttttacatgtggtagtttctcttttcataagttataatactgcaattggatttctgaaatgtttatagcgaccacctgtataacatttccttccactttattgtgagctgcccagattttattcttgaattgttttttttttttttgttcggtgctttacacgttcagagaaacttcccgagtaacgaactatagaaatgatccctgaaagcatagtctttattctcgaattattttgtattttattaaataatatgaacagctannnnanaaa

SEQ ID NO: 349108 - DNA, 2528 bp, Homo sapiens
gcggcggaggcggaggcccggcgccctgggcggcgccctgtccccgaagtccgtcctccccgttaggtggcgagcgcccgaggggaggggacagccgggcaagcaggaagctgcggcttaaaagggcaacccgcgcgggacccttcctccctagtcgcggggagtctgagaaagcgcgcctgtttcgcgaccatcacgcacctcccctccgcttgtggccatgtaccgctacctgggcgaagcgctgttgctgtcccgggccgggcccgctgccctgggctcggcgtccgccgactcggccgcgttgctgggctgggcccggggacagcccgccgccgccccgcagccggggctggcattggccgcccggcgccactacagcgaggcggtggccgaccgcgaggacgaccccaacttcttcaagatggtggagggcttcttcgatcgcggcgccagcatcgtggaggacaagctggtggaggacctgaggacccgggagagcgaggagcagaagcggaaccgggtgcgcggcatcctgcggatcatcaagccctgcaaccatgtgctgagtctctccttccccatccggcgcgacgacggctcctgggaggtcatcgaaggctaccgggcccagcacagccagcaccgcacgccctgcaagggaggtatccgttacagcactgatgtgagtgtagatgaagtaaaagctttggcttctctgatgacatacaagtgtgcagtggttgatgtgccgtttgggggtgctaaagctggtgttaagatcaatcccaagaactatactgataatgaattggaaaagatcacaaggaggttcaccatggagctagcaaaaaagggctttattggtcctggcattgatgtgcctgctccagacatgagcacaggtgagcgggagatgtcctggatcgctgatacctatgccagcaccatagggcactatgatattaatgcacacgcctgtgttactggtaaacccatcagccaagggggaatccatggacgcatctctgctactggccgtggtgtcttccatgggattgaaaatttcatcaatgaagcttcttacatgagcattttaggaatgacaccagggtttggagataaaacatttgttgttcagggatttggtaatgtgggcctacactctatgagatatttacatcgttttggtgctaaatgtattgctgttggtgagtctgatgggagtatatggaatccagatggtattgacccaaaggaactggaagacttcaaattgcaacatgggtccattctgggcttccccaaggcaaagccctatgaaggaagcatcttggaggccgactgtgacatactgatcccagctgccagtgagaagcagttgaccaaatccaacgcacccagagtcaaagccaagatcattgctgaaggtgccaatgggccaacaactccagaagctgacaagatcttcctggagagaaacattatggttattccagatctctacttgaatgctggaggagtgacagtatcttactttgagtggctgaagaatctaaatcatgtcagctatggccgtttgaccttcaaatatgaaagggattctaactaccacttgctcatgtctgttcaagagagtttagaaagaaaatttggaaagcatggtggaactattcccattgtacccacggcagagttccaagacaggatatcgggtgcatctgagaaagacatcgtgcactctggcttggcatacacaatggagcgttctgccaggcaaattatgcgcacagccatgaagtataacctgggattggacctgagaacagctgcctatgttaatgccattgagaaagtcttcaaagtgtacaatgaagctggtgtgaccttcacatagatggatcatggctgacttcctcactatcctcttcacatgtaacttctgcagacctatcacaagtttacatgtaaccacagaaatccctttctctcctgactcattaataatggataccattctcaacaagtcaatccaagtcagcccgttaaggagaaagaaattaaggttagcggatcatgtacaagctgagtgtgaaagtagaaatcacctacaccagagagccattttggtattttgcctttaaataaaaagcctcctttatctggctgtgcagccttgctctgtggcttttcccaacacaatcagtgctagtgctggggaggaacagtcaagagcagtcagttgcttgcttattttttctggatgagtctgggacacactgtaactttaacacatttaagaagtaggtgtgtggccttttcagaaggtggcatggtcctcaagtgagttcttagtattttatatcagcaaaataattcaattttgcaggttgcaaacaaatataaaacctgtttctgtttatgaatattattcttttagaatagaataagtacatgctgctgtaataaaattgcctttaatcacttaacaagccttggaccaaatggaaataaagctttttgatgca

SEQ ID NO: 349109 - DNA, 1564 bp, Homo sapiens
gcggcggaggcggaggcccggcgccctgggcggcgccctgtccccgaagtccgtcctccccgttaggtggcgagcgcccgaggggaggggacagccgggcaagcaggaagctgcggcttaaaagggcaacccgcgcgggacccttcctccctagtcgcggggagtctgagaaagcgcgcctgtttcgcgaccatcacgcacctcccctccgcttgtggccatgtaccgctacctgggcgaagcgctgttgctgtcccgggccgggcccgctgccctgggctcggcgtccgccgactcggccgcgttgctgggctgggcccggggacagcccgccgccgccccgcagccggggctggcattggccgcccggcgccactacagcgaggcggtggccgaccgcgaggacgaccccaacttcttcaagatggtggagggcttcttcgatcgcggcgccagcatcgtggaggacaagctggtggaggacctgaggacccgggagagcgaggagcagaagcggaaccgggtgcgcggcatcctgcggatcatcaagccctgcaaccatgtgctgagtctctccttccccatccggcgcgacgacggctcctgggaggtcatcgaaggctaccgggcccagcacagccagcaccgcacgccctgcaagggaggtatccgttacagcactgatgtgagtgtagatgaagtaaaagctttggcttctctgatgacatacaagtgtgcagtggttgatgtgccgtttgggggtgctaaagctggtgttaagatcaatcccaagaactatactgataatgaattggaaaagatcacaaggaggttcaccatggagctagcaaaaaagggctttattggtcctggcattgatgtgcctgctccagacatgagcacaggtgagcgggagatgtcctggatcgctgatacctatgccagcaccatagggcactatgatattaatgcacacgcctgtgttactggtaaacccatcagccaagggggaatccatggacgcatctctgctactggccgtggtgtcttccatgggattgaaaatttcatcaatgaagcttcttacatgagcattttaggaatgacaccagggtttggagataaaacatttgttgttcagggatttggtaatgtgggcctacactctatgagatatttacatcgttttggtgctaaatgtattgctgttggtgagtctgatgggagtatatggaatccagatggtattgacccaaaggaactggaagacttcaaattgcaacatgggtccattctgggcttccccaaggcaaagccctatgaaggaagcatcttggaggccgactgtgacatactgatcccagctgccagtgagaagcagttgaccaaatccaacgcacccagagtcaaagccaagatcattgctgaaggtgccaatgggccaacaactccagaagctgacaagatcttcctggagagaaacattatggttattccaggatcttttaacttggaaaggcttggggggaggtggccaagtaattctttacttttggaggtgggc

SEQ ID NO: 349110 - DNA, 1824 bp, Homo sapiens
gcggcggaggcggaggcccggcgccctgggcggcgccctgtccccgaagtccgtcctccccgttaggtggcgagcgcccgaggggaggggacagccgggcaagcaggaagctgcggcttaaaagggcaacccgcgcgggacccttcctccctagtcgcggggagtctgagaaagcgcgcctgtttcgcgaccatcacgcacctcccctccgcttgtggccatgtaccgctacctgggcgaagcgctgttgctgtcccgggccgggcccgctgccctgggctcggcgtccgccgactcggccgcgttgctgggctgggcccggggacagcccgccgccgccccgcagccggggctggcattggccgcccggcgccactacagcgaggcggtggccgaccgcgaggacgaccccaacttcttcaagatggtggagggcttcttcgatcgcggcgccagcatcgtggaggacaagctggtggaggacctgaggacccgggagagcgaggagcagaagcggaaccgggtgcgcggcatcctgcggatcatcaagccctgcaaccatgtgctgagtctctccttccccatccggcgcgacgacggctcctgggaggtcatcgaaggctaccgggcccagcacagccagcaccgcacgccctgcaagggaggtatccgttacagcactgatgtgagtgtagatgaagtaaaagctttggcttctctgatgacatacaagtgtgcagtggttgatgtgccgtttgggggtgctaaagctggtgttaagatcaatcccaagaactatactgataatgaattggaaaagatcacaaggaggttcaccatggagctagcaaaaaagggctttattggtcctggcattgatgtgcctgctccagacatgagcacaggtgagcgggagatgtcctggatcgctgatacctatgccagcaccatagggcactatgatattaatgcacacgcctgtgttactggtaaacccatcagccaagggggaatccatggacgcatctctgctactggccgtggtgtcttccatgggattgaaaatttcatcaatgaagcttcttacatgagcattttaggaatgacaccagggtttggagataaaacatttgttgttcaggtaaaaacaaaaacaaaaaaagtttccttaataactgatagacattaagtaaagttttcaatgtttttagaattgtaattttaaaattaagttatctcaaatctcttaaattttagagtggtggttttcagagtaatagatattttgttttttgaaccttggtatgattcatgtaactagaactgatttaagtatctctcaagtacatgtgaaactgttaccaacttcaaccaaactatcaccaaattcaaccaaaatattggttagtattcaaacttgaaattatagctagaagggcaagtctcttaacataattttctaagttttgtaagtatatagaaaggtttacacactgacccaaatttgtttcatgtgttaacatgtattttacttaggagaatcttaattaagttgaaattacttgaaaatagaagtggtggctggacacagtggctcatgcctgtaatcccatcactttgggaggccaaggtgggcagatcacgaggtcaagagatcaagaccatcctggccaacatggtgaaacccggtctccgctaaaaataggaaaattagcagggtgtggtggtacacgcctgtagtcccagctactctggaggcttcggctgaccaggcttcagtgcctgaccaggcttcagtgcctgaccaggcttcagtgccagacc

SEQ ID NO: 349111 - DNA, 2263 bp, Homo sapiens
gggcttccgcctgggaacctgcagaaacaggagacgaatgcgattcctaaattaccccactgctggactcttcgaagccccacaatcgcgacccaaggctgtcttcttttcgggaagaaagggcaggatccgtgaaaagaaaacaacacggtctgaacttgcctctgagaacccgcagggccgtaaacctgaattccgcgggagagaacggcgtccgtttctctcgcgacacttcatggataacgtagatgcttcaagtccagttcggctctcattggctaccgcacgcagtgagggggcggggaaagtagcggcgaggccccgccctcacgcaggagccaatcctgagcaggctaggagacgaacccggaagtgagatgcaaggcggcgattttcccttctgtcagatcttgatgaacaaagcagtcataattcatctctagaaagatttatatcctggcatttgaaatgctttttatttagaatagtagtaaaaaatggaaaaagaaaaaggaaatgatgatggaataccagaccaagagaattccttggatttttctgaacactttaaccaacttgaattgttggaaacacatggacaccttattcctactggtactcaaagtctttgggtaggcaattctgatgaagatgaggagcaagatgacaaaaatgaagagtggtatcgattgcaagaaaaaaaaatggaaaaagacccaagcagattgcttctttgggctgctgaaaaaaatcggcttaccacagtgcggagactcctttctgaaaaggccactcacgtgaacactagggatgaagatgagtatacccctcttcatcgagcagcctacagtggacacttagatattgttcaggagctcattgcacagggggccgatgttcatgcagtgactgtggatggctggacgcccctgcacagtgcttgtaagtggaataataccagagtggcttctttcttactgcagcatgatgcagatatcaatgcccaaacaaaaggcctcttgacccccttgcatcttgctgctgggaacagagacagcaaggataccctagaactcctcctgatgaaccgttacgtcaaaccagggctgaaaaacaacttggaagaaactgcatttgatattgccaggaggacaagtatctatcactacctctttgaaattgtggaaggctgtacaaattcttcacctcagtcttaacaattctagtaattttcctaagtttctaaataccagtgcctcctgtgtgtgagatgtattcccataatcaaagttgacgtcaaacatcttactacaaaaattcagtgacattcattataacattcttccaagtgaattgcctgactttgatgtcaaaatgtatttgaaagtaatttgcatatatctttaattatttctgtggagtttgtgatttttttatcagaaataattttaatgtgtgtatacttaaaaacttgacacgggttgtacagaaactggtatttttggtgctgatacaagagaaatgtatttttaaatatcccacatcctggatctttgttgggtatttagtatattgacatatatttttataaggtgaggtaactcagaacttaatttaaaagtcttaaatattctgatacaattcagctgtcttctctaccttaccatagccagttgctttcattttaaaccagagcaagtaacatattagtgacttgaatcttcataagttaaagtaaaaaacagcaaaaaacctagatctttgtcttttagaacacagaccattttcaggaaagcagttagctaagtgtttaattcatgaatattgtatactgcatcccctaccacaatttacacaatcctgtggatagtcctacctcaccctggtcaacctacatgatccttaagctaatggcgaatcacgatgaccttgtagacatgcacacaactatacctttgtccaacagatcataatatatctgctatccaactggttttacctgcctaatcctactgatttgggcactgcttgtatagtctctcaagttcacaggaaatgttgattttctaaggtcctcatttttacagagtatacaggcaaagtgacaggggaaaaggaattagtctaagagtaaggggatgattattatattgaggctaaaaccacaaagtggctcaggctttaaaaaaaaaacactgtggataatgacaaaaagcataagtaaaaatatttgagaaaaataaagtacaagttttgaacaaca

SEQ ID NO: 349112 - DNA, 3276 bp, Homo sapiens
gggcttccgcctgggaacctgcagaaacaggagacgaatgcgattcctaaattaccccactgctggactcttcgaagccccacaatcgcgacccaaggctgtcttcttttcgggaagaaagggcaggatccgtgaaaagaaaacaacacggtctgaacttgcctctgagaacccgcagggccgtaaacctgaattccgcgggagagaacggcgtccgtttctctcgcgacacttcatggataacgtagatgcttcaagtccagttcggctctcattggctaccgcacgcagtgagggggcggggaaagtagcggcgaggccccgccctcacgcaggagccaatcctgagcaggctaggagacgaacccggaagtgagatgcaaggcggcgattttcccttctgtcagatcttgatgaacaaagcagtcataattcatctctagaaagatttatatcctggcatttgaaatgctttttatttagaatagtagtaaaaaatggaaaaagaaaaaggaaatgatgatggaataccagaccaagagaattccttggatttttctgaacactttaaccaacttgaattgttggaaacacatggacaccttattcctactggtactcaaagtctttgggtaggcaattctgatgaagatgaggagcaagatgacaaaaatgaagagtggtatcgattgcaagaaaaaaaaatggaaaaagacccaagcagattgcttctttgggctgctgaaaaaaatcgggtaaaaaaaaaaattacagagggaagtgtgacagtaggaaaagcactgggttcaagccagaagacctgcctttactgttatggccatcatacctatctcttgattgtgaggaccaaatgagacaatgtacatgaaagcacatattaagctgcaaagtgtcatgctaggtattatttgggggtttaaggataattatctataaagatagcaagcaatcatctatattttaaaatcatttatataaagtcattaggatcatttaggaaagagaggatggaaactaacatttattaaaaactaactataccaggtaccttattacattattttatttaatcatcatgtatccctataagtaatattcttctcttttatagagtaagaaattgagattcaggaatattaatttgcccaggatcatcgaagtggaatgaacatcaaaagcctattccctctgcttggccacttccacctcattttactaagtttccccatgtctgtgttagtaaactaataactaaaagggtctcgcattttaaatagctttttaacccaagagcatgccacatttaaccagaggcccatagaacaaactgaaaattacaacctaaaaggttgtttctaaggttgtattgagaaggaattgagctcttgaatccctagaattccttattaatactttattcttctgttaaaagttttatttttaaaagtttcatacagtgtgtatattggtgtgataatcctacagaaaaatcaagcagttatgttttcttcacagataacacataaaatattaaacagaaagcctatgttattcattggactgaagcttttatgcaataaaccttagttggaccaggagtaaatgtatggtttgatattcagagaatctcattcttagaagcaacaaagtgtagttaacactaacttgttcattcttaaatcagtagtcctctcctccccaaaaagagatcttaaattattttcattttaaagtcatctactaacaacttaccacagtgcggagactcctttctgaaaaggccactcacgtgaacactagggatgaagatgagtatacccctcttcatcgagcagcctacagtggacacttagatattgttcaggagctcattgcacagggggccgatgttcatgcagtgactgtggatggctggacgcccctgcacagtgcttgtaagtggaataataccagagtggcttctttcttactgcagcatgatgcagatatcaatgcccaaacaaaaggcctcttgacccccttgcatcttgctgctgggaacagagacagcaaggataccctagaactcctcctgatgaaccgttacgtcaaaccagggctgaaaaacaacttggaagaaactgcatttgatattgccaggaggacaagtatctatcactacctctttgaaattgtggaaggctgtacaaattcttcacctcagtcttaacaattctagtaattttcctaagtttctaaataccagtgcctcctgtgtgtgagatgtattcccataatcaaagttgacgtcaaacatcttactacaaaaattcagtgacattcattataacattcttccaagtgaattgcctgactttgatgtcaaaatgtatttgaaagtaatttgcatatatctttaattatttctgtggagtttgtgatttttttatcagaaataattttaatgtgtgtatacttaaaaacttgacacgggttgtacagaaactggtatttttggtgctgatacaagagaaatgtatttttaaatatcccacatcctggatctttgttgggtatttagtatattgacatatatttttataaggtgaggtaactcagaacttaatttaaaagtcttaaatattctgatacaattcagctgtcttctctaccttaccatagccagttgctttcattttaaaccagagcaagtaacatattagtgacttgaatcttcataagttaaagtaaaaaacagcaaaaaacctagatctttgtcttttagaacacagaccattttcaggaaagcagttagctaagtgtttaattcatgaatattgtatactgcatcccctaccacaatttacacaatcctgtggatagtcctacctcaccctggtcaacctacatgatccttaagctaatggcgaatcacgatgaccttgtagacatgcacacaactatacctttgtccaacagatcataatatatctgctatccaactggttttacctgcctaatcctactgatttgggcactgcttgtatagtctctcaagttcacaggaaatgttgattttctaaggtcctcatttttacagagtatacaggcaaagtgacaggggaaaaggaattagtctaagagtaaggggatgattattatattgaggctaaaaccacaaagtggctcaggctttaaaaaaaaaacactgtggataatgacaaaaagcataagtaaaaatatttgagaaaaataaagtacaagttttgaacaaca

SEQ ID NO: 349113 - DNA, 3382 bp, Homo sapiens
gggcttccgcctgggaacctgcagaaacaggagacgaatgcgattcctaaattaccccactgctggactcttcgaagccccacaatcgcgacccaaggctgtcttcttttcgggaagaaagggcaggatccgtgaaaagaaaacaacacggtctgaacttgcctctgagaacccgcagggccgtaaacctgaattccgcgggagagaacggcgtccgtttctctcgcgacacttcatggataacgtagatgcttcaagtccagttcggctctcattggctaccgcacgcagtgagggggcggggaaagtagcggcgaggccccgccctcacgcaggagccaatcctgagcaggctaggagacgaacccggaagtgagatgcaaggcggcgattttcccttctgtcagatcttgatgaacaaagcagtcataattcatctctagaaagatttatatcctggcatttgaaatgctttttatttagaatagtagtaaaaaatggaaaaagaaaaaggaaatgatgatggaataccagaccaagagaattccttggatttttctgaacactttaaccaacttgaattgttggaaacacatggacaccttattcctactggtactcaaagtctttgggtaggcaattctgatgaagatgaggagcaagatgacaaaaatgaagagtggtatcgattgcaagaaaaaaaaatggaaaaagacccaagcagattgcttctttgggctgctgaaaaaaatcgggtaaaaaaaaaaattacagagggaagtgtgacagtaggaaaagcactgggttcaagccagaagacctgcctttactgttatggccatcatacctatctcttgattgtgaggaccaaatgagacaatgtacatgaaagcacatattaagctgcaaagtgtcatgctaggtattatttgggggtttaaggataattatctataaagatagcaagcaatcatctatattttaaaatcatttatataaagtcattaggatcatttaggaaagagaggatggaaactaacatttattaaaaactaactataccaggtaccttattacattattttatttaatcatcatgtatccctataagtaatattcttctcttttatagagtaagaaattgagattcaggaatattaatttgcccaggatcatcgaagtggaatgaacatcaaaagcctattccctctgcttggccacttccacctcattttactaagtttccccatgtctgtgttagtaaactaataactaaaagggtctcgcattttaaatagctttttaacccaagagcatgccacatttaaccagaggcccatagaacaaactgaaaattacaacctaaaaggttgtttctaaggttgtattgagaaggaattgagctcttgaatccctagaattccttattaatactttattcttctgttaaaagttttatttttaaaagtttcatacagtgtgtatattggtgtgataatcctacagaaaaatcaagcagttatgttttcttcacagataacacataaaatattaaacagaaagcctatgttattcattggactgaagcttttatgcaataaaccttagttggaccaggagtaaatgtatggtttgatattcagagaatctcattcttagaagcaacaaagtgtagttaacactaacttgttcattcttaaatcagtagtcctctcctccccaaaaagagatcttaaattattttcattttaaagtcatctactaacaagtaagtttttattcaacttaattaaatctaacaccacaagacaattttgttttagttattgttttggtttgagttgagttgaaagatttcttttttttcttctcagcttaccacagtgcggagactcctttctgaaaaggccactcacgtgaacactagggatgaagatgagtatacccctcttcatcgagcagcctacagtggacacttagatattgttcaggagctcattgcacagggggccgatgttcatgcagtgactgtggatggctggacgcccctgcacagtgcttgtaagtggaataataccagagtggcttctttcttactgcagcatgatgcagatatcaatgcccaaacaaaaggcctcttgacccccttgcatcttgctgctgggaacagagacagcaaggataccctagaactcctcctgatgaaccgttacgtcaaaccagggctgaaaaacaacttggaagaaactgcatttgatattgccaggaggacaagtatctatcactacctctttgaaattgtggaaggctgtacaaattcttcacctcagtcttaacaattctagtaattttcctaagtttctaaataccagtgcctcctgtgtgtgagatgtattcccataatcaaagttgacgtcaaacatcttactacaaaaattcagtgacattcattataacattcttccaagtgaattgcctgactttgatgtcaaaatgtatttgaaagtaatttgcatatatctttaattatttctgtggagtttgtgatttttttatcagaaataattttaatgtgtgtatacttaaaaacttgacacgggttgtacagaaactggtatttttggtgctgatacaagagaaatgtatttttaaatatcccacatcctggatctttgttgggtatttagtatattgacatatatttttataaggtgaggtaactcagaacttaatttaaaagtcttaaatattctgatacaattcagctgtcttctctaccttaccatagccagttgctttcattttaaaccagagcaagtaacatattagtgacttgaatcttcataagttaaagtaaaaaacagcaaaaaacctagatctttgtcttttagaacacagaccattttcaggaaagcagttagctaagtgtttaattcatgaatattgtatactgcatcccctaccacaatttacacaatcctgtggatagtcctacctcaccctggtcaacctacatgatccttaagctaatggcgaatcacgatgaccttgtagacatgcacacaactatacctttgtccaacagatcataatatatctgctatccaactggttttacctgcctaatcctactgatttgggcactgcttgtatagtctctcaagttcacaggaaatgttgattttctaaggtcctcatttttacagagtatacaggcaaagtgacaggggaaaaggaattagtctaagagtaaggggatgattattatattgaggctaaaaccacaaagtggctcaggctttaaaaaaaaaacactgtggataatgacaaaaagcataagtaaaaatatttgagaaaaataaagtacaagttttgaacaaca

SEQ ID NO: 349114 - DNA, 2651 bp, Homo sapiens
gggcttccgcctgggaacctgcagaaacaggagacgaatgcgattcctaaattaccccactgctggactcttcgaagccccacaatcgcgacccaaggctgtcttcttttcgggaagaaagggcaggatccgtgaaaagaaaacaacacggtctgaacttgcctctgagaacccgcagggccgtaaacctgaattccgcgggagagaacggcgtccgtttctctcgcgacacttcatggataacgtagatgcttcaagtccagttcggctctcattggctaccgcacgcagtgagggggcggggaaagtagcggcgaggccccgccctcacgcaggagccaatcctgagcaggctaggagacgaacccggaagtgagatgcaaggcggcgattttcccttctgtcagatcttgatgaacaaagcagtcataattcatctctagaaagatttatatcctggcatttgaaatgctttttatttagaatagtagtaaaaaatggaaaaagaaaaaggaaatgatgatggaataccagaccaagagaattccttggatttttctgaacactttaaccaacttgaattgttggaaacacatggacaccttattcctactggtactcaaagtctttgggtaggcaattctgatgaagatgaggagcaagatgacaaaaatgaagagtggtatcgattgcaagaaaaaaaaatggaaaaagacccaagcagattgcttctttgggctgctgaaaaaaatcggcttaccacagtgcggagactcctttctgaaaaggccactcacgtgaacactagggatgaagatgagtatacccctcttcatcgagcagcctacagtggacacttagatattgttcaggagctcattgcacagggggccgatgttcatgcagtgactgtggatggctggacgcccctgcacagtgcttgtaagtggaataataccagagtggcttctttcttactgcagcatgatgcagatatcaatgcccaaacaaaaggcctcttgacccccttgcatcttgctgctgggaacagagacagcaaggataccctagaactcctcctgatgaaccgttacgtcaaaccagggctgaaaaacaacttggaagaaactgcatttgatattgccaggaggacaagtatctatcactacctctttgaaattgtggaaggctgtacaaattcttcacctcagtcttaacaattctagtaattttcctaagtttctaaataccagtgcctcctgtgtgtgagatgtattcccataatcaaagttgacgtcaaacatcttactacaaaaattcagtgacattcattataacattcttccaagtgaattgcctgactttgatgtcaaaatgtatttgaaagtaatttgcatatatctttaattatttctgtggagtttgtgatttttttatcagaaataattttaatgtgtgtatacttaaaaacttgacacgggttgtacagaaactggtatttttggtgctgatacaagagaaatgtatttttaaatatcccacatcctggatctttgttgggtatttagtatattgacatatatttttataaggtgaggtaactcagaacttaatttaaaagtcttaaatattctgatacaattcagctgtcttctctaccttaccatagccagttgctttcattttaaaccagagcaagtaacatattagtgacttgaatcttcataagttaaagtaaaaaacagcaaaaaacctagatctttgtcttttagaacacagaccattttcaggaaagcagttagctaagtgtttaattcatgaatattgtatactgcatcccctaccacaatttacacaatcctgtggatagtcctacctcaccctggtcaacctacatgatccttaagctaatggcgaatcacgatgaccttgtagacatgcacacaactatacctttgtccaacagatcataatatatctgctatccaactggttttacctgcctaatcctactgatttgggcactgcttgtatagtctctcaagttcacaggaaatgttgattttctaaggtcctcatttttacagagtatacaggcaaagtgacaggggaaaaggaattagtctaagagtaaggggatgattattatattgaggctaaaaccacaaagtggctcaggctttaaaaaaaaaacactgtggataatgacaaaaagcataagtaaaaatatttgagaaaaataaagtacaagttttgaacaacaaaaaaggcatgaattcattttttacctgtgtatgtctttcttggatccagaacattattcatccagcacgcacttagttatttaacatctactcactcagtctctccagcagcaattttgcattgtctatctagcccctctgtgattgttcccaaagttttgtcttctcaacaccacaacactccaggggaagggaactaaaccagttgctctttacttcagttaaatttttaagatgtccaccaaggcttatctctttcaagccatcctacgtaacccagtcaccctagactaagtaataatgttatttaatcaaagattaaatatttatttttgcttagaacttattagatcatctcagaaaagtcagagataatatatgaactga

SEQ ID NO: 349115 - DNA, 2140 bp, Homo sapiens
gggcttccgcctgggaacctgcagaaacaggagacgaatgcgattcctaaattaccccactgctggactcttcgaagccccacaatcgcgacccaaggctgtcttcttttcgggaagaaagggcaggatccgtgaaaagaaaacaacacggtctgaacttgcctctgagaacccgcagggccgtaaacctgaattccgcgggagagaacggcgtccgtttctctcgcgacacttcatggataacgtagatgcttcaagtccagttcggctctcattggctaccgcacgcagtgagggggcggggaaagtagcggcgaggccccgccctcacgcaggagccaatcctgagcaggctaggagacgaacccggaagtgagatgcaaggcggcgattttcccttctgtcagatcttgatgaacaaagcagtcataattcatctctagaaagatttatatcctggcatttgaaatgctttttatttagaatagtagtaaaaaatggaaaaagaaaaaggaaatgatgatggaataccagaccaagagaattccttggatttttctgaacactttaaccaacttgaattgttggaaacacatggacaccttattcctactggtactcaaagtctttggcttaccacagtgcggagactcctttctgaaaaggccactcacgtgaacactagggatgaagatgagtatacccctcttcatcgagcagcctacagtggacacttagatattgttcaggagctcattgcacagggggccgatgttcatgcagtgactgtggatggctggacgcccctgcacagtgcttgtaagtggaataataccagagtggcttctttcttactgcagcatgatgcagatatcaatgcccaaacaaaaggcctcttgacccccttgcatcttgctgctgggaacagagacagcaaggataccctagaactcctcctgatgaaccgttacgtcaaaccagggctgaaaaacaacttggaagaaactgcatttgatattgccaggaggacaagtatctatcactacctctttgaaattgtggaaggctgtacaaattcttcacctcagtcttaacaattctagtaattttcctaagtttctaaataccagtgcctcctgtgtgtgagatgtattcccataatcaaagttgacgtcaaacatcttactacaaaaattcagtgacattcattataacattcttccaagtgaattgcctgactttgatgtcaaaatgtatttgaaagtaatttgcatatatctttaattatttctgtggagtttgtgatttttttatcagaaataattttaatgtgtgtatacttaaaaacttgacacgggttgtacagaaactggtatttttggtgctgatacaagagaaatgtatttttaaatatcccacatcctggatctttgttgggtatttagtatattgacatatatttttataaggtgaggtaactcagaacttaatttaaaagtcttaaatattctgatacaattcagctgtcttctctaccttaccatagccagttgctttcattttaaaccagagcaagtaacatattagtgacttgaatcttcataagttaaagtaaaaaacagcaaaaaacctagatctttgtcttttagaacacagaccattttcaggaaagcagttagctaagtgtttaattcatgaatattgtatactgcatcccctaccacaatttacacaatcctgtggatagtcctacctcaccctggtcaacctacatgatccttaagctaatggcgaatcacgatgaccttgtagacatgcacacaactatacctttgtccaacagatcataatatatctgctatccaactggttttacctgcctaatcctactgatttgggcactgcttgtatagtctctcaagttcacaggaaatgttgattttctaaggtcctcatttttacagagtatacaggcaaagtgacaggggaaaaggaattagtctaagagtaaggggatgattattatattgaggctaaaaccacaaagtggctcaggctttaaaaaaaaaacactgtggataatgacaaaaagcataagtaaaaatatttgagaaaaataaagtacaagttttgaacaaca

SEQ ID NO: 349116 - DNA, 435 bp, Homo sapiens
ctgagatccctgtggaagatattgtaagaaaaagcacaattttttcttacatattgacatagccctcaagtaggatcatgaaagcgtattcttggtcctaacatacaaaccatccacttttgtggttcttgcaaatcaatatagaaaacaagcattttccaggttggtagctgcataccagatgccagggtcaacgttgatttgcttcattaaggcaccattcttgagcaaaagctgaaactgaagccaatacctgaataaatgtatgacattccacagtcgttctccaagatccatcccacttctatagagcccaaataagcaaattagatagggatgggattggtatcactacacttgcatcttacaaatctttgggaatggcaatagcctctgaagttcctccagcaatgtggtattgcttttggtttacca

SEQ ID NO: 349117 - DNA, 2330 bp, Homo sapiens
agagagagagagagagagagagagagagagagagagagagagagagagagagagagagagagaggaacgaggccgtcggccattttgtgtctgcttcctgtgggacgtggtggtagccgttgggttgggaaagtgagggatttttggcctcgtttctcctgcttcttttctcctcccttttactttgccggtagaacacagttatgggtcgcaagaagaagaagcagctgaagccgtggtgctggtattgtaatagagattttgatgatgagaagatccttattcagcaccaaaaagcaaagcattttaaatgccatatatgtcacaagaaattgtatacaggacctggcttagctattcattgcatgcaggtacataaagaaacaatagatgccgtaccaaatgcaatacctggaagaacagacatagagttggaaatatatggtatggaaggtattccagaaaaagacatggatgaaagacgacgacttcttgaacagaaaacacaagaaagtcaaaaaaagaagcaacaagatgattctgatgaatatgatgatgacgactctgcagcctcaacttcatttcagccacagcctgttcaacctcagcaaggttatattcctccaatggcacagccaggactgccaccagtaccaggagcaccaggaatgcctccaggcatacctccattaatgccaggtgttcctcctctgatgccaggaatgccaccagttatgccaggcatgccacctggaatgatgccaatgggtggaatgatgccacctggaccaggaataccacctctgatgcctggaatgccaccaggtatgcccccacctgttccacgtcctggaattcctccaatgactcaagcacaggctgtttcagcgccaggtattcttaatagaccacctgcaccaacagcaactgtacctgccccacagcctccagttactaagcctcttttccccagtgctggacagatggggacacctgtcacaagctcaagtacagcttcatccaattcagaaagtctgtctgcatcttctaaagctctgtttcctagcacagcacaagctcaggcagctgtccaaggacctgttggtacagatttcaaacccttaaatagtacccctgcaacaactacagaacccccaaagcctacattccctgcttatacacagtctacagcttcaacaactagtacaacaaatagtactgcagctaaaccagcggcttcaataacaagtaagcctgctacacttacaacaactagtgcaaccagtaagttgatccatccagatgaggatatatccctggaagagagaagggcacagttacctaagtatcaacgtaatcttcctcggccaggacaggcccccatcggtaatccaccagttggaccaattggaggtatgatgccaccacagccaggcatcccacagcaacaaggaatgagacccccaatgccacctcatggtcagtatggtggtcatcatcaaggcatgccaggataccttcctggtgctatgcccccgtatgggcagggaccgccaatggtgcccccttaccagggtgggcctcctcgacctccgatgggaatgagacctcctgtaatgtcgcaaggtggccgttactgatcttacttcatccagtctaataggtttggagattaaaccttttctcaacttgtgctgtttatatagccaagcttccgtcaataaggcttcattgtgactttaacaaacattatcttcccacataccaggaactattggacatttattttacatgggaaaaattatttggaataataaagcaggaacttttcctgaagttgcaatttatactgtatggcttctttttcatgtttcatctaggtttttagaagtgaagtatagtaaatttggttcgttaaattgtgaaggcgctggaattacatgaacataccaccctagtaaaggcaagttctgtaagcttacattgctatttgtaaagtttgccttcacagcatttcagatgctgttggacttcatgtccccaacctagcttggtgagggctgtaactgtttccaagtacttgtacattggaagtctgaatgtgtaacaatatttaatgtatttagagttcctcatgttgcagggtttaagaaatctgacccaccaaggtcatgtgacttttctgtactgttaaacttcattgtaataaaatgagagaaaaatttatgcctttttattcataacccagctgtggaccactgcctgaaaggtttgtacagatgcatgccacagtagatgtccacataataaaattcatagttaccaatgca

SEQ ID NO: 349118 - DNA, 2953 bp, Homo sapiens
  misc_feature (2363)..(2363): n is a, c, g, or t
agagagagagagagagagagagagagagagagagagagagagagagagagagagagagagagaggaacgaggccgtcggccattttgtgtctgcttcctgtgggacgtggtggtagccgttgggttgggaaagtgagggatttttggcctcgtttctcctgcttcttttctcctcccttttactttgccggtagaacacagttatgggtcgcaagaagaagaagcagctgaagccgtggtgctggtattgtaatagagattttgatgatgagaagatccttattcagcaccaaaaagcaaagcattttaaatgccatatatgtcacaagaaattgtatacaggacctggcttagctattcattgcatgcaggtacataaagaaacaatagatgccgtaccaaatgcaatacctggaagaacagacatagagttggaaatatatggtatggaaggtattccagaaaaagacatggatgaaagacgacgacttcttgaacagaaaacacaagaaagtcaaaaaaagaagcaacaagatgattctgatgaatatgatgatgacgactctgcagcctcaacttcatttcagccacagcctgttcaacctcagcaaggttatattcctccaatggcacagccaggactgccaccagtaccaggagcaccaggaatgcctccaggcatacctccattaatgccaggtgttcctcctctgatgccaggaatgccaccagttatgccaggcatgccacctggaatgatgccaatgggtggaatgatgccacctggaccaggaataccacctctgatgcctggaatgccaccaggtatgcccccacctgttccacgtcctggaattcctccaatgactcaagcacaggctgtttcagcgccaggtattcttaatagaccacctgcaccaacagcaactgtacctgccccacagcctccagttactaagcctcttttccccagtgctggacagatggggacacctgtcacaagctcaagtacagcttcatccaattcagaaagtctgtctgcatcttctaaagctctgtttcctagcacagcacaagctcaggcagctgtccaaggacctgttggtacagatttcaaacccttaaatagtacccctgcaacaactacagaacccccaaagcctacattccctgcttatacacagtctacagcttcaacaactagtacaacaaatagtactgcagctaaaccagcggcttcaataacaagtaagcctgctacacttacaacaactagtgcaaccagtaagttgatccatccagatgaggatatatccctggaagagagaagggcacagttacctaagtatcaacgtaatcttcctcggccaggacaggcccccatcggtaatccaccagttggaccaattggaggtatgatgccaccacagccaggcatcccacagcaacaaggaatgagacccccaatgccacctcatggtcagtatggtggtcatcatcaaggcatgccaggataccttcctggtgctatgcccccgtatgggcagggaccgccaatggtgcccccttaccagggtgggcctcctcgacctccgatgggaatgagacctcctgtaatgtcgcaaggtggccgttactgatcttacttcatccagtctaataggtttggagattaaaccttttctcaacttgtgctgtttatatagccaagcttccgtcaataaggcttcattgtgactttaacaaacattatcttcccacataccaggaactattggacatttattttacatgggaaaaattatttggaataataaagcaggaacttttcctgaagttgcaatttatactgtatggcttctttttcatgtttcatctaggtttttagaagtgaagtatagtaaatttggttcgttaaattgtgaaggcgctggaattacatgaacataccaccctagtaaaggcaagttctgtaagcttacattgctatttgtaaagtttgccttcacagcatttcagatgctgttggacttcatgtccccaacctagcttggtgagggctgtaactgtttccaagtacttgtacattggaagtctgaatgtgtaacaatatttaatgtatttagagttcctcatgttgcagggtttaagaaatctgacccaccaaggtcatgtgacttttctgtactgttaaacttcattgtaataaaatgagagaaaaatttatgcctttttattcataacccagctgtggaccactgcctgaaaggtttgtacagatgcatgccacagtagatgtccacataataaaattcatagttaccaatgcaaaaaaaaaaaaaaaaaaaaaaaaaaaaaaaaanaaaaaaaaaaaaaaaaaagagagagagaggacgagcaaaaaaaaaaaaccaaaagaagaaaggagacacaaaaaaaagaagaaacacaaaatagaaaaaaaggggccccaaagaggggagaaaagaaagaggggcaccaaccaacatacaaacaccgagcagggaggacagggagaacacaacacccggctataacacgcggcaggacgcacatactgcgggagagaaagagaagaaccccaacagacaacaactgggggggaaggagcccaacaaccaataatgtgcacacacccacaccacaccacccacaagcgagatacataatctcgaaaccaccatacgaagagagagcaacacaacacacaagccatccgaacgacgaagacaacaaaaggagggataaaaacaaaacatcgaggaccaaaataatactggagcgacagggaagagatgaacaacaagaacgcgccgcacaacaaaggagagaacaaatagaatcaccagcaagacaaaaagttgaacacaccagaaggacacaacaccgtagagcagaaagaaaaaaaagacgaaagagacaaaacgaagga

SEQ ID NO: 349119 - DNA, 1854 bp, Homo sapiens
gtaaactataacgtatcccgttggtgtaccagtgagttcattttactgtaaactaagaataacatacctttttaatactgaaagttgactactcatcaagaaatgtagctagattctttatgtaacacttttgaggggcagtggggacataatgggttgtggaaaatgtgttttaacatttttattttttttttattctacccgagttcattgttgtttgaaccatcctctaaagatttcctttaacctctaaatgttgtgcttttaggttgataacaaatgtaaagcactgaggagggaggaataaagcatacaagttaatttctaattttcgcaagcctgaaccatcctaatctgatagtaggatgtatggcttcttccttttcaccttgtgtgatgtttaatttgagacgatctagccataaaactagtaatcttgaattcctcttgagctggatggtgattagccattgtgaaaacagattatatggaaattgtgcatattgctaaattttaaaacatggatttatcaactgataataaaatatatcttacaagataaccacttgttttttaatgtaaaattgcacaagggcttaagtttcattgcctttcacagtttaatctgtatatgaaatggtgtagatacagtggaaatggttttccttaaaaccatctctttaaagctgcctttctggtgagtactgttttatacttttatatattataattttatcttctaaaattaactgaaataggacactttgattaaagaggtgagcactctgaatttctacatctttggatattacttgaatcaagaatattagaaaattattttaccacctggcatttcccttttaatttgctagttcacttttttctgaccttcacttaacagactataaatacaaaaactttgaacacataaattatttcattttggtgagatggaataaatgtttaaaattagtatttaagaaagttcttaaacattttttttagttggcagccaaaagatttttcttagtgctttggagacattgcataggtgtaaaattaagataccagaacttcattctgttcttgttgaagctgttgttgtggtgattcatgagcagtaagctggagttagagtggaagaagggtttaccaaaattcttcctgcagactagttgcttacagggtttctttgagaggcttaaaaatttcaaaagtattatttaagccactctaaccctgcatgaaaaattggagttagaaatactgatttctgagaccacgtataccagtgaaaattagcttctgagtaaatttctaatttatgccctgctttatttagcctcgctatatgtaacacatggattattttttccctctagtttttaactatatcctagattaaaaccagcatatgctaagaatgtttttacattctgtttcctcctgtgatctttctgaaccaataataaacagtcaactgtgatgctttttagtatgaacaatgatagttttctaaaatctgaaaatcaatacctgagtatgtgatgtggcaatgcattcttctagataagcactaaacaaagtatggaccctcaatttatgtctttaagatttaaagtgaagtaaatttctaaggaactgtgtcctttcctagcaggaataaacagtgaaaatttggtaagtatttaacttgaagtgcatgtaatagtgatgagagtaagtagccaaatttccgtaatataaggtaatgtttaaaagtgagcaataattattgcatctcttttgcgacttcatgtagatgtgattaacattttttacaaatttgcctgcataaagattaaattggaacat

SEQ ID NO: 349120 - DNA, 1365 bp, Homo sapiens
ggggtttcaccgtgttagccaggatggtctcgatctcctgacctcatgatctgcccgcctaggcctcccaaagtgctgggattacaggcatgagccaccacacccagcccagacttactttttttaaaataagactaccagaggccgggtgcagtggctcagtttgggaggccaaggtgggaggattgcttgagtccaagagtttaagaccagtctgagcaacatagtgagaccccatttcattaaaaaaaaaaaaagataaaataagactatcatatagagctgtgtaatgtagtgagcctacattacaaaaatatatacaaccacacagagaatatgtaattacaccttgcctatatccataaatgatttgaagcaggtaacacatttgcttttaaatgccatttacaacatagactcttgaatgacatgaatttgaaaatgaagtattttttcagacttaaaacgttgatgtgctaatgtagcttactttaaaaaatgatttccaagtggggaaccaactacattgggaaaagacagtcagattcaaggacagtgtcataaaattgctggttttccttagtcaccctgactttatttttttgagacagagtctcgctctgtcactcaggttggaatgcagtggcgcgatctcggctcaccgcaatctctgcctcccgggttcaagcgattctcctgcctcagcctcccaagtagctgggactacaggcacatgccacagttcccagctaatttttgtaattttagtagagacagggtttcaccatattggtcaggctggtctggaactcctgacctcaggtgatccacctgcctcggcctctcaaagtgctgggattacaggcatgagccatcgtgcccagccactctcactttaatactatgaaaaatgctacttagatttttttctatactgcctacattccaagttattaaagtttaaaaccgtatgaaagcatttatgaagattctgaattgtatttctcattaaaagaaaagaaatgtgagtcatgtcccgaggcttatgtagaggagaaagcagaaggccattgtcagtcattttgaaagttaaaacctccagcacttaatgtgaatttagatcccatttaagagaggattccctcagttttatgggtttgtgctcctctgagcatcctcagggaagtgagaacacaagacttctgttcttctaagcaaaaatcattatcaaatgaatttattaaagagctatcccgagcaaattgcaattgtatgtatgtagctacataggcttccatgggaattgtaaatggctagctgagggcactttcaattgattcagagtaaaacaatctgaggcttgta

SEQ ID NO: 349121 - DNA, 435 bp, Homo sapiens
tttttttttgatgagaagctaagttttattattataattacaaattaattacagagaaactgaagccattcttcatacatgacaaacatacatttcctctgtgtgtacagcacacaagtaatatacacaaatatattccatgtctgaacaaatcctttttaaaactttaaaagctggctgggcacagtggctcacgcctgcaatttcaaacactaagacttaaatatacaacttgatcatacaattatctcaaaacatatgatcaaaaactttggtcaagagcttctttcatgaattcttcaaggacagctatcacatttttggcttcaggcatttcttcatgttccactttaacaatcttcaaaagtatatctccactaccacagttctttaggaacatgtaacatttaaacaaagcataatgattcatttctg

SEQ ID NO: 349122 - DNA, 495 bp, Homo sapiens
ttttgagacagagtctcgctctgtcgcccaggctggagtgcagtggcgcgatctcggctcactgcaagctccacctcctgggttcacgccactctcctgcctcagcctccagagtagctgggactacaggcgcccgccaccatgcccggctaattttttgtattttagtagagacgggctttctcgacaggcttttgcagttgtgggtcgtgtgactctgtgactcaggaggatcttgttcggtgcgaattttggactccgggaggcggcctggacccctccgccagggacagtgtcccctagggactattcagccaccttccgttgttttggtgacgattcaacaagggacttttcttcgagtgcgataggcttattactttcatggagggttggggacagcttcacagtctgtcacccactttttctgtttttatttactttatgtgtgttttgtgtttattttttcgaattggcggtttagtaaagaaccaa

SEQ ID NO: 349123 - DNA, 345 bp, Homo sapiens
  misc_feature (17)..(17): n is a, c, g, or t
  misc_feature (21)..(21): n is a, c, g, or t
ggtactctagaggatcngcanactgggtcgagttcgacaggcttttgcagttgtgggtcgtgtgactctgtgactcaggaggatcttgttcggtgcgaattttggactccgggaggcggcctggacccctccgccagggacagtgtcccctagggactattcagccaccttccgttgttttggtgacgattcaacaagggacttttcttcgagtgcgataggcttattactttcatggagggttggggacagcttcacagtctgtcacccactttttctgtttttatttactttatgtgtgttttgtgtttattttttcgaattggcggtttagtaaagaaccaa

SEQ ID NO: 349124 - DNA, 396 bp, Homo sapiens
ttttattgatttagaattaaaattttgaggctcatactttaattttgtttattgtaaatgcattaactgcctgccttttaaaataagtgacatttgattgcattaaattttgcatttacaaatatgcaatctactaaaaagtctaccacatggcttattttgacccatttgtttggagacttttcattgtttcctttcttttatgctacagatggggacacctgtcacaagctcaagtacagcttcatccaattcagaaagtctgtctgcatcttctaaagctctgtttcctagcacagcacaagtacgcaggaagttgcagtttaaaattgttaaaatggctttataacttaaccctttggaccctacttaaaaaatgaatatttttccaaaaat

SEQ ID NO: 349125 - DNA, 457 bp, Homo sapiens
agaaatcgtccaggtgtggtggttcatgccagtaatctcagcacttgggaggctgaagtaggtagagagagcagttcaattttcttttctccctgcaggtgctgctgtcaagcttgaatgaaaggtatctcatgggtgggcgcgtggctcatgcctgcaatcccagctactcaggaggctgaagtgggaggatcgcttgagcctgggaggcaaaggcttgcagtgagcccagattgcaccactgcactctagcctgggtgacagagtgagaccatgtctcaaaaaaaaaaaaaaaaaaaaccagacacatttcgatagaaacattactgcataaggtattaaaattatgtgttaacatttgatcaccaaaggaaatataagcattattgcattctatcttttagtattgttaaatttctttatttagtcgatgttgtattaaagttaaataaatgca

SEQ ID NO: 349126 - DNA, 448 bp, Homo sapiens
tagtacacgcggatgaattcgactatcgacaattcacgcaacatcctgtaccaacactatgtattccagcaattctgagggtcaaatcaaccagaaagcctcaatcagagcgttccccaccgtacggcgtctcttaacccatgccttcaaacgaggaatgcctcggattggccgctttttttttttttttttttttttgatgagagtagttatatatatacatatacagagaagagcatcttcatacatgacaaacatacatttcctctgtgtgtacagcacacaagtaatatacacaaatatattccatgtctgaacaaatcctttttaaaactttaaaagctggctgggcacagtggctcacgcgtggctcacgcctgtaatcccagcactttgggaggctgaggccgaaggattacctgaggtcaggagttcaagaccagcctgg

SEQ ID NO: 349127 - DNA, 265 bp, Homo sapiens
tttttttttgatgagaagctaagttttattattataattacaaattaattacagagaaactgaagccattcttcatacatgacaaacatacatttcctctgtgtgtacagcacacaagtaatatacacaaatatattccatgtctgaacaaatcctttttaaaactttaaaagctggctgggcacagtggctcacgcactttgggaggccaaggcatgagccaccacacccagcccagacttactttttttaaaataagactacc

SEQ ID NO: 349128 - DNA, 2246 bp, Homo sapiens
agtgcttgacgggaggcggagcggggaacgaggccgtcggccattttgtgtctgcttcctgtgggacgtggtggtagccgttgggttgggaaagtgagggatttttggcctcgtttctcctgcttcttttctcctcccttttactttgccggtagaacacagttatgggtcgcaagaagaagaagcagctgaagccgtggtgctggtattgtaatagagattttgatgatgagaagatccttattcagcaccaaaaagcaaagcattttaaatgccatatatgtcacaagaaattgtatacaggacctggcttagctattcattgcatgcaggtacataaagaaacaatagatgccgtaccaaatgcaatacctggaagaacagacatagagttggaaatatatggtatggaaggtattccagaaaaagacatggatgaaagacgacgacttcttgaacagaaaacacaagaaagtcaaaaaaagaagcaacaagatgattctgatgaatatgatgatgacgactctgcagcctcaacttcatttcagccacagcctgttcaacctcagcaaggttatattcctccaatggcacagccaggactgccaccagtaccaggagcaccaggaatgcctccaggcatacctccattaatgccaggtgttcctcctctgatgccaggaatgccaccagttatgccaggcatgccacctggattgcatcatcagagaaaatacacccagtcattttgcggtgaaaacataatgatgccaatgggtggaatgatgccacctggaccaggaataccacctctgatgcctggaatgccaccaggtatgcccccacctgttccacgtcctggaattcctccaatgactcaagcacaggctgtttcagcgccaggtattcttaatagaccacctgcaccaacagcaactgtacctgccccacagcctccagttactaagcctcttttccccagtgctggacaggctcaggcagctgtccaaggacctgttggtacagatttcaaacccttaaatagtacccctgcaacaactacagaacccccaaagcctacattccctgcttatacacagtctacagcttcaacaactagtacaacaaatagtactgcagctaaaccagcggcttcaataacaagtaagcctgctacacttacaacaactagtgcaaccagtaagttgatccatccagatgaggatatatccctggaagagagaagggcacagttacctaagtatcaacgtaatcttcctcggccaggacaggcccccatcggtaatccaccagttggaccaattggaggtatgatgccaccacagccaggcatcccacagcaacaaggaatgagacccccaatgccacctcatggtcagtatggtggtcatcatcaaggcatgccaggataccttcctggtgctatgcccccgtatgggcagggaccgccaatggtgcccccttaccagggtgggcctcctcgacctccgatgggaatgagacctcctgtaatgtcgcaaggtggccgttactgatcttacttcatccagtctaataggtttggagattaaaccttttctcaacttgtgctgtttatatagccaagcttccgtcaataaggcttcattgtgactttaacaaacattatcttcccacataccaggaactattggacatttattttacatgggaaaaattatttggaataataaagcaggaacttttcctgaagttgcaatttatactgtatggcttctttttcatgtttcatctaggtttttagaagtgaagtatagtaaatttggttcgttaaattgtgaaggcgctggaattacatgaacataccaccctagtaaaggcaagttctgtaagcttacattgctatttgtaaagtttgccttcacagcatttcagatgctgttggacttcatgtccccaacctagcttggtgagggctgtaactgtttccaagtacttgtacattggaagtctgaatgtgtaacaatatttaatgtatttagagttcctcatgttgcagggtttaagaaatctgacccaccaaggtcatgtgacttttctgtactgttaaacttcattgtaataaaatgagagaaaaatttatgcctttttattcataacccagctgtggaccactgcctgaaaggtttgtacagatgcatgccacagtagatgtccacataataaaattcatagttaccaatgca

SEQ ID NO: 349129 - DNA, 2915 bp, Homo sapiens
agtgcttgacgggaggcggagcggggaacgaggccgtcggccattttgtgtctgcttcctgtgggacgtggtggtagccgttgggttgggaaagtgagggatttttggcctcgtttctcctgcttcttttctcctcccttttactttgccggtagaacacagttatgggtcgcaagaagaagaagcagctgaagccgtggtgctggtattgtaatagagattttgatgatgagaagatccttattcagcaccaaaaagcaaagcattttaaatgccatatatgtcacaagaaattgtatacaggacctggcttagctattcattgcatgcaggtacataaagaaacaatagatgccgtaccaaatgcaatacctggaagaacagacatagagttggaaatatatggtatggaaggtattccagaaaaagacatggatgaaagacgacgacttcttgaacagaaaacacaagaaagtcaaaaaaagaagcaacaagatgattctgatgaatatgatgatgacgactctgcagcctcaacttcatttcagccacagcctgttcaacctcagcaaggttatattcctccaatggcacagccaggactgccaccagtaccaggagcaccaggaatgcctccaggcatacctccattaatgccaggtgttcctcctctgatgccaggaatgccaccagttatgccaggcatgccacctggattgcatcatcagagaaaatacacccagtcattttgcggtgaaaacataatgatgccaatgggtggaatgatgccacctggaccaggaataccacctctgatgcctggaatgccaccaggtatgcccccacctgttccacgtcctggaattcctccaatgactcaagcacaggctgtttcagcgccaggtattcttaatagaccacctgcaccaacagcaactgtacctgccccacagcctccagttactaagcctcttttccccagtgctggacaggctcaggcagctgtccaaggacctgttggtacagatttcaaacccttaaatagtacccctgcaacaactacagaacccccaaagcctacattccctgcttatacacagtctacagcttcaacaactagtacaacaaatagtactgcagctaaaccagcggcttcaataacaagtaagcctgctacacttacaacaactagtgcaaccagtaagttgatccatccagatgaggatatatccctggaagagagaagggcacagttacctaagtatcaacgtaatcttcctcggccaggacaggcccccatcggtaatccaccagttggaccaattggaggtatgatgccaccacagccaggcatcccacagcaacaaggaatgagacccccaatgccacctcatggtcagtatggtggtcatcatcaaggcatgccaggataccttcctggtgctatgcccccgtatgggcagggaccgccaatggtgcccccttaccagggtgggcctcctcgacctccgatgggaatgagacctcctgtaatgtcgcaaggtggccgttactgatcttacttcatccagtctaataggtttggagattaaaccttttctcaacttgtgctgtttatatagccaagcttccgtcaataaggcttcattgtgactttaacaaacattatcttcccacataccaggaactattggacatttattttacatgggaaaaattatttggaataataaagcaggaacttttcctgaagttgcaatttatactgtatggcttctttttcatgtttcatctaggtttttagaagtgaagtatagtaaatttggttcgttaaattgtgaaggcgctggaattacatgaacataccaccctagtaaaggcaagttctgtaagcttacattgctatttgtaaagtttgccttcacagcatttcagatgctgttggacttcatgtccccaacctagcttggtgagggctgtaactgtttccaagtacttgtacattggaagtctgaatgtgtaacaatatttaatgtatttagagttcctcatgttgcagggtttaagaaatctgacccaccaaggtcatgtgacttttctgtactgttaaacttcattgtaataaaatgagagaaaaatttatgcctttttattcataacccagctgtggaccactgcctgaaaggtttgtacagatgcatgccacagtagatgtccacataataaaattcatagttaccaatgcagttttgatatatcattggattctgtctttgagttgtaggttatttcttagctgcatgttttaaactgaatttgcatagagttgtatgttaatgtttcagttaagagaaaaacttaagatacatgagtcattacataatgggtatgaaatctttataatcacccttccaccctctatggtgtcagtacacatcacgtgtcatagatacttaaaatgtaaatgttaacacttttccttcctgctgagatgtttagagcctagtgccagacccattcatttccttttgattatttttgagactcagtactgcatggacctcagaagcttttcaggtgcaaacttctagaagcttaggtgcatgcagtaatagcttcttgtgctgttaatgggttattatatattattctaagtgtaatgctgagaatctaaatgtgtctctgttgggatggttaacagatgaattggcaatttttattatgttcctggaagattacattattcatttgagtaccttctgttattaagcctaggtagccttactgtgcaactttttatttatccttggaaattttgaatgttgtgttcttacagagagcttttctgtagagatgactgctattcaatattttgtgttgcaacctcttaaaataatagctcttgttgacctttt

SEQ ID NO: 349130 - DNA, 2920 bp, Homo sapiens
  misc_feature (357)..(357): n is a, c, g, or t
  misc_feature (361)..(362): n is a, c, g, or t
  misc_feature (364)..(365): n is a, c, g, or t
  misc_feature (367)..(368): n is a, c, g, or t
  misc_feature (371)..(371): n is a, c, g, or t
  misc_feature (374)..(376): n is a, c, g, or t
  misc_feature (379)..(379): n is a, c, g, or t
  misc_feature (381)..(381): n is a, c, g, or t
  misc_feature (606)..(609): n is a, c, g, or t
  misc_feature (678)..(678): n is a, c, g, or t
  misc_feature (681)..(681): n is a, c, g, or t
  misc_feature (683)..(683): n is a, c, g, or t
  misc_feature (687)..(687): n is a, c, g, or t
atcattctctgaagagcatattttattaatcttcaagttcctcagcatattaataataaaaaccttgatatatattatcaacaagtctgactgttatgcccaaagaaaatccagattattttaagtgagtttgttctttttcatctgattcatcatccataacctgttctacgccttctactccggaatataaaactgcagcatgttctgaattccattggaggtatgatgccaccacagccaggcatcccacagcaacaaggaatgagacccccaatgccacctcatggtcagtatggtggtcatcatcaaggcatgccaggataccttcctggtgctatgcccccgtatgggcangganngnnannggngcnnnctnancagggtgggcctcctcgacctccgatgggaatgagacctcctgtaatgtcgcaaggtggccgttactgatcttacttcatccagtctaataggtttggagattaaaccttttctcaacttgtgctgtttatatagccaagcttccgtcaataaggcttcattgtgactttaacaaacattatcttcccacataccaggaactattggacattattttacatgggnnnnttatttggaataataaagcaggaacttttcctgaagttgcaatttaaaaaaaaaaaaaaaaaaaaaaanaananaaanaaaaaaaaaaaggaacgaggccgtcggccattttgtgtctgcttcctgtgggacgtggtggtagccgttgggttgggaaagtgagggatttttggcctcgtttctcctgcttcttttctcctcccttttactttgccggtagaacacagttatgggtcgcaagaagaagaagcagctgaagccgtggtgctggtattgtaatagagattttgatgatgagaagatccttattcagcaccaaaaagcaaagcattttaaatgccatatatgtcacaagaaattgtatacaggacctggcttagctattcattgcatgcaggtacataaagaaacaatagatgccgtaccaaatgcaatacctggaagaacagacatagagttggaaatatatggtatggaaggtattccagaaaaagacatggatgaaagacgacgacttcttgaacagaaaacacaagaaagtcaaaaaaagaagcaacaagatgattctgatgaatatgatgatgacgactctgcagcctcaacttcatttcagccacagcctgttcaacctcagcaaggttatattcctccaatggcacagccaggactgccaccagtaccaggagcaccaggaatgcctccaggcatacctccattaatgccaggtgttcctcctctgatgccaggaatgccaccagttatgccaggcatgccacctggattgcatcatcagagaaaatacacccagtcattttgcggtgaaaacataatgatgccaatgggtggaatgatgccacctggaccaggaataccacctctgatgcctggaatgccaccaggtatgcccccacctgttccacgtcctggaattcctccaatgactcaagcacaggctgtttcagcgccaggtattcttaatagaccacctgcaccaacagcaactgtacctgccccacagcctccagttactaagcctcttttccccagtgctggacaggctcaggcagctgtccaaggacctgttggtacagatttcaaacccttaaatagtacccctgcaacaactacagaacccccaaagcctacattccctgcttatacacagtctacagcttcaacaactagtacaacaaatagtactgcagctaaaccagcggcttcaataacaagtaagcctgctacacttacaacaactagtgcaaccagtaagttgatccatccagatgaggatatatccctggaagagagaagggcacagttacctaagtatcaacgtaatcttcctcggccaggacaggcccccatcggtaatccaccagttggaccaattggaggtatgatgccaccacagccaggcatcccacagcaacaaggaatgagacccccaatgccacctcatggtcagtatggtggtcatcatcaaggcatgccaggataccttcctggtgctatgcccccgtatgggcagggaccgccaatggtgcccccttaccagggtgggcctcctcgacctccgatgggaatgagacctcctgtaatgtcgcaaggtggccgttactgatcttacttcatccagtctaataggtttggagattaaaccttttctcaacttgtgctgtttatatagccaagcttccgtcaataaggcttcattgtgactttaacaaacattatcttcccacataccaggaactattggacatttattttacatgggaaaaattatttggaataataaagcaggaacttttcctgaagttgcaatttatactgtatggcttctttttcatgtttcatctaggtttttagaagtgaagtatagtaaatttggttcgttaaattgtgaaggcgctggaattacatgaacataccaccctagtaaaggcaagttctgtaagcttacattgctatttgtaaagtttgccttcacagcatttcagatgctgttggacttcatgtccccaacctagcttggtgagggctgtaactgtttccaagtacttgtacattggaagtctgaatgtgtaacaatatttaatgtatttagagttcctcatgttgcagggtttaagaaatctgacccaccaaggtcatgtgacttttctgtactgttaaacttcattgtaataaaatgagagaaaaatttatgcctttttattcataacccagctgtggaccactgcctgaaaggtttgtacagatgcatgccacagtagatgtccacataataaaattcatagttaccaatgca

SEQ ID NO: 349131 - DNA, 2285 bp, Homo sapiens
agagagagagagagagagagagagagagagagagagagagagagagagagagagagagagagaggaacgaggccgtcggccattttgtgtctgcttcctgtgggacgtggtggtagccgttgggttgggaaagtgagggatttttggcctcgtttctcctgcttcttttctcctcccttttactttgccggtagaacacagttatgggtcgcaagaagaagaagcagctgaagccgtggtgctggtattgtaatagagattttgatgatgagaagatccttattcagcaccaaaaagcaaagcattttaaatgccatatatgtcacaagaaattgtatacaggacctggcttagctattcattgcatgcaggtacataaagaaacaatagatgccgtaccaaatgcaatacctggaagaacagacatagagttggaaatatatggtatggaaggtattccagaaaaagacatggatgaaagacgacgacttcttgaacagaaaacacaagaaagtcaaaaaaagaagcaacaagatgattctgatgaatatgatgatgacgactctgcagcctcaacttcatttcagccacagcctgttcaacctcagcaaggttatattcctccaatggcacagccaggactgccaccagtaccaggagcaccaggaatgcctccaggcatacctccattaatgccaggtgttcctcctctgatgccaggaatgccaccagttatgccaggcatgccacctggattgcatcatcagagaaaatacacccagtcattttgcggtgaaaacataatgatgccaatgggtggaatgatgccacctggaccaggaataccacctctgatgcctggaatgccaccaggtatgcccccacctgttccacgtcctggaattcctccaatgactcaagcacaggctgtttcagcgccaggtattcttaatagaccacctgcaccaacagcaactgtacctgccccacagcctccagttactaagcctcttttccccagtgctggacaggctcaggcagctgtccaaggacctgttggtacagatttcaaacccttaaatagtacccctgcaacaactacagaacccccaaagcctacattccctgcttatacacagtctacagcttcaacaactagtacaacaaatagtactgcagctaaaccagcggcttcaataacaagtaagcctgctacacttacaacaactagtgcaaccagtaagttgatccatccagatgaggatatatccctggaagagagaagggcacagttacctaagtatcaacgtaatcttcctcggccaggacaggcccccatcggtaatccaccagttggaccaattggaggtatgatgccaccacagccaggcatcccacagcaacaaggaatgagacccccaatgccacctcatggtcagtatggtggtcatcatcaaggcatgccaggataccttcctggtgctatgcccccgtatgggcagggaccgccaatggtgcccccttaccagggtgggcctcctcgacctccgatgggaatgagacctcctgtaatgtcgcaaggtggccgttactgatcttacttcatccagtctaataggtttggagattaaaccttttctcaacttgtgctgtttatatagccaagcttccgtcaataaggcttcattgtgactttaacaaacattatcttcccacataccaggaactattggacatttattttacatgggaaaaattatttggaataataaagcaggaacttttcctgaagttgcaatttatactgtatggcttctttttcatgtttcatctaggtttttagaagtgaagtatagtaaatttggttcgttaaattgtgaaggcgctggaattacatgaacataccaccctagtaaaggcaagttctgtaagcttacattgctatttgtaaagtttgccttcacagcatttcagatgctgttggacttcatgtccccaacctagcttggtgagggctgtaactgtttccaagtacttgtacattggaagtctgaatgtgtaacaatatttaatgtatttagagttcctcatgttgcagggtttaagaaatctgacccaccaaggtcatgtgacttttctgtactgttaaacttcattgtaataaaatgagagaaaaatttatgcctttttattcataacccagctgtggaccactgcctgaaaggtttgtacagatgcatgccacagtagatgtccacataataaaattcatagttaccaatgca

SEQ ID NO: 349132 - DNA, 2339 bp, Homo sapiens
agtgcttgacgggaggcggagcggggaacgaggccgtcggccattttgtgtctgcttcctgtgggacgtggtggtagccgttgggttgggaaagtgagggatttttggcctcgtttctcctgcttcttttctcctcccttttactttgccggtagaacacagttatgggtcgcaagaagaagaagcagctgaagccgtggtgctggtattgtaatagagattttgatgatgagaagatccttattcagcaccaaaaagcaaagcattttaaatgccatatatgtcacaagaaattgtatacaggacctggcttagctattcattgcatgcaggtacataaagaaacaatagatgccgtaccaaatgcaatacctggaagaacagacatagagttggaaatatatggtatggaaggtattccagaaaaagacatggatgaaagacgacgacttcttgaacagaaaacacaagaaagtcaaaaaaagaagcaacaagatgattctgatgaatatgatgatgacgactctgcagcctcaacttcatttcagccacagcctgttcaacctcagcaaggttatattcctccaatggcacagccaggactgccaccagtaccaggagcaccaggaatgcctccaggcatacctccattaatgccaggtgttcctcctctgatgccaggaatgccaccagttatgccaggcatgccacctggattgcatcatcagagaaaatacacccagtcattttgcggtgaaaacataatgatgccaatgggtggaatgatgccacctggaccaggaataccacctctgatgcctggaatgccaccaggtatgcccccacctgttccacgtcctggaattcctccaatgactcaagcacaggctgtttcagcgccaggtattcttaatagaccacctgcaccaacagcaactgtacctgccccacagcctccagttactaagcctcttttccccagtgctggacagatggggacacctgtcacaagctcaagtacagcttcatccaattcagaaagtctgtctgcatcttctaaagctctgtttcctagcacagcacaagctcaggcagctgtccaaggacctgttggtacagatttcaaacccttaaatagtacccctgcaacaactacagaacccccaaagcctacattccctgcttatacacagtctacagcttcaacaactagtacaacaaatagtactgcagctaaaccagcggcttcaataacaagtaagcctgctacacttacaacaactagtgcaaccagtaagttgatccatccagatgaggatatatccctggaagagagaagggcacagttacctaagtatcaacgtaatcttcctcggccaggacaggcccccatcggtaatccaccagttggaccaattggaggtatgatgccaccacagccaggcatcccacagcaacaaggaatgagacccccaatgccacctcatggtcagtatggtggtcatcatcaaggcatgccaggataccttcctggtgctatgcccccgtatgggcagggaccgccaatggtgcccccttaccagggtgggcctcctcgacctccgatgggaatgagacctcctgtaatgtcgcaaggtggccgttactgatcttacttcatccagtctaataggtttggagattaaaccttttctcaacttgtgctgtttatatagccaagcttccgtcaataaggcttcattgtgactttaacaaacattatcttcccacataccaggaactattggacatttattttacatgggaaaaattatttggaataataaagcaggaacttttcctgaagttgcaatttatactgtatggcttctttttcatgtttcatctaggtttttagaagtgaagtatagtaaatttggttcgttaaattgtgaaggcgctggaattacatgaacataccaccctagtaaaggcaagttctgtaagcttacattgctatttgtaaagtttgccttcacagcatttcagatgctgttggacttcatgtccccaacctagcttggtgagggctgtaactgtttccaagtacttgtacattggaagtctgaatgtgtaacaatatttaatgtatttagagttcctcatgttgcagggtttaagaaatctgacccaccaaggtcatgtgacttttctgtactgttaaacttcattgtaataaaatgagagaaaaatttatgcctttttattcataacccagctgtggaccactgcctgaaaggtttgtacagatgcatgccacagtagatgtccacataataaaattcatagttaccaatgca

SEQ ID NO: 349133 - DNA, 2697 bp, Homo sapiens
  misc_feature (2697)..(2697): n is a, c, g, or t
agtgcttgacgggaggcggagcggggaacgaggccgtcggccattttgtgtctgcttcctgtgggacgtggtggtagccgttgggttgggaaagtgagggatttttggcctcgtttctcctgcttcttttctcctcccttttactttgccggtagaacacagttatgggtcgcaagaagaagaagcagctgaagccgtggtgctggtattgtaatagagattttgatgatgagaagatccttattcagcaccaaaaagcaaagcattttaaatgccatatatgtcacaagaaattgtatacaggacctggcttagctattcattgcatgcaggtacataaagaaacaatagatgccgtaccaaatgcaatacctggaagaacagacatagagttggaaatatatggtatggaaggtattccagaaaaagacatggatgaaagacgacgacttcttgaacagaaaacacaagaaagtcaaaaaaagaagcaacaagatgattctgatgaatatgatgatgacgactctgcagcctcaacttcatttcagccacagcctgttcaacctcagcaaggttatattcctccaatggcacagccaggactgccaccagtaccaggagcaccaggaatgcctccaggcatacctccattaatgccaggtgttcctcctctgatgccaggaatgccaccagttatgccaggcatgccacctggattgcatcatcagagaaaatacacccagtcattttgcggtgaaaacataatgatgccaatgggtggaatgatgccacctggaccaggaataccacctctgatgcctggaatgccaccaggtatgcccccacctgttccacgtcctggaattcctccaatgactcaagcacaggctgtttcagcgccaggtattcttaatagaccacctgcaccaacagcaactgtacctgccccacagcctccagttactaagcctcttttccccagtgctggacaggctcaggcagctgtccaaggacctgttggtacagatttcaaacccttaaatagtacccctgcaacaactacagaacccccaaagcctacattccctgcttatacacagtctacagcttcaacaactagtacaacaaatagtactgcagctaaaccagcggcttcaataacaagtaagcctgctacacttacaacaactagtgcaaccagtaagttgatccatccagatgaggatatatccctggaagagagaagggcacagttacctaagtatcaacgtaatcttcctcggccaggacaggcccccatcggtaatccaccagttggaccaattggaggtatgatgccaccacagccaggcatcccacagcaacaaggaatgagacccccaatgccacctcatggtcagtatggtggtcatcatcaaggcatgccaggataccttcctggtgctatgcccccgtatgggcagggaccgccaatggtgcccccttaccagggtgggcctcctcgacctccgatgggaatgagacctcctgtaatgtcgcaaggtggccgttactgatcttacttcatccagtctaataggtttggagattaaaccttttctcaacttgtgctgtttatatagccaagcttccgtcaataaggcttcattgtgactttaacaaacattatcttcccacataccaggaactattggacatttattttacatgggaaaaattatttggaataataaagcaggaacttttcctgaagttgcaatttatactgtatggcttctttttcatgtttcatctaggtttttagaagtgaagtatagtaaatttggttcgttaaattgtgaaggcgctggaattacatgaacataccaccctagtaaaggcaagttctgtaagcttacattgctatttgtaaagtttgccttcacagcatttcagatgctgttggacttcatgtccccaacctagcttggtgagggctgtaactgtttccaagtacttgtacattggaagtctgaatgtgtaacaatatttaatgtatttagagttcctcatgttgcagggtttaagaaatctgacccaccaaggtcatgtgacttttctgtactgttaaacttcattgtaataaaatgagagaaaaaaaaaaaaaaaaaaaaaaaaggggggggggaaaaaatccccggggggccgcaatgtttttcgccgccccctgctttttttgtaacaaggggccccattggggagggggtttaaaagcggaggggggcgcgggggttacacaaccggtcgggcgtgggagcaacctggccgctgggaccttgtggaggggcccctcttctgtggggcttggcgcttgctgggcacctcctcaagagagtttaatggctggggatacttaccctcacggctgctgctgggacccccggcggatatagggggggcggggagaaatggatctggggttttgtttttggcatacaatgcaagtctctgttatatataaaaaagtcacgagcaaggatgaaagacagcaggaaattatctagaatataaatagaacaagaatgaaagtgcgtaagtaaataaaagcgtccacgagaaaatacaacaataaaggagaggtgataaagataataatcataatatatagaatgaatgaagaatacatatatacaaatataggtgaatgagacatgacan

SEQ ID NO: 349134 - DNA, 2828 bp, Homo sapiens
  misc_feature (2474)..(2474): n is a, c, g, or t
  misc_feature (2476)..(2476): n is a, c, g, or t
  misc_feature (2478)..(2478): n is a, c, g, or t
  misc_feature (2482)..(2483): n is a, c, g, or t
  misc_feature (2485)..(2485): n is a, c, g, or t
  misc_feature (2488)..(2488): n is a, c, g, or t
  misc_feature (2491)..(2491): n is a, c, g, or t
  misc_feature (2496)..(2496): n is a, c, g, or t
  misc_feature (2679)..(2679): n is a, c, g, or t
agtgcttgacgggaggcggagcggggaacgaggccgtcggccattttgtgtctgcttcctgtgggacgtggtggtagccgttgggttgggaaagtgagggatttttggcctcgtttctcctgcttcttttctcctcccttttactttgccggtagaacacagttatgggtcgcaagaagaagaagcagctgaagccgtggtgctggtattgtaatagagattttgatgatgagaagatccttattcagcaccaaaaagcaaagcattttaaatgccatatatgtcacaagaaattgtatacaggacctggcttagctattcattgcatgcaggtacataaagaaacaatagatgccgtaccaaatgcaatacctggaagaacagacatagagttggaaatatatggtatggaaggtattccagaaaaagacatggatgaaagacgacgacttcttgaacagaaaacacaagaaagtcaaaaaaagaagcaacaagatgattctgatgaatatgatgatgacgactctgcagcctcaacttcatttcagccacagcctgttcaacctcagcaaggttatattcctccaatggcacagccaggactgccaccagtaccaggagcaccaggaatgcctccaggcatacctccattaatgccaggtgttcctcctctgatgccaggaatgccaccagttatgccaggcatgccacctggattgcatcatcagagaaaatacacccagtcattttgcggtgaaaacataatgatgccaatgggtggaatgatgccacctggaccaggaataccacctctgatgcctggaatgccaccaggtatgcccccacctgttccacgtcctggaattcctccaatgactcaagcacaggctgtttcagcgccaggtattcttaatagaccacctgcaccaacagcaactgtacctgccccacagcctccagttactaagcctcttttccccagtgctggacagatggggacacctgtcacaagctcaagtacagcttcatccaattcagaaagtctgtctgcatcttctaaagctctgtttcctagcacagcacaagctcaggcagctgtccaaggacctgttggtacagatttcaaacccttaaatagtacccctgcaacaactacagaacccccaaagcctacattccctgcttatacacagtctacagcttcaacaactagtacaacaaatagtactgcagctaaaccagcggcttcaataacaagtaagcctgctacacttacaacaactagtgcaaccagtaagttgatccatccagatgaggatatatccctggaagagagaagggcacagttacctaagtatcaacgtaatcttcctcggccaggacaggcccccatcggtaatccaccagttggaccaattggaggtatgatgccaccacagccaggcatcccacagcaacaaggaatgagacccccaatgccacctcatggtcagtatggtggtcatcatcaaggcatgccaggataccttcctggtgctatgcccccgtatgggcagggaccgccaatggtgcccccttaccagggtgggcctcctcgacctccgatgggaatgagacctcctgtaatgtcgcaaggtggccgttactgatcttacttcatccagtctaataggtttggagattaaaccttttctcaacttgtgctgtttatatagccaagcttccgtcaataaggcttcattgtgactttaacaaacattatcttcccacataccaggaactattggacatttattttacatgggaaaaattatttggaataataaagcaggaacttttcctgaagttgcaatttatactgtatggcttctttttcatgtttcatctaggtttttagaagtgaagtatagtaaatttggttcgttaaattgtgaaggcgctggaattacatgaacataccaccctagtaaagccctgccataggacaggctgaggctgagtctcagtgttgccctgttcagtctgaggcaagtgggatttattttattccttataggggctttcacagctttatggctgttggatatttatgtccccaaacttgcagcaagtttggtgaaggcccctaaatttaattaaacttaggatttttatactcttttggcagagaaggctctatattaatattcacgtttgactgtggtgttaataaacataagtatttcatatgcaattttatgtaatttgctgtgtgttacataattaacagcttcagtaaagcttgtgttcctatattgaacttcaataaattgacaaaatttgatatttttgattggaggcaagaaatgtttcattcaagttttttactttcacttctaggaaaatcttactggttttattttctccataaactattaaatttaacctcaaggataagtttaatcattggaaatgccactgcactccagcctggncnangagnnanacnccntctcnaaaaaaaaaagaatgttaataacaatacttcattagatagtttcttgttgaagcaatttgtaattcccggaaagttgttagccatgcttcaagtttacaaataggtgaagttttaaggtatctagagtttaagtagttgattggtttgtctggcaaaagtaaatagttgggatgtaagggtanatttttgaaaattactcttaacgttgtaagattttagatgcatgcctttatgcttggtgagcctctgcattcgagtatttagccctgcgcttatttttattccctggaagagagaagggcacagtacctaactctctactcactgcttc

SEQ ID NO: 349135 - DNA, 2839 bp, Homo sapiens
agtgcttgacgggaggcggagcggggaacgaggccgtcggccattttgtgtctgcttcctgtgggacgtggtggtagccgttgggttgggaaagtgagggatttttggcctcgtttctcctgcttcttttctcctcccttttactttgccggtagaacacagttatgggtcgcaagaagaagaagcagctgaagccgtggtgctggtattgtaatagagattttgatgatgagaagatccttattcagcaccaaaaagcaaagcattttaaatgccatatatgtcacaagaaattgtatacaggacctggcttagctattcattgcatgcaggtacataaagaaacaatagatgccgtaccaaatgcaatacctggaagaacagacatagagttggaaatatatggtatggaaggtattccagaaaaagacatggatgaaagacgacgacttcttgaacagaaaacacaagaaagtcaaaaaaagaagcaacaagatgattctgatgaatatgatgatgacgactctgcagcctcaacttcatttcagccacagcctgttcaacctcagcaaggttatattcctccaatggcacagccaggactgccaccagtaccaggagcaccaggaatgcctccaggcatacctccattaatgccaggtgttcctcctctgatgccaggaatgccaccagttatgccaggcatgccacctgggtaagaaaattcttttaattgccctgtaggcttgtgcctagtaatgatctttttcaatttggatgttatatgaatgaaatgttactttccattttttgcttctagaaggtatgggctctatatatcttgtctaataaagggatcaaccagtaaatttaaggaatataaatttgcctctgagtaatagatttttgggttttagggtatatgtaagcaaccatctacttcaattgcatttactgtgattaaagtagttggttatttatagatttgcgtttctgagattcagaattatctgtgacactttgtagttgtgacaagaagcagagaaactctgtaaatgatttatttgtcaaagcatcaaaactaaaatgaatatgaggtgcttgtgcccatcacttttacttaaatattgttggatgtgagaggtatacaatacactttcccactgtattttgaaaatcacagttagattttgattttgtcatacattttcacagattgcatcatcagagaaaatacacccagtcattttgcggtgaaaacataatgatgccaatgggtggaatgatgccacctggaccaggaataccacctctgatgcctggaatgccaccaggtatgcccccacctgttccacgtcctggaattcctccaatgactcaagcacaggctgtttcagcgccaggtattcttaatagaccacctgcaccaacagcaactgtacctgccccacagcctccagttactaagcctcttttccccagtgctggacagatggggacacctgtcacaagctcaagtacagcttcatccaattcagaaagtctgtctgcatcttctaaagctctgtttcctagcacagcacaagctcaggcagctgtccaaggacctgttggtacagatttcaaacccttaaatagtacccctgcaacaactacagaacccccaaagcctacattccctgcttatacacagtctacagcttcaacaactagtacaacaaatagtactgcagctaaaccagcggcttcaataacaagtaagcctgctacacttacaacaactagtgcaaccagtaagttgatccatccagatgaggatatatccctggaagagagaagggcacagttacctaagtatcaacgtaatcttcctcggccaggacaggcccccatcggtaatccaccagttggaccaattggaggtatgatgccaccacagccaggcatcccacagcaacaaggaatgagacccccaatgccacctcatggtcagtatggtggtcatcatcaaggcatgccaggataccttcctggtgctatgcccccgtatgggcagggaccgccaatggtgcccccttaccagggtgggcctcctcgacctccgatgggaatgagacctcctgtaatgtcgcaaggtggccgttactgatcttacttcatccagtctaataggtttggagattaaaccttttctcaacttgtgctgtttatatagccaagcttccgtcaataaggcttcattgtgactttaacaaacattatcttcccacataccaggaactattggacatttattttacatgggaaaaattatttggaataataaagcaggaacttttcctgaagttgcaatttatactgtatggcttctttttcatgtttcatctaggtttttagaagtgaagtatagtaaatttggttcgttaaattgtgaaggcgctggaattacatgaacataccaccctagtaaaggcaagttctgtaagcttacattgctatttgtaaagtttgccttcacagcatttcagatgctgttggacttcatgtccccaacctagcttggtgagggctgtaactgtttccaagtacttgtacattggaagtctgaatgtgtaacaatatttaatgtatttagagttcctcatgttgcagggtttaagaaatctgacccaccaaggtcatgtgacttttctgtactgttaaacttcattgtaataaaatgagagaaaaatttatgcctttttattcataacccagctgtggaccactgcctgaaaggtttgtacagatgcatgccacagtagatgtccacataataaaattcatagttaccaatgca

SEQ ID NO: 349136 - DNA, 3462 bp, Homo sapiens
agtgcttgacgggaggcggagcggggaacgaggccgtcggccattttgtgtctgcttcctgtgggacgtggtggtagccgttgggttgggaaagtgagggatttttggcctcgtttctcctgcttcttttctcctcccttttactttgccggtagaacacagttatgggtcgcaagaagaagaagcagctgaagccgtggtgctggtattgtaatagagattttgatgatgagaagatccttattcagcaccaaaaagcaaagcattttaaatgccatatatgtcacaagaaattgtatacaggacctggcttagctattcattgcatgcaggtacataaagaaacaatagatgccgtaccaaatgcaatacctggaagaacagacatagagttggaaatatatggtatggaaggtattccagaaaaagacatggatgaaagacgacgacttcttgaacagaaaacacaagaaagtcaaaaaaagaagcaacaagatgattctgatgaatatgatgatgacgactctgcagcctcaacttcatttcagccacagcctgttcaacctcagcaaggttatattcctccaatggcacagccaggactgccaccagtaccaggagcaccaggaatgcctccaggcatacctccattaatgccaggtgttcctcctctgatgccaggaatgccaccagttatgccaggcatgccacctggattgcatcatcagagaaaatacacccagtcattttgcggtgaaaacataatgatgccaatgggtggaatgatgccacctggaccaggaataccacctctgatgcctggaatgccaccaggtatgcccccacctgttccacgtcctggaattcctccaatgactcaagcacaggctgtttcagcgccaggtattcttaatagaccacctgcaccaacagcaactgtacctgccccacagcctccagttactaagcctcttttccccagtgctggacaggctcaggcagctgtccaaggacctgttggtacagatttcaaacccttaaatagtacccctgcaacaactacagaacccccaaagcctacattccctgcttatacacagtctacagcttcaacaactagtacaacaaatagtactgcagctaaaccagcggcttcaataacaagtaagcctgctacacttacaacaactagtgcaaccagtaagctggagttagagtggaagaagggtttaccaaaattcttcctgcagactagttgcttacagggtttctttgagaggcttaaaaatttcaaaagtattatttaagccactctaaccctgcatgaaaaattggagttagaaatactgatttctgagaccacgtataccagtgaaaattagcttctgagtaaatttctaatttatgccctgctttatttagcctcgctatatgtaacacatggattattttttccctctagtttttaactatatcctagattaaaaccagcatatgctaagaatgtttttacattctgtttcctcctgtgatctttctgaaccaataataaacagtcaactgtgatgctttttagtatgaacaatgatagttttctaaaatctgaaaatcaatacctgagtatgtgatgtggcaatgcattcttctagataagcactaaacaaagtatggaccctcaatttatgtctttaagatttaaagtgaagtaaatttctaaggaactgtgtcctttcctagcaggaataaacagtgaaaatttggtaagtatttaacttgaagtgcatgtaatagtgatgagagtaagtagccaaatttccgtaatataaggtaatgtttaaaagtgagcaataattattgcatctcttttgcgacttcatgtagatgtgattaacattttttacaaatttgcctgcataaagattaaattggaacataccttactcctttgtctggtttttttattttgtatggtgctttaaatactaattttatatttcaagctttttgcagggtagaaataagtggctgttaaagaaaatatcttcaagaaggattatttcagtgtccctttttaaaactcgatgatggctttcagtttatttaagtcttctgtttttcagctccagttaaaactgacaataggcagctatcaaaaatggaaaaaatcttgtgctctttctggaatattagaggaatcagttaataatagtaaagtggtattaacccaatacttgatttgcagtttttaaagcagtttttaaattgagagaaaaggggctgggcccagctgaggcgggtggatctcctgaggtcaggagtttgagaccagcctggccaacatagtgaaaccccgtctctactaaaaatacaaaaatcagccgggtgtggtgggacgtgcctgtaaccccagctactctggaggctgaggcaggaaaatcgcttgaacccagggggaggaggttgcagtgagccgagatggcgccgttgcactccagcttgggtgacagagcgagactccgtctcaaaaaaaaaaagaaaaaaagaaaaagtgataagatttgggagtctattccctgggatgttctattaataataaagtgataataaatgaaggttaaagtcaagtgttcaattactacaccaggaaagattgattatttctgaggaaaaggtccatttatttccaaactagtctgtagtggtttagagtaagcattattttatgaagtggtacaagattgcaaaggttagtaaagggacctgtctgtcaggtcaatcttcggtcttcacttttactggcaagggattatgtgaagagtaagtcatacaagggatatgattgtaaggaggtcctgaacaaagcatgataaatgttagtccatgtgtattattaaatggtctaaagaaaaatcatgactgatcgcataatttttaatgtaagtaaatgagctcactaagggtaattaaatactagcttttaaaatttaaagttctcacgaatattagtgcatcttgtcactttgatttgtcacctggttaaatagctggaagcttgtgcaaatgaaaaatgaaatggaagactacatttgtatatatatctgtataatttttgtttactagtaggttcagagagagatctgagatgttccttaacatgtagccatgtaattagaactcacaaggggcattgaaatgtttttctttttcagatagtctggggctatttacttattttaagtaagccaagtctaccatttgaaaaatggtgctttatttccatatctgaagcctgaagttattttttagtttgttttcatctaaaagtggaaagatttttgcttctgcgttattaagagcctctttgtttggaggagatggttatctccttcactcattaacctttgagtgcttgttatctacaaagatgaataaaatctttcatttattatttaaaaaaaaaaa

SEQ ID NO: 349137 - DNA, 1920 bp, Homo sapiens
agtgcttgacgggaggcggagcggggaacgaggccgtcggccattttgtgtctgcttcctgtgggacgtggtggtagccgttgggttgggaaagtgagggatttttggcctcgtttctcctgcttcttttctcctcccttttactttgccggtagaacacagttatgggtcgcaagaagaagaagcagctgaagccgtggtgctggtattgtaatagagattttgatgatgagaagatccttattcagcaccaaaaagcaaagcattttaaatgccatatatgtcacaagaaattgtatacaggacctggcttagctattcattgcatgcaggtacataaagaaacaatagatgccgtaccaaatgcaatacctggaagaacagacatagagttggaaatatatggtatggaaggtattccagaaaaagacatggatgaaagacgacgacttcttgaacagaaaacacaagaaagtcaaaaaaagaagcaacaagatgattctgatgaatatgatgatgacgactctgcagcctcaacttcatttcagccacagcctgttcaacctcagcaaggttatattcctccaatggcacagccaggactgccaccagtaccaggagcaccaggaatgcctccaggcatacctccattaatgccaggtgttcctcctctgatgccaggaatgccaccagttatgccaggcatgccacctggattgcatcatcagagaaaatacacccagtcattttgcggtgaaaacataatgatgccaatgggtggaatgatgccacctggaccaggaataccacctctgatgcctggaatgccaccaggtatgcccccacctgttccacgtcctggaattcctccaatgactcaagcacaggctgtttcagcgccaggtattcttaatagaccacctgcaccaacagcaactgtacctgccccacagcctccagttactaagcctcttttccccagtgctggacaggctcaggcagctgtccaaggacctgttggtacagatttcaaacccttaaatagtacccctgcaacaactacagaacccccaaagcctacattccctgcttatacacagtctacagcttcaacaactagtacaacaaatagtactgcagctaaaccagcggcttcaataacaagtaagcctgctacacttacaacaactagtgcaaccagtaagttgatccatccagatgaggatatatccctggtaagttgcttttagttttctacgagcagcatttgatttaaagccattatagcagttcgtccctttaaaataagtgttcatttgtactcagatggtctgtgatctggtttaatgctcactaagtggtttttgccattctgattcttaagaaatcataaaatacttaaagtggacagatattgcatgttttggtcttagatggtttctctccccttcctccagactgtttctaaaagaagacagtaagtcaggttcttaactctcttaaaaatcattttagttaaacataagtttgcatatgttaattgaataaacgttaagtgtgaagtagaatctgcagatcccttaagtcccatataaatgaatgaattttgatacaaagttaatgtttagaatgttgataatggccaggtgtggtggctcacgcctataattccagcactttgggaggccaagacaggcagatcacttgatcaggagttcaagaccagcctggccaacatggtgaaacctcatccatacaaaaattagcagtgtgtagtggcgggcacctgtaatcccagctactcgggaggctgaggcgggatcatcagttgaacttgggaggcggaggttgcgttgagccaagattgcaccactgcactccagcctgggcaacagagcaagactccatctcaaaaaaaaa

SEQ ID NO: 349138 - DNA, 1833 bp, Homo sapiens
  misc_feature (109)..(109): n is a, c, g, or t
tgtggctgaaatgaagttgaggctgcagagtcgtcatcatcatattcatcagaatcatcttgttgcttctttttttgactttcttgtgtcttctgttcaagaaggcgtncgctttcatccatgtctttttcaggcatacctccattaatgccaggtgttcctcctctgatgccaggaatgccaccagttatgccaggcatgccacctggattgcatcatcagagaaaatacacccagtcattttgcggtgaaaacataatgatgccaatgggtggaatgatgccacctggaccaggaataccacctctgatgcctggaatgccaccaggtatgcccccacctgttccacgtcctggaattcctccaatgactcaagcacaggctgtttcagcgccaggtattcttaatagaccacctgcaccaacagcaactgtacctgccccacagcctccagttactaagcctcttttccccagtgctggacagatggggacacctgtcacaagctcaagtacagcttcatccaattcagaaagtctgtctgcatcttctaaagctctgtttcctagcacagcacaagctcaggcagctgtccaaggacctgttggtacagatttcaaacccttaaatagtacccctgcaacaactacagaacccccaaagcctacattccctgcttatacacagtctacagcttcaacaactagtacaacaaatagtactgcagctaaaccagcggcttcaataacaagtaagcctgctacacttacaacaactagtgcaaccagtaagttgatccatccagatgaggatatatccctggaagagagaagggcacagttacctaagtatcaacgtaatcttcctcggccaggacaggcccccatcggtaatccaccagttggaccaattggaggtatgatgccaccacagccaggcatcccacagcaacaaggaatgagacccccaatgccacctcatggtcagtatggtggtcatcatcaaggcatgccaggataccttcctggtgctatgcccccgtatgggcagggaccgccaatggtgcccccttaccagggtgggcctcctcgacctccgatgggaatgagacctcctgtaatgtcgcaaggtggccgttactgatcttacttcatccagtctaataggtttggagattaaaccttttctcaacttgtgctgtttatatagccaagcttccgtcaataaggcttcattgtgactttaacaaacattatcttcccacataccaggaactattggacatttattttacatgggaaaaattatttggaataataaagcaggaacttttcctgaagttgcaatttatactgtatggcttctttttcatgtttcatctaggtttttagaagtgaagtatagtaaatttggttcgttaaattgtgaaggcgctggaattacatgaacataccaccctagtaaaggcaagttctgtaagcttacattgctatttgtaaagtttgccttcacagcatttcagatgctgttggacttcatgtccccaacctagcttggtgagggctgtaactgtttccaagtacttgtacattggaagtctgaatgtgtaacaatatttaatgtatttagagttcctcatgttgcagggtttaagaaatctgacccaccaaggtcatgtgacttttctgtactgttaaacttcattgtaataaaatgagagaaaaatttatgcctttttattcataacccagctgtggaccactgcctgaaaggtttgtacagatgcatgccacagtagatgtccacataataaaattcatagttaccaatgca

SEQ ID NO: 349139 - DNA, 2279 bp, Homo sapiens
ttgtatcgaagtatccgcattctcttccctctaactctttaatatttgttattattttgattgaaattcttgcttgtaggcatacctccattaatgccaggtgttcctcctctgatgccaggaatgccaccagttatgccaggcatgccacctgggtaagaaaattcttttaattgccctgtaggcttgtgcctagtaatgatctttttcaatttggatgttatatgaatgaaatgttactttccattttttgcttctagaaggtatgggctctatatatcttgtctaataaagggatcaaccagtaaatttaaggaatataaatttgcctctgagtaatagatttttgggttttagggtatatgtaagcaaccatctacttcaattgcatttactgtgattaaagtagttggttatttatagatttgcgtttctgagattcagaattatctgtgacactttgtagttgtgacaagaagcagagaaactctgtaaatgatttatttgtcaaagcatcaaaactaaaatgaatatgaggtgcttgtgcccatcacttttacttaaatattgttggatgtgagaggtatacaatacactttcccactgtattttgaaaatcacagttagattttgattttgtcatacattttcacagattgcatcatcagagaaaatacacccagtcattttgcggtgaaaacataatgatgccaatgggtggaatgatgccacctggaccaggaataccacctctgatgcctggaatgccaccaggtatgcccccacctgttccacgtcctggaattcctccaatgactcaagcacaggctgtttcagcgccaggtattcttaatagaccacctgcaccaacagcaactgtacctgccccacagcctccagttactaagcctcttttccccagtgctggacagatggggacacctgtcacaagctcaagtacagcttcatccaattcagaaagtctgtctgcatcttctaaagctctgtttcctagcacagcacaagctcaggcagctgtccaaggacctgttggtacagatttcaaacccttaaatagtacccctgcaacaactacagaacccccaaagcctacattccctgcttatacacagtctacagcttcaacaactagtacaacaaatagtactgcagctaaaccagcggcttcaataacaagtaagcctgctacacttacaacaactagtgcaaccagtaagttgatccatccagatgaggatatatccctggaagagagaagggcacagttacctaagtatcaacgtaatcttcctcggccaggacaggcccccatcggtaatccaccagttggaccaattggaggtatgatgccaccacagccaggcatcccacagcaacaaggaatgagacccccaatgccacctcatggtcagtatggtggtcatcatcaaggcatgccaggataccttcctggtgctatgcccccgtatgggcagggaccgccaatggtgcccccttaccagggtgggcctcctcgacctccgatgggaatgagacctcctgtaatgtcgcaaggtggccgttactgatcttacttcatccagtctaataggtttggagattaaaccttttctcaacttgtgctgtttatatagccaagcttccgtcaataaggcttcattgtgactttaacaaacattatcttcccacataccaggaactattggacatttattttacatgggaaaaattatttggaataataaagcaggaacttttcctgaagttgcaatttatactgtatggcttctttttcatgtttcatctaggtttttagaagtgaagtatagtaaatttggttcgttaaattgtgaaggcgctggaattacatgaacataccaccctagtaaaggcaagttctgtaagcttacattgctatttgtaaagtttgccttcacagcatttcagatgctgttggacttcatgtccccaacctagcttggtgagggctgtaactgtttccaagtacttgtacattggaagtctgaatgtgtaacaatatttaatgtatttagagttcctcatgttgcagggtttaagaaatctgacccaccaaggtcatgtgacttttctgtactgttaaacttcattgtaataaaatgagagaaaaatttatgcctttttattcataacccagctgtggaccactgcctgaaaggtttgtacagatgcatgccacagtagatgtccacataataaaattcatagttaccaatgca

SEQ ID NO: 349140 - DNA, 1573 bp, Homo sapiens
agtgcttgacgggaggcggagcggggaacgaggccgtcggccattttgtgtctgcttcctgtgggacgtggtggtagccgttgggttgggaaagtgagggatttttggcctcgtttctcctgcttcttttctcctcccttttactttgccggtagaacacagttatgggtcgcaagaagaagaagcagctgaagccgtggtgctggtattgtaatagagattttgatgatgagaagatccttattcagcaccaaaaagcaaagcattttaaatgccatatatgtcacaagaaattgtatacaggacctggcttagctattcattgcatgcaggtacataaagaaacaatagatgccgtaccaaatgcaatacctggaagaacagacatagagttggaaatatatggtatggaaggtattccagaaaaagacatggatgaaagacgacgacttcttgaacagaaaacacaagaaagtcaaaaaaagaagcaacaagatgattctgatgaatatgatgatgacgactctgcagcctcaacttcatttcagccacagcctgttcaacctcagcaaggttatattcctccaatggcacagccaggactgccaccagtaccaggagcaccaggaatgcctccaggcatacctccattaatgccaggtgttcctcctctgatgccaggaatgccaccagttatgccaggcatgccacctggattgcatcatcagagaaaatacacccagtcattttgcggtgaaaacataatgatgccaatgggtggaatgatgccacctggaccaggaataccacctctgatgcctggaatgccaccaggtatgcccccacctgttccacgtcctggaattcctccaatgactcaagcacaggctgtttcagcgccaggtattcttaatagaccacctgcaccaacagcaactgtacctgccccacagcctccagttactaagcctcttttccccagtgctggacaggtaaggtgaaaatcctgaaaaggagtgcacttatatttaaagataaagtacagttgtttacagaagtctttgaaattttcataggtcaatttttttgtttataatatttttaatattatttattaaatatactaaaaggtggcttatccacttccatgtttacacactgatttcctctacccataaaaggttgaacggagccaaagttagtatgttactttttcatagctgtgaaccctatttattcttagtttttttttttttttttttaagctaatgaaagtttagtatctggagcgtttagaagttttcctttactgactaaactgaatggaaggacaccaaagtcaaagattagcattcttaagacggtagcaaatcatttgtcaggctctgcctctagtacggaacagtgatgagctacaatgccgcacttgtgcttcttttttcaaagcttttaaaagtcttttttccagagcataagtgaaagatgcttctgttctatatggtatacacatgatggttaacacctttgctttttttcctagtttcattgagaagcagattcagatttaatttat

SEQ ID NO: 349141 - DNA, 1484 bp, Homo sapiens
atataaggcctgtcgcaacaatcagtcttcaaattttggacccatgaagggaggaaattttggaggcagcaggtatgcccccacctgttccacgtcctggaattcctccaatgactcaagcacaggctgtttcagcgccaggtattcttaatagaccacctgcaccaacagcaactgtacctgccccacagcctccagttactaagcctcttttccccagtgctggacaggctcaggcagctgtccaaggacctgttggtacagatttcaaacccttaaatagtacccctgcaacaactacagaacccccaaagcctacattccctgcttatacacagtctacagcttcaacaactagtacaacaaatagtactgcagctaaaccagcggcttcaataacaagtaagcctgctacacttacaacaactagtgcaaccagtaagttgatccatccagatgaggatatatccctggaagagagaagggcacagttacctaagtatcaacgtaatcttcctcggccaggacaggcccccatcggtaatccaccagttggaccaattggaggtatgatgccaccacagccaggcatcccacagcaacaaggaatgagacccccaatgccacctcatggtcagtatggtggtcatcatcaaggcatgccaggataccttcctggtgctatgcccccgtatgggcagggaccgccaatggtgcccccttaccagggtgggcctcctcgacctccgatgggaatgagacctcctgtaatgtcgcaaggtggccgttactgatcttacttcatccagtctaataggtttggagattaaaccttttctcaacttgtgctgtttatatagccaagcttccgtcaataaggcttcattgtgactttaacaaacattatcttcccacataccaggaactattggacatttattttacatgggaaaaattatttggaataataaagcaggaacttttcctgaagttgcaatttatactgtatggcttctttttcatgtttcatctaggtttttagaagtgaagtatagtaaatttggttcgttaaattgtgaaggcgctggaattacatgaacataccaccctagtaaaggcaagttctgtaagcttacattgctatttgtaaagtttgccttcacagcatttcagatgctgttggacttcatgtccccaacctagcttggtgagggctgtaactgtttccaagtacttgtacattggaagtctgaatgtgtaacaatatttaatgtatttagagttcctcatgttgcagggtttaagaaatctgacccaccaaggtcatgtgacttttctgtactgttaaacttcattgtaataaaatgagagaaaaatttatgcctttttattcataacccagctgtggaccactgcctgaaaggtttgtacagatgcatgccacagtagatgtccacataataaaattcatagttaccaatgca

SEQ ID NO: 349142 - DNA, 1558 bp, Homo sapiens
ttttattgatttagaattaaaattttgaggctcatactttaattttgtttattgtaaatgcattaactgcctgccttttaaaataagtgacatttgattgcattaaattttgcatttacaaatatgcaatctactaaaaagtctaccacatggcttattttgacccatttgtttggagacttttcattgtttcctttcttttatgctacagatggggacacctgtcacaagctcaagtacagcttcatccaattcagaaagtctgtctgcatcttctaaagctctgtttcctagcacagcacaagctcaggcagctgtccaaggacctgttggtacagatttcaaacccttaaatagtacccctgcaacaactacagaacccccaaagcctacattccctgcttatacacagtctacagcttcaacaactagtacaacaaatagtactgcagctaaaccagcggcttcaataacaagtaagcctgctacacttacaacaactagtgcaaccagtaagttgatccatccagatgaggatatatccctggaagagagaagggcacagttacctaagtatcaacgtaatcttcctcggccaggacaggcccccatcggtaatccaccagttggaccaattggaggtatgatgccaccacagccaggcatcccacagcaacaaggaatgagacccccaatgccacctcatggtcagtatggtggtcatcatcaaggcatgccaggataccttcctggtgctatgcccccgtatgggcagggaccgccaatggtgcccccttaccagggtgggcctcctcgacctccgatgggaatgagacctcctgtaatgtcgcaaggtggccgttactgatcttacttcatccagtctaataggtttggagattaaaccttttctcaacttgtgctgtttatatagccaagcttccgtcaataaggcttcattgtgactttaacaaacattatcttcccacataccaggaactattggacatttattttacatgggaaaaattatttggaataataaagcaggaacttttcctgaagttgcaatttatactgtatggcttctttttcatgtttcatctaggtttttagaagtgaagtatagtaaatttggttcgttaaattgtgaaggcgctggaattacatgaacataccaccctagtaaaggcaagttctgtaagcttacattgctatttgtaaagtttgccttcacagcatttcagatgctgttggacttcatgtccccaacctagcttggtgagggctgtaactgtttccaagtacttgtacattggaagtctgaatgtgtaacaatatttaatgtatttagagttcctcatgttgcagggtttaagaaatctgacccaccaaggtcatgtgacttttctgtactgttaaacttcattgtaataaaatgagagaaaaatttatgcctttttattcataacccagctgtggaccactgcctgaaaggtttgtacagatgcatgccacagtagatgtccacataataaaattcatagttaccaatgca

SEQ ID NO: 349143 - DNA, 1380 bp, Homo sapiens
cccgggaggcggaggttgtggtgagctgagaccaggccattgcactccagcctggacaatgagtgaaaccccgtctcaaaaaaaaaaagaatgttaataacaatacttcattagatagtttcttgttgaagcaatttgtaattcccggaaagttgttagccatgcttcaagtttacaaataggtgaagttttaaggtatctagagtttaagtagttggattggtttgtctggcaaaagtaaatagttgggatgtaagggtaaatttttgaaaattactcttaacgttgtaagattttagatgcatgcctttatgcttggtgagcctctgcattcgagtatttagcccttgcgcttatttttattcccaggaagagagaagggcacagttacctaagtatcaacgtaatcttcctcggccaggacaggcccccatcggtaatccaccagttggaccaattggaggtatgatgccaccacagccaggcatcccacagcaacaaggaatgagacccccaatgccacctcatggtcagtatggtggtcatcatcaaggcatgccaggataccttcctggtgctatgcccccgtatgggcagggaccgccaatggtgcccccttaccagggtgggcctcctcgacctccgatgggaatgagacctcctgtaatgtcgcaaggtggccgttactgatcttacttcatccagtctaataggtttggagattaaaccttttctcaacttgtgctgtttatatagccaagcttccgtcaataaggcttcattgtgactttaacaaacattatcttcccacataccaggaactattggacatttattttacatgggaaaaattatttggaataataaagcaggaacttttcctgaagttgcaatttatactgtatggcttctttttcatgtttcatctaggtttttagaagtgaagtatagtaaatttggttcgttaaattgtgaaggcgctggaattacatgaacataccaccctagtaaaggcaagttctgtaagcttacattgctatttgtaaagtttgccttcacagcatttcagatgctgttggacttcatgtccccaacctagcttggtgagggctgtaactgtttccaagtacttgtacattggaagtctgaatgtgtaacaatatttaatgtatttagagttcctcatgttgcagggtttaagaaatctgacccaccaaggtcatgtgacttttctgtactgttaaacttcattgtaataaaatgagagaaaaatttatgcctttttattcataacccagctgtggaccactgcctgaaaggtttgtacagatgcatgccacagtagatgtccacataataaaattcatagttaccaatgca

SEQ ID NO: 349144 - DNA, 1141 bp, Homo sapiens
atcattctctgaagagcatattttattaatcttcaagttcctcagcatattaataataaaaaccttgatatatattatcaacaagtctgactgttatgcccaaagaaaatccagattattttaagtgagtttgttctttttcatctgattcatcatccataacctgttctacgccttctactccggaatataaaactgcagcatgttctgaattccattggaggtatgatgccaccacagccaggcatcccacagcaacaaggaatgagacccccaatgccacctcatggtcagtatggtggtcatcatcaaggcatgccaggataccttcctggtgcttatgcccccgtatgggcagggaccgccaatggtgcccccttaccagggtgggcctcctcgacctccgatgggaatgagacctcctgtaatgtcgcaaggtggccgttactgatcttacttcatccagtctaataggtttggagattaaaccttttctcaacttgtgctgtttatatagccaagcttccgtcaataaggcttcattgtgactttaacaaacattatcttcccacataccaggaactattggacatttattttacatgggaaaaattatttggaataataaagcaggaacttttcctgaagttgcaatttatactgtatggcttctttttcatgtttcatctaggtttttagaagtgaagtatagtaaatttggttcgttaaattgtgaaggcgctggaattacatgaacataccaccctagtaaaggcaagttctgtaagcttacattgctatttgtaaagtttgccttcacagcatttcagatgctgttggacttcatgtccccaacctagcttggtgagggctgtaactgtttccaagtacttgtacattggaagtctgaatgtgtaacaatatttaatgtatttagagttcctcatgttgcagggtttaagaaatctgacccaccaaggtcatgtgacttttctgtactgttaaacttcattgtaataaaatgagagaaaaatttatgcctttttattcataacccagctgtggaccactgcctgaaaggtttgtacagatgcatgccacagtagatgtccacataataaaattcatagttaccaatgca

SEQ ID NO: 349145 - DNA, 1051 bp, Homo sapiens
agtgcttgacgggaggcggagcggggaacgaggccgtcggccattttgtgtctgcttcctgtgggacgtggtggtagccgttgggttgggaaagtgagggatttttggcctcgtttctcctgcttcttttctcctcccttttactttgccggtagaacacagttatgggtcgcaagaagaagaagcagctgaagccgtggtgctggtattgtaatagagattttgatgatgagaagatccttattcagcaccaaaaagcaaagcattttaaatgccatatatgtcacaagaaattgtatacaggacctggcttagctattcattgcatgcaggtacataaagaaacaatagatgccgtaccaaatgcaatacctggaagaacagacatagagttggaaatatatggtatggaaggtattccagaaaaagacatggatgaaagacgacgacttcttgaacagaaaacacaagaaagtcaaaaaaagaagcaacaagatgattctgatgaatatgatgatgacgactctgcagcctcaacttcatttcagccacagcctgttcaacctcagcaaggttatattcctccaatggcacagccaggactgccaccagtaccaggagcaccaggaatgcctccaggcatacctccattaatgccaggtgttcctcctctgatgccaggaatgccaccagttatgccaggcatgccacctggaatgatgccaatgggtggaatgatgccacctggaccaggaataccacctctgatgcctggaatgccaccaggtatgcccccacctgttccacgtcctggaattcctccaatgactcaagcacaggggtcagcggcggatcttatagacactgacacagaagtgtcgtgccaagctcagtatagcctttccaggggaagtcaggaggccgccggggcataacctaaagactgggaatgaacccaagaaccggacgacgcaaataaaaggggaacggaaaagaggcacaaggggcgcaaaaggaagaaaccgagacgggacaagaggtgaggcgcggt

SEQ ID NO: 349146 - DNA, 628 bp, Homo sapiens
accaacttaagtcgggcccgctagtaagcctctacctgcacgacaacacatcatgacacataccaggaactattggacatttattttacatgggaaaaattatttggaataataaagcaggaacttttcctgaagttgcaatttatactgtatggcttctttttcatgtttcatctaggtttttagaagtgaagtatagtaaatttggttcgttaaattgtgaaggcgctggaattacatgaacataccaccctagtaaaggcaagttctgtaagcttacattgctatttgtaaagtttgccttcacagcatttcagatgctgttggacttcatgtccccaacctagcttggtgagggctgtaactgtttccaagtacttgtacattggaagtctgaatgtgtaacaatatttaatgtatttagagttcctcatgttgcagggtttaagaaatctgacccaccaaggtcatgtgacttttctgtactgttaaacttcattgtaataaaatgagagaaaaatttatgcctttttattcataacccagctgtggaccactgcctgaaaggtttgtacagatgcatgccacagtagatgtccacataataaaattcatagttaccaatgca

SEQ ID NO: 349147 - DNA, 3918 bp, Homo sapiens
ggaatttcatgtatacggttattgacaaactgcaatagggttagtagacctgtttcagaaattatgtgaagctttatttgcattttatgcaaagaaggttgatactttgtagcaaggttttttgctctctgtataggtctgatgggcaaaaatggaacttttaaatatgggatagaattctaattaaaaattaattgaaagtgttaggcattggcagataaaacttaagctcatgagttcctgagtttgtagctataggctcagaggtggtgtacccatttaatatatttgaagtgtaatttttgcatgcatccaaacgtaattaagcttctagaaaataccttttttctaaatgcttctggggtccatagtgtggttgaattatgagtggagcaaattatattcatataattaactctgactcaaccttccttaagtagtagatgaagttgagtcaaagtggatgccaactgccctcacagaagacaacttttgggacttgataattcaggcaggcattgtgattgtcataattaaggaagctgtaaggttagtagggctggcaactttggctctaccttacatccaccccttttagaaaaacaagaaaacattttgtctggcactagtttctgttgtataagttttcatactgtttaacaagaccacagcaggtaaggattaatttttgagtggctgctggaattacttgatttgaatacttagtattttagtagtgtctcacacatttgccattaggtatgaataaaatattcctactgtactcctattccactaagttacattttgaacttagactcaccttaattaaacttaattaattggggagggggattccccaacaaaaagaagtacgggctcagagtggaattgtagtggacaatagttaaaaacaaagctgctccttttgcttgcttgatcattgggatttttaaaaaaaaaaattttaatgcatgtcttttaaattaattgggaactgtttttctaaaattaaaattttcttcttcctatagccctgccataggacaggctgaggctgagtctcagtgttgccctgttcagtctgagcagcagaatttcagcatttgctacttactggtagagaagaaaaatcccacagccctgccagtacagtttaatctgtatatgaaatggtgtagatacagtggaaatggttttccttaaaaccatctctttaaagctgcctttctggtgagtactgttttatacttttatatattataattttatcttctaaaattaactgaaataggacactttgattaaagaggtgagcactctgaatttctacatctttggatattacttgaatcaagaatattagaaaattattttaccacctggcatttcccttttaatttgctagttcacttttttctgaccttcacttaacagactataaatacaaaaactttgaacacataaattatttcattttggtgagatggaataaatgtttaaaattagtatttaagaaagttcttaaacattttttttagttggcagccaaaagatttttcttagtgctttggagacattgcataggtgtaaaattaagataccagaacttcattctgttcttgttgaagctgttgttgtggtgattcatgagcagtaagctggagttagagtggaagaagggtttaccaaaattcttcctgcagactagttgcttacagggtttctttgagaggcttaaaaatttcaaaagtattatttaagccactctaaccctgcatgaaaaattggagttagaaatactgatttctgagaccacgtataccagtgaaaattagcttctgagtaaatttctaatttatgccctgctttatttagcctcgctatatgtaacacatggattattttttccctctagtttttaactatatcctagattaaaaccagcatatgctaagaatgtttttacattctgtttcctcctgtgatctttctgaaccaataataaacagtcaactgtgatgctttttagtatgaacaatgatagttttctaaaatctgaaaatcaatacctgagtatgtgatgtggcaatgcattcttctagataagcactaaacaaagtatggaccctcaatttatgtctttaagatttaaagtgaagtaaatttctaaggaactgtgtcctttcctagcaggaataaacagtgaaaatttggtaagtatttaacttgaagtgcatgtaatagtgatgagagtaagtagccaaatttccgtaatataaggtaatgtttaaaagtgagcaataattattgcatctcttttgcgacttcatgtagatgtgattaacattttttacaaatttgcctgcataaagattaaattggaacataccttactcctttgtctggtttttttattttgtatggtgctttaaatactaattttatatttcaagctttttgcagggtagaaataagtggctgttaaagaaaatatcttcaagaaggattatttcagtgtccctttttaaaactcgatgatggctttcagtttatttaagtcttctgtttttcagctccagttaaaactgacaataggcagctatcaaaaatggaaaaaatcttgtgctctttctggaatattagaggaatcagttaataatagtaaagtggtattaacccaatacttgatttgcagtttttaaagcagtttttaaattgagagaaaaggggctgggcccagctgaggcgggtggatctcctgaggtcaggagtttgagaccagcctggccaacatagtgaaaccccgtctctactaaaaatacaaaaatcagccgggtgtggtgggacgtgcctgtaaccccagctactctggaggctgaggcaggaaaatcgcttgaacccagggggaggaggttgcagtgagccgagatggcgccgttgcactccagcttgggtgacagagcgagactccgtctcaaaaaaaaaaagaaaaaaagaaaaagtgataagatttgggagtctattccctgggatgttctattaataataaagtgataataaatgaaggttaaagtcaagtgttcaattactacaccaggaaagattgattatttctgaggaaaaggtccatttatttccaaactagtctgtagtggtttagagtaagcattattttatgaagtggtacaagattgcaaaggttagtaaagggacctgtctgtcaggtcaatcttcggtcttcacttttactggcaagggattatgtgaagagtaagtcatacaagggatatgattgtaaggaggtcctgaacaaagcatgataaatgttagtccatgtgtattattaaatggtctaaagaaaaatcatgactgatcgcataatttttaatgtaagtaaatgagctcactaagggtaattaaatactagcttttaaaatttaaagttctcacgaatattagtgcatcttgtcactttgatttgtcacctggttaaatagctggaagcttgtgcaaatgaaaaatgaaatggaagactacatttgtatatatatctgtataatttttgtttactagtaggttcagagagagatctgagatgttccttaacatgtagccatgtaattagaactcacaaggggcattgaaatgtttttctttttcagatagtctggggctatttacttattttaagtaagccaagtctaccatttgaaaaatggtgctttatttccatatctgaagcctgaagttattttttagtttgttttcatctaaaagtggaaagatttttgcttctgcgttattaagagcctctttgtttggaggagatggttatctccttcactcattaacctttgagtgcttgttatctacaaagatgaataaaatctttcatttattatttaaaaaaaaaaa

SEQ ID NO: 349148 - DNA, 3382 bp, Homo sapiens
gtaaactataacgtatcccgttggtgtaccagtgagttcattttactgtaaactaagaataacatacctttttaatactgaaagttgactactcatcaagaaatgtagctagattctttatgtaacacttttgaggggcagtggggacataatgggttgtggaaaatgtgttttaacatttttattttttttttattctacccgagttcattgttgtttgaaccatcctctaaagatttcctttaacctctaaatgttgtgcttttaggttgataacaaatgtaaagcactgaggagggaggaataaagcatacaagttaatttctaattttcgcaagcctgaaccatcctaatctgatagtaggatgtatggcttcttccttttcaccttgtgtgatgtttaatttgagacgatctagccataaaactagtaatcttgaattcctcttgagctggatggtgattagccattgtgaaaacagattatatggaaattgtgcatattgctaaattttaaaacatggatttatcaactgataataaaatatatcttacaagataaccacttgttttttaatgtaaaattgcacaagggcttaagtttcattgcctttcacagtttaatctgtatatgaaatggtgtagatacagtggaaatggttttccttaaaaccatctctttaaagctgcctttctggtgagtactgttttatacttttatatattataattttatcttctaaaattaactgaaataggacactttgattaaagaggtgagcactctgaatttctacatctttggatattacttgaatcaagaatattagaaaattattttaccacctggcatttcccttttaatttgctagttcacttttttctgaccttcacttaacagactataaatacaaaaactttgaacacataaattatttcattttggtgagatggaataaatgtttaaaattagtatttaagaaagttcttaaacattttttttagttggcagccaaaagatttttcttagtgctttggagacattgcataggtgtaaaattaagataccagaacttcattctgttcttgttgaagctgttgttgtggtgattcatgagcagtaagctggagttagagtggaagaagggtttaccaaaattcttcctgcagactagttgcttacagggtttctttgagaggcttaaaaatttcaaaagtattatttaagccactctaaccctgcatgaaaaattggagttagaaatactgatttctgagaccacgtataccagtgaaaattagcttctgagtaaatttctaatttatgccctgctttatttagcctcgctatatgtaacacatggattattttttccctctagtttttaactatatcctagattaaaaccagcatatgctaagaatgtttttacattctgtttcctcctgtgatctttctgaaccaataataaacagtcaactgtgatgctttttagtatgaacaatgatagttttctaaaatctgaaaatcaatacctgagtatgtgatgtggcaatgcattcttctagataagcactaaacaaagtatggaccctcaatttatgtctttaagatttaaagtgaagtaaatttctaaggaactgtgtcctttcctagcaggaataaacagtgaaaatttggtaagtatttaacttgaagtgcatgtaatagtgatgagagtaagtagccaaatttccgtaatataaggtaatgtttaaaagtgagcaataattattgcatctcttttgcgacttcatgtagatgtgattaacattttttacaaatttgcctgcataaagattaaattggaacataccttactcctttgtctggtttttttattttgtatggtgctttaaatactaattttatatttcaagctttttgcagggtagaaataagtggctgttaaagaaaatatcttcaagaaggattatttcagtgtccctttttaaaactcgatgatggctttcagtttatttaagtcttctgtttttcagctccagttaaaactgacaataggcagctatcaaaaatggaaaaaatcttgtgctctttctggaatattagaggaatcagttaataatagtaaagtggtattaacccaatacttgatttgcagtttttaaagcagtttttaaattgagagaaaaggggctgggcccagctgaggcgggtggatctcctgaggtcaggagtttgagaccagcctggccaacatagtgaaaccccgtctctactaaaaatacaaaaatcagccgggtgtggtgggacgtgcctgtaaccccagctactctggaggctgaggcaggaaaatcgcttgaacccagggggaggaggttgcagtgagccgagatggcgccgttgcactccagcttgggtgacagagcgagactccgtctcaaaaaaaaaaagaaaaaaagaaaaagtgataagatttgggagtctattccctgggatgttctattaataataaagtgataataaatgaaggttaaagtcaagtgttcaattactacaccaggaaagattgattatttctgaggaaaaggtccatttatttccaaactagtctgtagtggtttagagtaagcattattttatgaagtggtacaagattgcaaaggttagtaaagggacctgtctgtcaggtcaatcttcggtcttcacttttactggcaagggattatgtgaagagtaagtcatacaagggatatgattgtaaggaggtcctgaacaaagcatgataaatgttagtccatgtgtattattaaatggtctaaagaaaaatcatgactgatcgcataatttttaatgtaagtaaatgagctcactaagggtaattaaatactagcttttaaaatttaaagttctcacgaatattagtgcatcttgtcactttgatttgtcacctggttaaatagctggaagcttgtgcaaatgaaaaatgaaatggaagactacatttgtatatatatctgtataatttttgtttactagtaggttcagagagagatctgagatgttccttaacatgtagccatgtaattagaactcacaaggggcattgaaatgtttttctttttcagatagtctggggctatttacttattttaagtaagccaagtctaccatttgaaaaatggtgctttatttccatatctgaagcctgaagttattttttagtttgttttcatctaaaagtggaaagatttttgcttctgcgttattaagagcctctttgtttggaggagatggttatctccttcactcattaacctttgagtgcttgttatctacaaagatgaataaaatctttcatttattatttaaaaaaaaaaa

SEQ ID NO: 349149 - DNA, 3396 bp, Homo sapiens
  misc_feature (36)..(36): n is a, c, g, or t
  misc_feature (151)..(151): n is a, c, g, or t
  misc_feature (165)..(165): n is a, c, g, or t
  misc_feature (180)..(180): n is a, c, g, or t
ctgtgcaaactctctggattttgcatcaagagcatncatgtaacttctgtagtcctgtaacagtacttcatgaacttctattgcagcagcaatgtgcattgctgtgggaaaagtcgtctttttctccaaaaaatttttgtttcccctttcntttcagaaaggggnccttttaaaagggcntttgggttttccccttcccccaaaacccacaacccaaattcttctggcccccattaggtatgaataaaatattcctactgtactcctattccactaagttacattttgaacttagactcaccttaattaaacttaattaattggggagggggattccccaacaaaaagaagtacgggctcagagtggaattgtagtggacaatagttaaaaacaaagctgctccttttgcttgcttgatcattgggatttttaaaaaaaaaaattttaatgcatgtcttttaaattaattgggaactgtttttctaaaattaaaattttcttcttcctatagccctgccataggacaggctgaggctgagtctcagtgttgccctgttcagtctgagcagcagaatttcagcatttgctacttactggtagagaagaaaaatcccacagccctgccagtacagtttaatctgtatatgaaatggtgtagatacagtggaaatggttttccttaaaaccatctctttaaagctgcctttctggtgagtactgttttatacttttatatattataattttatcttctaaaattaactgaaataggacactttgattaaagaggtgagcactctgaatttctacatctttggatattacttgaatcaagaatattagaaaattattttaccacctggcatttcccttttaatttgctagttcacttttttctgaccttcacttaacagactataaatacaaaaactttgaacacataaattatttcattttggtgagatggaataaatgtttaaaattagtatttaagaaagttcttaaacattttttttagttggcagccaaaagatttttcttagtgctttggagacattgcataggtgtaaaattaagataccagaacttcattctgttcttgttgaagctgttgttgtggtgattcatgagcagtaagctggagttagagtggaagaagggtttaccaaaattcttcctgcagactagttgcttacagggtttctttgagaggcttaaaaatttcaaaagtattatttaagccactctaaccctgcatgaaaaattggagttagaaatactgatttctgagaccacgtataccagtgaaaattagcttctgagtaaatttctaatttatgccctgctttatttagcctcgctatatgtaacacatggattattttttccctctagtttttaactatatcctagattaaaaccagcatatgctaagaatgtttttacattctgtttcctcctgtgatctttctgaaccaataataaacagtcaactgtgatgctttttagtatgaacaatgatagttttctaaaatctgaaaatcaatacctgagtatgtgatgtggcaatgcattcttctagataagcactaaacaaagtatggaccctcaatttatgtctttaagatttaaagtgaagtaaatttctaaggaactgtgtcctttcctagcaggaataaacagtgaaaatttggtaagtatttaacttgaagtgcatgtaatagtgatgagagtaagtagccaaatttccgtaatataaggtaatgtttaaaagtgagcaataattattgcatctcttttgcgacttcatgtagatgtgattaacattttttacaaatttgcctgcataaagattaaattggaacataccttactcctttgtctggtttttttattttgtatggtgctttaaatactaattttatatttcaagctttttgcagggtagaaataagtggctgttaaagaaaatatcttcaagaaggattatttcagtgtccctttttaaaactcgatgatggctttcagtttatttaagtcttctgtttttcagctccagttaaaactgacaataggcagctatcaaaaatggaaaaaatcttgtgctctttctggaatattagaggaatcagttaataatagtaaagtggtattaacccaatacttgatttgcagtttttaaagcagtttttaaattgagagaaaaggggctgggcccagctgaggcgggtggatctcctgaggtcaggagtttgagaccagcctggccaacatagtgaaaccccgtctctactaaaaatacaaaaatcagccgggtgtggtgggacgtgcctgtaaccccagctactctggaggctgaggcaggaaaatcgcttgaacccagggggaggaggttgcagtgagccgagatggcgccgttgcactccagcttgggtgacagagcgagactccgtctcaaaaaaaaaaagaaaaaaagaaaaagtgataagatttgggagtctattccctgggatgttctattaataataaagtgataataaatgaaggttaaagtcaagtgttcaattactacaccaggaaagattgattatttctgaggaaaaggtccatttatttccaaactagtctgtagtggtttagagtaagcattattttatgaagtggtacaagattgcaaaggttagtaaagggacctgtctgtcaggtcaatcttcggtcttcacttttactggcaagggattatgtgaagagtaagtcatacaagggatatgattgtaaggaggtcctgaacaaagcatgataaatgttagtccatgtgtattattaaatggtctaaagaaaaatcatgactgatcgcataatttttaatgtaagtaaatgagctcactaagggtaattaaatactagcttttaaaatttaaagttctcacgaatattagtgcatcttgtcactttgatttgtcacctggttaaatagctggaagcttgtgcaaatgaaaaatgaaatggaagactacatttgtatatatatctgtataatttttgtttactagtaggttcagagagagatctgagatgttccttaacatgtagccatgtaattagaactcacaaggggcattgaaatgtttttctttttcagatagtctggggctatttacttattttaagtaagccaagtctaccatttgaaaaatggtgctttatttccatatctgaagcctgaagttattttttagtttgttttcatctaaaagtggaaagatttttgcttctgcgttattaagagcctctttgtttggaggagatggttatctccttcactcattaacctttgagtgcttgttatctacaaagatgaataaaatctttcatttattatttaaaaaaaaaaa

SEQ ID NO: 349150 - DNA, 3440 bp, Homo sapiens
  misc_feature (357)..(357): n is a, c, g, or t
  misc_feature (361)..(362): n is a, c, g, or t
  misc_feature (364)..(365): n is a, c, g, or t
  misc_feature (367)..(368): n is a, c, g, or t
  misc_feature (371)..(371): n is a, c, g, or t
  misc_feature (374)..(376): n is a, c, g, or t
  misc_feature (379)..(379): n is a, c, g, or t
  misc_feature (381)..(381): n is a, c, g, or t
atcattctctgaagagcatattttattaatcttcaagttcctcagcatattaataataaaaaccttgatatatattatcaacaagtctgactgttatgcccaaagaaaatccagattattttaagtgagtttgttctttttcatctgattcatcatccataacctgttctacgccttctactccggaatataaaactgcagcatgttctgaattccattggaggtatgatgccaccacagccaggcatcccacagcaacaaggaatgagacccccaatgccacctcatggtcagtatggtggtcatcatcaaggcatgccaggataccttcctggtgctatgcccccgtatgggcangganngnnannggngcnnnctnancagggtgggcctcctcgacctccgatgggaatgagacctcctgtaatgtcgcaaggtggccgttactgatcttacttcatccagtctaataggtttttagaagtgaagtatagtaaatttggttcgttaaattgtgaaggcgctggaattacatgaacataccaccctagtaaagccctgccataggacaggctgaggctgagtctcagtgttgccctgttcagtctgagcagcagaatttcagcatttgctacttactggtagagaagaaaaatcccacagccctgccagtacagtttaatctgtatatgaaatggtgtagatacagtggaaatggttttccttaaaaccatctctttaaagctgcctttctggtgagtactgttttatacttttatatattataattttatcttctaaaattaactgaaataggacactttgattaaagaggtgagcactctgaatttctacatctttggatattacttgaatcaagaatattagaaaattattttaccacctggcatttcccttttaatttgctagttcacttttttctgaccttcacttaacagactataaatacaaaaactttgaacacataaattatttcattttggtgagatggaataaatgtttaaaattagtatttaagaaagttcttaaacattttttttagttggcagccaaaagatttttcttagtgctttggagacattgcataggtgtaaaattaagataccagaacttcattctgttcttgttgaagctgttgttgtggtgattcatgagcagtaagctggagttagagtggaagaagggtttaccaaaattcttcctgcagactagttgcttacagggtttctttgagaggcttaaaaatttcaaaagtattatttaagccactctaaccctgcatgaaaaattggagttagaaatactgatttctgagaccacgtataccagtgaaaattagcttctgagtaaatttctaatttatgccctgctttatttagcctcgctatatgtaacacatggattattttttccctctagtttttaactatatcctagattaaaaccagcatatgctaagaatgtttttacattctgtttcctcctgtgatctttctgaaccaataataaacagtcaactgtgatgctttttagtatgaacaatgatagttttctaaaatctgaaaatcaatacctgagtatgtgatgtggcaatgcattcttctagataagcactaaacaaagtatggaccctcaatttatgtctttaagatttaaagtgaagtaaatttctaaggaactgtgtcctttcctagcaggaataaacagtgaaaatttggtaagtatttaacttgaagtgcatgtaatagtgatgagagtaagtagccaaatttccgtaatataaggtaatgtttaaaagtgagcaataattattgcatctcttttgcgacttcatgtagatgtgattaacattttttacaaatttgcctgcataaagattaaattggaacataccttactcctttgtctggtttttttattttgtatggtgctttaaatactaattttatatttcaagctttttgcagggtagaaataagtggctgttaaagaaaatatcttcaagaaggattatttcagtgtccctttttaaaactcgatgatggctttcagtttatttaagtcttctgtttttcagctccagttaaaactgacaataggcagctatcaaaaatggaaaaaatcttgtgctctttctggaatattagaggaatcagttaataatagtaaagtggtattaacccaatacttgatttgcagtttttaaagcagtttttaaattgagagaaaaggggctgggcccagctgaggcgggtggatctcctgaggtcaggagtttgagaccagcctggccaacatagtgaaaccccgtctctactaaaaatacaaaaatcagccgggtgtggtgggacgtgcctgtaaccccagctactctggaggctgaggcaggaaaatcgcttgaacccagggggaggaggttgcagtgagccgagatggcgccgttgcactccagcttgggtgacagagcgagactccgtctcaaaaaaaaaaagaaaaaaagaaaaagtgataagatttgggagtctattccctgggatgttctattaataataaagtgataataaatgaaggttaaagtcaagtgttcaattactacaccaggaaagattgattatttctgaggaaaaggtccatttatttccaaactagtctgtagtggtttagagtaagcattattttatgaagtggtacaagattgcaaaggttagtaaagggacctgtctgtcaggtcaatcttcggtcttcacttttactggcaagggattatgtgaagagtaagtcatacaagggatatgattgtaaggaggtcctgaacaaagcatgataaatgttagtccatgtgtattattaaatggtctaaagaaaaatcatgactgatcgcataatttttaatgtaagtaaatgagctcactaagggtaattaaatactagcttttaaaatttaaagttctcacgaatattagtgcatcttgtcactttgatttgtcacctggttaaatagctggaagcttgtgcaaatgaaaaatgaaatggaagactacatttgtatatatatctgtataatttttgtttactagtaggttcagagagagatctgagatgttccttaacatgtagccatgtaattagaactcacaaggggcattgaaatgtttttctttttcagatagtctggggctatttacttattttaagtaagccaagtctaccatttgaaaaatggtgctttatttccatatctgaagcctgaagttattttttagtttgttttcatctaaaagtggaaagatttttgcttctgcgttattaagagcctctttgtttggaggagatggttatctccttcactcattaacctttgagtgcttgttatctacaaagatgaataaaatctttcatttattatttaaaaaaaaaaa

SEQ ID NO: 349151 - DNA, 1890 bp, Homo sapiens
  misc_feature (1536)..(1536): n is a, c, g, or t
  misc_feature (1538)..(1538): n is a, c, g, or t
  misc_feature (1540)..(1540): n is a, c, g, or t
  misc_feature (1544)..(1545): n is a, c, g, or t
  misc_feature (1547)..(1547): n is a, c, g, or t
  misc_feature (1550)..(1550): n is a, c, g, or t
  misc_feature (1553)..(1553): n is a, c, g, or t
  misc_feature (1558)..(1558): n is a, c, g, or t
  misc_feature (1741)..(1741): n is a, c, g, or t
ggaatttcatgtatacggttattgacaaactgcaatagggttagtagacctgtttcagaaattatgtgaagctttatttgcattttatgcaaagaaggttgatactttgtagcaaggttttttgctctctgtataggtctgatgggcaaaaatggaacttttaaatatgggatagaattctaattaaaaattaattgaaagtgttaggcattggcagataaaacttaagctcatgagttcctgagtttgtagctataggctcagaggtggtgtacccatttaatatatttgaagtgtaatttttgcatgcatccaaacgtaattaagcttctagaaaataccttttttctaaatgcttctggggtccatagtgtggttgaattatgagtggagcaaattatattcatataattaactctgactcaaccttccttaagtagtagatgaagttgagtcaaagtggatgccaactgccctcacagaagacaacttttgggacttgataattcaggcaggcattgtgattgtcataattaaggaagctgtaaggttagtagggctggcaactttggctctaccttacatccaccccttttagaaaaacaagaaaacattttgtctggcactagtttctgttgtataagttttcatactgtttaacaagaccacagcaggtaaggattaatttttgagtggctgctggaattacttgatttgaatacttagtattttagtagtgtctcacacatttgccattaggtatgaataaaatattcctactgtactcctattccactaagttacattttgaacttagactcaccttaattaaacttaattaattggggagggggattccccaacaaaaagaagtacgggctcagagtggaattgtagtggacaatagttaaaaacaaagctgctccttttgcttgcttgatcattgggatttttaaaaaaaaaaattttaatgcatgtcttttaaattaattgggaactgtttttctaaaattaaaattttcttcttcctatagccctgccataggacaggctgaggctgagtctcagtgttgccctgttcagtctgaggcaagtgggatttattttattccttataggggctttcacagctttatggctgttggatatttatgtccccaaacttgcagcaagtttggtgaaggcccctaaatttaattaaacttaggatttttatactcttttggcagagaaggctctatattaatattcacgtttgactgtggtgttaataaacataagtatttcatatgcaattttatgtaatttgctgtgtgttacataattaacagcttcagtaaagcttgtgttcctatattgaacttcaataaattgacaaaatttgatatttttgattggaggcaagaaatgtttcattcaagttttttactttcacttctaggaaaatcttactggttttattttctccataaactattaaatttaacctcaaggataagtttaatcattggaaatgccactgcactccagcctggncnangagnnanacnccntctcnaaaaaaaaaagaatgttaataacaatacttcattagatagtttcttgttgaagcaatttgtaattcccggaaagttgttagccatgcttcaagtttacaaataggtgaagttttaaggtatctagagtttaagtagttgattggtttgtctggcaaaagtaaatagttgggatgtaagggtanatttttgaaaattactcttaacgttgtaagattttagatgcatgcctttatgcttggtgagcctctgcattcgagtatttagccctgcgcttatttttattccctggaagagagaagggcacagtacctaactctctactcactgcttc

SEQ ID NO: 349152 - DNA, 633 bp, Homo sapiens
tttttttttgatgagaagctaagttttattattataattacaaattaattacagagaaactgaagccattcttcatacatgacaaacatacatttcctctgtgtgtacagcacacaagtaatatacacaaatatattccatgtctgaacaaatcctttttaaaactttaaaagctggctgggcacagtggctcacgcctgtaatcccggcactttgggaggccaaggcgggtggatcacaaggtgagaagatcgagaccatcctggccaacatggtgaaaccccgtctctactaaaaatacaaaaaattagccatgcatggtggcacatgcctgtagtcccagctactggggaggctgaggaaggagaatcacttgaacctgggaggcagaggttgcagtgagcccagattgcaccactgcactctagcctgggtgacagagtgagaccatgtctcaaaaaaaaaaaaaaaaaaaaccagacacatttcgatagaaacattactgcataaggtattaaaattatgtgttaacatttgatcaccaaaggaaatataagcattattgcattctatcttttagtattgttaaatttctttatttagtcgatgttgtattaaagttaaataaatgca

SEQ ID NO: 349153 - DNA, 843 bp, Homo sapiens
  misc_feature (386)..(389): n is a, c, g, or t
  misc_feature (723)..(723): n is a, c, g, or t
  misc_feature (821)..(821): n is a, c, g, or t
cagagtccaaacagtgctcagagtccaaacagtgcccagagtccaaacagtgcccagagtccaaacagggctcagagtccaaacagtgcccagagtccaaacagtgcccaaagtccaaacagtgctcagagtccaaacagtgcccagagtccaaacagtgcccagagtccaaacagtgccctccgatgggaatgagacctcctgtaatgtcgcaaggtggccgttactgatcttacttcatccagtctaataggtttggagattaaaccttttctcaacttgtgctgtttatatagccaagcttccgtcaataaggcttcattgtgactttaacaaacattatcttcccacataccaggaactattggacattattttacatgggnnnnttatttggaataataaagcaggaacttttcctgaagttgcaatttatactgtatggcttctttttcatgtttcatctaggtttttagaagtgaagtatagtaaatttggttcgttaaattgtgaaggcgctggaattacatgaacataccaccctagtaaaggcaagttctgtaagcttacattgctatttgtaaagtttgccttcacagcatttcagatgctgttggacttcatgtccccaacctagcttggtgagggctgtaactgtttccaagtacttgtacattggaagtctgaatgtgtaacaatatttaacggctttaaggcgccctnatgctgcccggcgttctgctatttcgccaccctgttcttgcccctttcctggtccccttgccttctttggctctttttggtgggcttccttccccccnctttctatcgcgcacactacaa

SEQ ID NO: 349154 - DNA, 1242 bp, Homo sapiens
  misc_feature (357)..(357): n is a, c, g, or t
  misc_feature (361)..(362): n is a, c, g, or t
  misc_feature (364)..(365): n is a, c, g, or t
  misc_feature (367)..(368): n is a, c, g, or t
  misc_feature (371)..(371): n is a, c, g, or t
  misc_feature (374)..(376): n is a, c, g, or t
  misc_feature (379)..(379): n is a, c, g, or t
  misc_feature (381)..(381): n is a, c, g, or t
atcattctctgaagagcatattttattaatcttcaagttcctcagcatattaataataaaaaccttgatatatattatcaacaagtctgactgttatgcccaaagaaaatccagattattttaagtgagtttgttctttttcatctgattcatcatccataacctgttctacgccttctactccggaatataaaactgcagcatgttctgaattccattggaggtatgatgccaccacagccaggcatcccacagcaacaaggaatgagacccccaatgccacctcatggtcagtatggtggtcatcatcaaggcatgccaggataccttcctggtgctatgcccccgtatgggcangganngnnannggngcnnnctnancagggtgggcctcctcgacctccgatgggaatgagacctcctgtaatgtcgcaaggtggccgttactgatcttacttcatccagtctaataggtttttagaagtgaagtatagtaaatttggttcgttaaattgtgaaggcgctggaattacatgaacataccaccctagtaaagccctgccataggacaggctgaggctgagtctcagtgttgccctgttcagtctgagcagcagaatttcagcatttgctacttactggtagagaagaaaaatcccacagccctgccagtacagtttaatctgtatatgaaatggtgtagatacagtggaaatggttttccttaaaaccatctctttaaagctgcctttctggttgctgctgtcaagcttgaatgaaaggtatctcatgggtgggcgcgtggctcatgcctgcaatcccagcacttcgggaggccaagacaggcagatcgcttgagctcaagagtttgagaccagcctggacaaaaccccatccctgtaaaaaatacaaaaattagctgggtgtggtggcgcacgcttatagtcccagctactcaggaggctgaagtgggaggatcgcttgagcctgggaggcaaaggcttgcagtgagcccagattgcaccactgcactctagcctgggtgacagagtgagaccatgtctcaaaaaaaaaaaaaaaaaaaaccagacacatttcgatagaaacattactgcataaggtattaaaattatgtgttaacatttgatcaccaaaggaaatataagcattattgcattctatcttttagtattgttaaatttctttatttagtcgatgttgtattaaagttaaataaatgca

SEQ ID NO: 349155 - DNA, 585 bp, Homo sapiens
tagtacacgcggatgaattcgactatcgacaattcacgcaacatcctgtaccaacactatgtattccagcaattctgagggtcaaatcaaccagaaagcctcaatcagagcgttccccaccgtacggcgtctcttaacccatgccttcaaacgaggaatgcctcggattggccgctttttttttttttttttttttttgatgagagtagttatatatatacatatacagagaagagcatcttcatacatgacaaacatacatttcctctgtgtgtacagcacacaagtaatatacacaaatatattccatgtctgaacaaatcctttttaaaactttaaaagctggctgggcacagtggctcacgcactcaggatttgcatattgacttaaaatctgactttatcatccatgccgttatcaactagacaaaaaaatgtatcaagcacccacaggatgcacagatctatctctgaactggtgtagtggtattaatctgttctaagactagaattacatttttttttttaagaagctacagtccactgaaaaggaagtattatggtttttctgagaagaaaagttgc

SEQ ID NO: 349156 - DNA, 215 bp, Homo sapiens
tcagtaaagcttgtgttcctatattgaacttcaataaattgacaaaatttgatatttttgattggaggcaagaaatgtttcattcaagttttttactttcacttctaggaaaatcttactggttttattttctccataaactattaaatttaacctcaaggataagtttaatcattggaaatgccactggatactgaaatgtgccttctcttttt

SEQ ID NO: 349157 - DNA, 2869 bp, Homo sapiens
  misc_feature (2279)..(2279): n is a, c, g, or t
agtgcttgacgggaggcggagcggggaacgaggccgtcggccattttgtgtctgcttcctgtgggacgtggtggtagccgttgggttgggaaagtgagggatttttggcctcgtttctcctgcttcttttctcctcccttttactttgccggtagaacacagttatgggtcgcaagaagaagaagcagctgaagccgtggtgctggtattgtaatagagattttgatgatgagaagatccttattcagcaccaaaaagcaaagcattttaaatgccatatatgtcacaagaaattgtatacaggacctggcttagctattcattgcatgcaggtacataaagaaacaatagatgccgtaccaaatgcaatacctggaagaacagacatagagttggaaatatatggtatggaaggtattccagaaaaagacatggatgaaagacgacgacttcttgaacagaaaacacaagaaagtcaaaaaaagaagcaacaagatgattctgatgaatatgatgatgacgactctgcagcctcaacttcatttcagccacagcctgttcaacctcagcaaggttatattcctccaatggcacagccaggactgccaccagtaccaggagcaccaggaatgcctccaggcatacctccattaatgccaggtgttcctcctctgatgccaggaatgccaccagttatgccaggcatgccacctggattgcatcatcagagaaaatacacccagtcattttgcggtgaaaacataatgatgccaatgggtggaatgatgccacctggaccaggaataccacctctgatgcctggaatgccaccaggtatgcccccacctgttccacgtcctggaattcctccaatgactcaagcacaggctgtttcagcgccaggtattcttaatagaccacctgcaccaacagcaactgtacctgccccacagcctccagttactaagcctcttttccccagtgctggacaggctcaggcagctgtccaaggacctgttggtacagatttcaaacccttaaatagtacccctgcaacaactacagaacccccaaagcctacattccctgcttatacacagtctacagcttcaacaactagtacaacaaatagtactgcagctaaaccagcggcttcaataacaagtaagcctgctacacttacaacaactagtgcaaccagtaagttgatccatccagatgaggatatatccctggaagagagaagggcacagttacctaagtatcaacgtaatcttcctcggccaggacaggcccccatcggtaatccaccagttggaccaattggaggtatgatgccaccacagccaggcatcccacagcaacaaggaatgagacccccaatgccacctcatggtcagtatggtggtcatcatcaaggcatgccaggataccttcctggtgctatgcccccgtatgggcagggaccgccaatggtgcccccttaccagggtgggcctcctcgacctccgatgggaatgagacctcctgtaatgtcgcaaggtggccgttactgatcttacttcatccagtctaataggtttggagattaaaccttttctcaacttgtgctgtttatatagccaagcttccgtcaataaggcttcattgtgactttaacaaacattatcttcccacataccaggaactattggacatttattttacatgggaaaaattatttggaataataaagcaggaacttttcctgaagttgcaatttatactgtatggcttctttttcatgtttcatctaggtttttagaagtgaagtatagtaaatttggttcgttaaattgtgaaggcgctggaattacatgaacataccaccctagtaaaggcaagttctgtaagcttacattgctatttgtaaagtttgccttcacagcatttcagatgctgttggacttcatgtccccaacctagcttggtgagggctgtaactgtttccaagtacttgtacattggaagtctgaatgtgtaacaatatttaatgtatttagagttcctcatgttgcagggtttaagaaatctgacccaccaaggtcatgtgacttttctgtactgttaaacttcattgtaataaaatgagagaaaaatttatgcctttttattcataacccagctgtggaccactgcctgaaaggtttgtacagatgcatgccacagtagatgtccacataataaaattcatagttaccaatgcaaaaaaaaaaaaaaaaaaaaaaaaaaaaaaaaanaaaaaaaaaaaaaaaaaagagagagagaggacgagcaaaaaaaaaaaaccaaaagaagaaaggagacacaaaaaaaagaagaaacacaaaatagaaaaaaaggggccccaaagaggggagaaaagaaagaggggcaccaaccaacatacaaacaccgagcagggaggacagggagaacacaacacccggctataacacgcggcaggacgcacatactgcgggagagaaagagaagaaccccaacagacaacaactgggggggaaggagcccaacaaccaataatgtgcacacacccacaccacaccacccacaagcgagatacataatctcgaaaccaccatacgaagagagagcaacacaacacacaagccatccgaacgacgaagacaacaaaaggagggataaaaacaaaacatcgaggaccaaaataatactggagcgacagggaagagatgaacaacaagaacgcgccgcacaacaaaggagagaacaaatagaatcaccagcaagacaaaaagttgaacacaccagaaggacacaacaccgtagagcagaaagaaaaaaaagacgaaagagacaaaacgaagga

SEQ ID NO: 349158 - DNA, 2379 bp, Homo sapiens
agtgcttgacgggaggcggagcggggaacgaggccgtcggccattttgtgtctgcttcctgtgggacgtggtggtagccgttgggttgggaaagtgagggatttttggcctcgtttctcctgcttcttttctcctcccttttactttgccggtagaacacagttatgggtcgcaagaagaagaagcagctgaagccgtggtgctggtattgtaatagagattttgatgatgagaagatccttattcagcaccaaaaagcaaagcattttaaatgccatatatgtcacaagaaattgtatacaggacctggcttagctattcattgcatgcaggtacataaagaaacaatagatgccgtaccaaatgcaatacctggaagaacagacatagagttggaaatatatggtatggaaggtattccagaaaaagacatggatgaaagacgacgacttcttgaacagaaaacacaagaaagtcaaaaaaagaagcaacaagatgattctgatgaatatgatgatgacgactctgcagcctcaacttcatttcagccacagcctgttcaacctcagcaaggttatattcctccaatggcacagccaggactgccaccagtaccaggagcaccaggaatgcctccaggcatacctccattaatgccaggtgttcctcctctgatgccaggaatgccaccagttatgccaggcatgccacctggattgcatcatcagagaaaatacacccagtcattttgcggtgaaaacataatgatgccaatgggtggaatgatgccacctggaccaggaataccacctctgatgcctggaatgccaccaggtatgcccccacctgttccacgtcctggaattcctccaatgactcaagcacaggctgtttcagcgccaggtattcttaatagaccacctgcaccaacagcaactgtacctgccccacagcctccagttactaagcctcttttccccagtgctggacaggctcaggcagctgtccaaggacctgttggtacagatttcaaacccttaaatagtacccctgcaacaactacagaacccccaaagcctacattccctgcttatacacagtctacagcttcaacaactagtacaacaaatagtactgcagctaaaccagcggcttcaataacaagtaagcctgctacacttacaacaactagtgcaaccagtaagttgatccatccagatgaggatatatccctggaagagagaagggcacagttacctaagtatcaacgtaatcttcctcggccaggacaggcccccatcggtaatccaccagttggaccaattggaggtatgatgccaccacagccaggcatcccacagcaacaaggaatgagacccccaatgccacctcatggtcagtatggtggtcatcatcaaggcatgccaggataccttcctggtgctatgcccccgtatgggcagggaccgccaatggtgcccccttaccagggtgggcctcctcgacctccgatgggaatgagacctcctgtaatgtcgcaaggtggccgttactgatcttacttcatccagtctaataggtttggagattaaaccttttctcaacttgtgctgtttatatagccaagcttccgtcaataaggcttcattgtgactttaacaaacattatcttcccacataccaggaactattggacatttattttacatgggaaaaattatttggaataataaagcaggaacttttcctgaagttgcaatttatactgtatggcttctttttcatgtttcatctaggtttttagaagtgaagtatagtaaatttggttcgttaaattgtgaaggcgctggaattacatgaacataccaccctagtaaaggcaagttctgtaagcttacattgctatttgtaaagtttgccttcacagcatttcagatgctgttggacttcatgtccccaacctagcttggtgagggctgtaactgtttccaagtacttgtacattggaagtctgaatgtgtaacaatatttaatgtatttagagttcctcatgttgcagggtttaagaaatctgacccaccaaggtcatgtgacttttctgtactgttaaacttcattgtaataaaatgagagaaaaatttatgcctttttattcataacccagctgtggaccactgcctgaaaggtttgtacagatgcatgccacagtagatgtccacataataaaattcatagttaccaatgcaaaaataacaagacaacgaaaaacacaaagagaccacaaggcgagaaaacaaacgcagagaacaggatagaaccaaaaagaggcccaacagcataaaaaaggaaaaacggggcgggggaaaaacgagaagcaga

SEQ ID NO: 349159 - DNA, 2855 bp, Homo sapiens
agtgcttgacgggaggcggagcggggaacgaggccgtcggccattttgtgtctgcttcctgtgggacgtggtggtagccgttgggttgggaaagtgagggatttttggcctcgtttctcctgcttcttttctcctcccttttactttgccggtagaacacagttatgggtcgcaagaagaagaagcagctgaagccgtggtgctggtattgtaatagagattttgatgatgagaagatccttattcagcaccaaaaagcaaagcattttaaatgccatatatgtcacaagaaattgtatacaggacctggcttagctattcattgcatgcaggtacataaagaaacaatagatgccgtaccaaatgcaatacctggaagaacagacatagagttggaaatatatggtatggaaggtattccagaaaaagacatggatgaaagacgacgacttcttgaacagaaaacacaagaaagtcaaaaaaagaagcaacaagatgattctgatgaatatgatgatgacgactctgcagcctcaacttcatttcagccacagcctgttcaacctcagcaaggttatattcctccaatggcacagccaggactgccaccagtaccaggagcaccaggaatgcctccaggcatacctccattaatgccaggtgttcctcctctgatgccaggaatgccaccagttatgccaggcatgccacctggattgcatcatcagagaaaatacacccagtcattttgcggtgaaaacataatgatgccaatgggtggaatgatgccacctggaccaggaataccacctctgatgcctggaatgccaccaggtatgcccccacctgttccacgtcctggaattcctccaatgactcaagcacaggctgtttcagcgccaggtattcttaatagaccacctgcaccaacagcaactgtacctgccccacagcctccagttactaagcctcttttccccagtgctggacaggctcaggcagctgtccaaggacctgttggtacagatttcaaacccttaaatagtacccctgcaacaactacagaacccccaaagcctacattccctgcttatacacagtctacagcttcaacaactagtacaacaaatagtactgcagctaaaccagcggcttcaataacaagtaagcctgctacacttacaacaactagtgcaaccagtaagttgatccatccagatgaggatatatccctggaagagagaagggcacagttacctaagtatcaacgtaatcttcctcggccaggacaggcccccatcggtaatccaccagttggaccaattggaggtatgatgccaccacagccaggcatcccacagcaacaaggaatgagacccccaatgccacctcatggtcagtatggtggtcatcatcaaggcatgccaggataccttcctggtgctatgcccccgtatgggcagggaccgccaatggtgcccccttaccagggtgggcctcctcgacctccgatgggaatgagacctcctgtaatgtcgcaaggtggccgttactgatcttacttcatccagtctaataggtttggagattaaaccttttctcaacttgtgctgtttatatagccaagcttccgtcaataaggcttcattgtgactttaacaaacattatcttcccacataccaggaactattggacatttattttacatgggaaaaattatttggaataataaagcaggaacttttcctgaagttgcaatttatactgtatggcttctttttcatgtttcatctaggtttttagaagtgaagtatagtaaatttggttcgttaaattgtgaaggcgctggaattacatgaacataccaccctagtaaaggcaagttctgtaagcttacattgctatttgtaaagtttgccttcacagcatttcagatgctgttggacttcatgtccccaacctagcttggtgagggctgtaactgtttccaagtacttgtacattggaagtctgaatgtgtaacaatatttaatgtatttagagttcctcatgttgcagggtttaagaaatctgacccaccaaggtcatgtgacttttctgtactgttaaacttcattgtaataaaatgagagaaaaatttatgcctttttattcataacccagctgtggaccactgcctgaaaggtttgtacagatgcatgccacagtagatgtccacataataaaattcatagttaccaatgcagttttgatatatcattggattctgtctttgagttgtaggttatttcttagctgcatgttttaaactgaatttgcatagagttgtatgttaatgtttcagttaagagaaaaacttaagatacatgagtcattacataatgggtatgaaatctttataatcacccttccaccctctatggtgtcagtacacatcacgtgtcatagatacttaaaatgtaaatgttaacacttttccttcctgctgagatgtttagagcctagtgccagacccattcatttccttttgattatttttgagactcagtaatagcttcttgtgctgttaatgggttattatatattattctaagtgtaatgctgagaatctaaatgtgtctctgttgggatggttaacagatgaattggcaatttttattatgttcctggaagattacattattcatttgagtaccttctgttattaagcctaggtagccttactgtgcaactttttatttatccttggaaattttgaatgttgtgttcttacagagagcttttctgtagagatgactgctattcaatattttgtgttgcaacctcttaaaataatagctcttgttgacctttt

SEQ ID NO: 349160 - DNA, 2700 bp, Homo sapiens
  misc_feature (386)..(389): n is a, c, g, or t
  misc_feature (458)..(458): n is a, c, g, or t
  misc_feature (461)..(461): n is a, c, g, or t
  misc_feature (463)..(463): n is a, c, g, or t
  misc_feature (467)..(467): n is a, c, g, or t
cagagtccaaacagtgctcagagtccaaacagtgcccagagtccaaacagtgcccagagtccaaacagggctcagagtccaaacagtgcccagagtccaaacagtgcccaaagtccaaacagtgctcagagtccaaacagtgcccagagtccaaacagtgcccagagtccaaacagtgccctccgatgggaatgagacctcctgtaatgtcgcaaggtggccgttactgatcttacttcatccagtctaataggtttggagattaaaccttttctcaacttgtgctgtttatatagccaagcttccgtcaataaggcttcattgtgactttaacaaacattatcttcccacataccaggaactattggacattattttacatgggnnnnttatttggaataataaagcaggaacttttcctgaagttgcaatttaaaaaaaaaaaaaaaaaaaaaaanaananaaanaaaaaaaaaaaggaacgaggccgtcggccattttgtgtctgcttcctgtgggacgtggtggtagccgttgggttgggaaagtgagggatttttggcctcgtttctcctgcttcttttctcctcccttttactttgccggtagaacacagttatgggtcgcaagaagaagaagcagctgaagccgtggtgctggtattgtaatagagattttgatgatgagaagatccttattcagcaccaaaaagcaaagcattttaaatgccatatatgtcacaagaaattgtatacaggacctggcttagctattcattgcatgcaggtacataaagaaacaatagatgccgtaccaaatgcaatacctggaagaacagacatagagttggaaatatatggtatggaaggtattccagaaaaagacatggatgaaagacgacgacttcttgaacagaaaacacaagaaagtcaaaaaaagaagcaacaagatgattctgatgaatatgatgatgacgactctgcagcctcaacttcatttcagccacagcctgttcaacctcagcaaggttatattcctccaatggcacagccaggactgccaccagtaccaggagcaccaggaatgcctccaggcatacctccattaatgccaggtgttcctcctctgatgccaggaatgccaccagttatgccaggcatgccacctggattgcatcatcagagaaaatacacccagtcattttgcggtgaaaacataatgatgccaatgggtggaatgatgccacctggaccaggaataccacctctgatgcctggaatgccaccaggtatgcccccacctgttccacgtcctggaattcctccaatgactcaagcacaggctgtttcagcgccaggtattcttaatagaccacctgcaccaacagcaactgtacctgccccacagcctccagttactaagcctcttttccccagtgctggacaggctcaggcagctgtccaaggacctgttggtacagatttcaaacccttaaatagtacccctgcaacaactacagaacccccaaagcctacattccctgcttatacacagtctacagcttcaacaactagtacaacaaatagtactgcagctaaaccagcggcttcaataacaagtaagcctgctacacttacaacaactagtgcaaccagtaagttgatccatccagatgaggatatatccctggaagagagaagggcacagttacctaagtatcaacgtaatcttcctcggccaggacaggcccccatcggtaatccaccagttggaccaattggaggtatgatgccaccacagccaggcatcccacagcaacaaggaatgagacccccaatgccacctcatggtcagtatggtggtcatcatcaaggcatgccaggataccttcctggtgctatgcccccgtatgggcagggaccgccaatggtgcccccttaccagggtgggcctcctcgacctccgatgggaatgagacctcctgtaatgtcgcaaggtggccgttactgatcttacttcatccagtctaataggtttggagattaaaccttttctcaacttgtgctgtttatatagccaagcttccgtcaataaggcttcattgtgactttaacaaacattatcttcccacataccaggaactattggacatttattttacatgggaaaaattatttggaataataaagcaggaacttttcctgaagttgcaatttatactgtatggcttctttttcatgtttcatctaggtttttagaagtgaagtatagtaaatttggttcgttaaattgtgaaggcgctggaattacatgaacataccaccctagtaaaggcaagttctgtaagcttacattgctatttgtaaagtttgccttcacagcatttcagatgctgttggacttcatgtccccaacctagcttggtgagggctgtaactgtttccaagtacttgtacattggaagtctgaatgtgtaacaatatttaatgtatttagagttcctcatgttgcagggtttaagaaatctgacccaccaaggtcatgtgacttttctgtactgttaaacttcattgtaataaaatgagagaaaaatttatgcctttttattcataacccagctgtggaccactgcctgaaaggtttgtacagatgcatgccacagtagatgtccacataataaaattcatagttaccaatgca

SEQ ID NO: 349161 - DNA, 4856 bp, Homo sapiens
agtgcttgacgggaggcggagcggggaacgaggccgtcggccattttgtgtctgcttcctgtgggacgtggtggtagccgttgggttgggaaagtgagggatttttggcctcgtttctcctgcttcttttctcctcccttttactttgccggtagaacacagttatgggtcgcaagaagaagaagcagctgaagccgtggtgctggtattgtaatagagattttgatgatgagaagatccttattcagcaccaaaaagcaaagcattttaaatgccatatatgtcacaagaaattgtatacaggacctggcttagctattcattgcatgcaggtacataaagaaacaatagatgccgtaccaaatgcaatacctggaagaacagacatagagttggaaatatatggtatggaaggtattccagaaaaagacatggatgaaagacgacgacttcttgaacagaaaacacaagaaagtcaaaaaaagaagcaacaagatgattctgatgaatatgatgatgacgactctgcagcctcaacttcatttcagccacagcctgttcaacctcagcaaggttatattcctccaatggcacagccaggactgccaccagtaccaggagcaccaggaatgcctccaggcatacctccattaatgccaggtgttcctcctctgatgccaggaatgccaccagttatgccaggcatgccacctggattgcatcatcagagaaaatacacccagtcattttgcggtgaaaacataatgatgccaatgggtggaatgatgccacctggaccaggaataccacctctgatgcctggaatgccaccaggtatgcccccacctgttccacgtcctggaattcctccaatgactcaagcacaggctgtttcagcgccaggtattcttaatagaccacctgcaccaacagcaactgtacctgccccacagcctccagttactaagcctcttttccccagtgctggacagatggggacacctgtcacaagctcaagtacagcttcatccaattcagaaagtctgtctgcatcttctaaagctctgtttcctagcacagcacaagctcaggcagctgtccaaggacctgttggtacagatttcaaacccttaaatagtacccctgcaacaactacagaacccccaaagcctacattccctgcttatacacagtctacagcttcaacaactagtacaacaaatagtactgcagctaaaccagcggcttcaataacaagtaagcctgctacacttacaacaactagtgcaaccagtaagttgatccatccagatgaggatatatccctggaagagagaagggcacagttacctaagtatcaacgtaatcttcctcggccaggacaggcccccatcggtaatccaccagttggaccaattggaggtatgatgccaccacagccaggcatcccacagcaacaaggaatgagacccccaatgccacctcatggtcagtatggtggtcatcatcaaggcatgccaggataccttcctggtgctatgcccccgtatgggcagggaccgccaatggtgcccccttaccagggtgggcctcctcgacctccgatgggaatgagacctcctgtaatgtcgcaaggtggccgttactgatcttacttcatccagtctaataggtttggagattaaaccttttctcaacttgtgctgtttatatagccaagcttccgtcaataaggcttcattgtgactttaacaaacattatcttcccacataccaggaactattggacatttattttacatgggaaaaattatttggaataataaagcaggaacttttcctgaagttgcaatttatactgtatggcttctttttcatgtttcatctaggtttttagaagtgaagtatagtaaatttggttcgttaaattgtgaaggcgctggaattacatgaacataccaccctagtaaagccctgccataggacaggctgaggctgagtctcagtgttgccctgttcagtctgagcagcagaatttcagcatttgctacttactggtagagaagaaaaatcccacagccctgccagtacagtttaatctgtatatgaaatggtgtagatacagtggaaatggttttccttaaaaccatctctttaaagctgcctttctggtgagtactgttttatacttttatatattataattttatcttctaaaattaactgaaataggacactttgattaaagaggtgagcactctgaatttctacatctttggatattacttgaatcaagaatattagaaaattattttaccacctggcatttcccttttaatttgctagttcacttttttctgaccttcacttaacagactataaatacaaaaactttgaacacataaattatttcattttggtgagatggaataaatgtttaaaattagtatttaagaaagttcttaaacattttttttagttggcagccaaaagatttttcttagtgctttggagacattgcataggtgtaaaattaagataccagaacttcattctgttcttgttgaagctgttgttgtggtgattcatgagcagtaagctggagttagagtggaagaagggtttaccaaaattcttcctgcagactagttgcttacagggtttctttgagaggcttaaaaatttcaaaagtattatttaagccactctaaccctgcatgaaaaattggagttagaaatactgatttctgagaccacgtataccagtgaaaattagcttctgagtaaatttctaatttatgccctgctttatttagcctcgctatatgtaacacatggattattttttccctctagtttttaactatatcctagattaaaaccagcatatgctaagaatgtttttacattctgtttcctcctgtgatctttctgaaccaataataaacagtcaactgtgatgctttttagtatgaacaatgatagttttctaaaatctgaaaatcaatacctgagtatgtgatgtggcaatgcattcttctagataagcactaaacaaagtatggaccctcaatttatgtctttaagatttaaagtgaagtaaatttctaaggaactgtgtcctttcctagcaggaataaacagtgaaaatttggtaagtatttaacttgaagtgcatgtaatagtgatgagagtaagtagccaaatttccgtaatataaggtaatgtttaaaagtgagcaataattattgcatctcttttgcgacttcatgtagatgtgattaacattttttacaaatttgcctgcataaagattaaattggaacataccttactcctttgtctggtttttttattttgtatggtgctttaaatactaattttatatttcaagctttttgcagggtagaaataagtggctgttaaagaaaatatcttcaagaaggattatttcagtgtccctttttaaaactcgatgatggctttcagtttatttaagtcttctgtttttcagctccagttaaaactgacaataggcagctatcaaaaatggaaaaaatcttgtgctctttctggaatattagaggaatcagttaataatagtaaagtggtattaacccaatacttgatttgcagtttttaaagcagtttttaaattgagagaaaaggggctgggcccagctgaggcgggtggatctcctgaggtcaggagtttgagaccagcctggccaacatagtgaaaccccgtctctactaaaaatacaaaaatcagccgggtgtggtgggacgtgcctgtaaccccagctactctggaggctgaggcaggaaaatcgcttgaacccagggggaggaggttgcagtgagccgagatggcgccgttgcactccagcttgggtgacagagcgagactccgtctcaaaaaaaaaaagaaaaaaagaaaaagtgataagatttgggagtctattccctgggatgttctattaataataaagtgataataaatgaaggttaaagtcaagtgttcaattactacaccaggaaagattgattatttctgaggaaaaggtccatttatttccaaactagtctgtagtggtttagagtaagcattattttatgaagtggtacaagattgcaaaggttagtaaagggacctgtctgtcaggtcaatcttcggtcttcacttttactggcaagggattatgtgaagagtaagtcatacaagggatatgattgtaaggaggtcctgaacaaagcatgataaatgttagtccatgtgtattattaaatggtctaaagaaaaatcatgactgatcgcataatttttaatgtaagtaaatgagctcactaagggtaattaaatactagcttttaaaatttaaagttctcacgaatattagtgcatcttgtcactttgatttgtcacctggttaaatagctggaagcttgtgcaaatgaaaaatgaaatggaagactacatttgtatatatatctgtataatttttgtttactagtaggttcagagagagatctgagatgttccttaacatgtagccatgtaattagaactcacaaggggcattgaaatgtttttctttttcagatagtctggggctatttacttattttaagtaagccaagtctaccatttgaaaaatggtgctttatttccatatctgaagcctgaagttattttttagtttgttttcatctaaaagtggaaagatttttgcttctgcgttattaagagcctctttgtttggaggagatggttatctccttcactcattaacctttgagtgcttgttatctacaaagatgaataaaatctttcatttattatttaaaaaaaaaaa

SEQ ID NO: 349162 - DNA, 3289 bp, Homo sapiens
agtgcttgacgggaggcggagcggggaacgaggccgtcggccattttgtgtctgcttcctgtgggacgtggtggtagccgttgggttgggaaagtgagggatttttggcctcgtttctcctgcttcttttctcctcccttttactttgccggtagaacacagttatgggtcgcaagaagaagaagcagctgaagccgtggtgctggtattgtaatagagattttgatgatgagaagatccttattcagcaccaaaaagcaaagcattttaaatgccatatatgtcacaagaaattgtatacaggacctggcttagctattcattgcatgcaggtacataaagaaacaatagatgccgtaccaaatgcaatacctggaagaacagacatagagttggaaatatatggtatggaaggtattccagaaaaagacatggatgaaagacgacgacttcttgaacagaaaacacaagaaagtcaaaaaaagaagcaacaagatgattctgatgaatatgatgatgacgactctgcagcctcaacttcatttcagccacagcctgttcaacctcagcaaggttatattcctccaatggcacagccaggactgccaccagtaccaggagcaccaggaatgcctccaggcatacctccattaatgccaggtgttcctcctctgatgccaggaatgccaccagttatgccaggcatgccacctggattgcatcatcagagaaaatacacccagtcattttgcggtgaaaacataatgatgccaatgggtggaatgatgccacctggaccaggaataccacctctgatgcctggaatgccaccaggtatgcccccacctgttccacgtcctggaattcctccaatgactcaagcacaggctgtttcagcgccaggtattcttaatagaccacctgcaccaacagcaactgtacctgccccacagcctccagttactaagcctcttttccccagtgctggacagatggggacacctgtcacaagctcaagtacagcttcatccaattcagaaagtctgtctgcatcttctaaagctctgtttcctagcacagcacaagctcaggcagctgtccaaggacctgttggtacagatttcaaacccttaaatagtacccctgcaacaactacagaacccccaaagcctacattccctgcttatacacagtctacagcttcaacaactagtacaacaaatagtactgcagctaaaccagcggcttcaataacaagtaagcctgctacacttacaacaactagtgcaaccagtaagttgatccatccagatgaggatatatccctggaagagagaagggcacagttacctaagtatcaacgtaatcttcctcggccaggacaggcccccatcggtaatccaccagttggaccaattggaggtatgatgccaccacagccaggcatcccacagcaacaaggaatgagacccccaatgccacctcatggtcagtatggtggtcatcatcaaggcatgccaggataccttcctggtgctatgcccccgtatgggcagggaccgccaatggtgcccccttaccagggtgggcctcctcgacctccgatgggaatgagacctcctgtaatgtcgcaaggtggccgttactgatcttacttcatccagtctaataggtttggagattaaaccttttctcaacttgtgctgtttatatagccaagcttccgtcaataaggcttcattgtgactttaacaaacattatcttcccacataccaggaactattggacatttattttacatgggaaaaattatttggaataataaagcaggaacttttcctgaagttgcaatttatactgtatggcttctttttcatgtttcatctaggtttttagaagtgaagtatagtaaatttggttcgttaaattgtgaaggcgctggaattacatgaacataccaccctagtaaagccctgccataggacaggctgaggctgagtctcagtgttgccctgttcagtctgagcagcagaatttcagcatttgctacttactggtagagaagaaaaatcccacagccctgccagtacagtttaatctgtatatgaaatggtgtagatacagtggaaatggttttccttaaaaccatctctttaaagctgcctttctggtgagtactgttttatacttttatatattataattttatcttctaaaattaactgaaataggacactttgattaaagaggtgagcactctgaatttctacatctttggatattacttgaatcaagaatattagaaaattattttaccacctggcatttcccttttaatttgctagttcacttttttctgaccttcacttaacagactataaatacaaaaactttgaacacataaattatttcattttggtgagatggaataaatgtttaaaattagtatttaagaaagttcttaaacattttttttagttggcagccaaaagatttttcttagtgctttggagacattgcataggtgtaaaattaagataccagaacttcattctgttcttgttgaagctgttgttgtggtgattcatgagcagtaagctggagttagagtggaagaagggtttaccaaaattcttcctgcagactagttgcttacagggtttctttgagaggcttaaaaatttcaaaagtattatttaagccactctaaccctgcatgaaaaattggagttagaaatactgatttctgagaccacgtataccagtgaaaattagcttctgagtaaatttctaatttatgccctgctttatttagcctcgctatatgtaacacatggattattttttccctctagtttttaactatatcctagattaaaaccagcatatgctaagaatgtttttacattctgtttcctcctgtgatctttctgaaccaataataaacagtcaactgtgatgctttttagtatgaacaatgatagttttctaaaatctgaaaatcaatacctgagtatgtggtcgtcaagcacgcgcgtgcttcaccacgacgtaaatcagttaaatattgggacactaaccatccaggtcaagaaaagtcacatgccatagccatggtattgcacatcattcatcttgcattctttgagaataagaagatcagtaaatagttcagaagtgggaagctttgtccaggcctgtgtgtgaacccaatgttttgtttagaaatagacaagtaggttcattgctatagcataacacaaaatttgcatatcgtggttagaagca

SEQ ID NO: 349163 - DNA, 2493 bp, Homo sapiens
agtgcttgacgggaggcggagcggggaacgaggccgtcggccattttgtgtctgcttcctgtgggacgtggtggtagccgttgggttgggaaagtgagggatttttggcctcgtttctcctgcttcttttctcctcccttttactttgccggtagaacacagttatgggtcgcaagaagaagaagcagctgaagccgtggtgctggtattgtaatagagattttgatgatgagaagatccttattcagcaccaaaaagcaaagcattttaaatgccatatatgtcacaagaaattgtatacaggacctggcttagctattcattgcatgcaggtacataaagaaacaatagatgccgtaccaaatgcaatacctggaagaacagacatagagttggaaatatatggtatggaaggtattccagaaaaagacatggatgaaagacgacgacttcttgaacagaaaacacaagaaagtcaaaaaaagaagcaacaagatgattctgatgaatatgatgatgacgactctgcagcctcaacttcatttcagccacagcctgttcaacctcagcaaggttatattcctccaatggcacagccaggactgccaccagtaccaggagcaccaggaatgcctccaggcatacctccattaatgccaggtgttcctcctctgatgccaggaatgccaccagttatgccaggcatgccacctggattgcatcatcagagaaaatacacccagtcattttgcggtgaaaacataatgatgccaatgggtggaatgatgccacctggaccaggaataccacctctgatgcctggaatgccaccaggtatgcccccacctgttccacgtcctggaattcctccaatgactcaagcacaggctgtttcagcgccaggtattcttaatagaccacctgcaccaacagcaactgtacctgccccacagcctccagttactaagcctcttttccccagtgctggacagatggggacacctgtcacaagctcaagtacagcttcatccaattcagaaagtctgtctgcatcttctaaagctctgtttcctagcacagcacaagctcaggcagctgtccaaggacctgttggtacagatttcaaacccttaaatagtacccctgcaacaactacagaacccccaaagcctacattccctgcttatacacagtctacagcttcaacaactagtacaacaaatagtactgcagctaaaccagcggcttcaataacaagtaagcctgctacacttacaacaactagtgcaaccagtaagttgatccatccagatgaggatatatccctggaagagagaagggcacagttacctaagtatcaacgtaatcttcctcggccaggacaggcccccatcggtaatccaccagttggaccaattggaggtatgatgccaccacagccaggcatcccacagcaacaaggaatgagacccccaatgccacctcatggtcagtatggtggtcatcatcaaggcatgccaggataccttcctggtgctatgcccccgtatgggcagggaccgccaatggtgcccccttaccagggtgggcctcctcgacctccgatgggaatgagacctcctgtaatgtcgcaaggtggccgttactgatcttacttcatccagtctaataggtttggagattaaaccttttctcaacttgtgctgtttatatagccaagcttccgtcaataaggcttcattgtgactttaacaaacattatcttcccacataccaggaactattggacatttattttacatgggaaaaattatttggaataataaagcaggaacttttcctgaagttgcaatttatactgtatggcttctttttcatgtttcatctaggtttttagaagtgaagtatagtaaatttggttcgttaaattgtgaaggcgctggaattacatgaacataccaccctagtaaagccctgccataggacaggctgaggctgagtctcagtgttgccctgttcagtctgagcagcagaatttcagcatttgctacttactggtagagaagaaaaatcccacagccctgccagtacaggttagtttaatctgtaagtacctgatgttcctatttttttcaaacatatccatataactcacacaaggaagaaagctgtgcggttacttaaatgttagtataactaataatagatccattggacactttaaacactcagtacttgggccaaagtagatctaggtttgctaaccccagttgtaataaaggtgtaatactgctcctttgttatctccttgtggttcaacctaagtagatacattgtacataaaaggaaaagacagtttcagttggctatgcccttgttgatagatgatatggagtccagggctttgggtccagggtcttttacttaagctatttcatggtggttctctcattcaccttttaactttttacattatgaatcaacctaagaaaa

SEQ ID NO: 349164 - DNA, 2171 bp, Homo sapiens
  misc_feature (2171)..(2171): n is a, c, g, or t
agtgcttgacgggaggcggagcggggaacgaggccgtcggccattttgtgtctgcttcctgtgggacgtggtggtagccgttgggttgggaaagtgagggatttttggcctcgtttctcctgcttcttttctcctcccttttactttgccggtagaacacagttatgggtcgcaagaagaagaagcagctgaagccgtggtgctggtattgtaatagagattttgatgatgagaagatccttattcagcaccaaaaagcaaagcattttaaatgccatatatgtcacaagaaattgtatacaggacctggcttagctattcattgcatgcaggtacataaagaaacaatagatgccgtaccaaatgcaatacctggaagaacagacatagagttggaaatatatggtatggaaggtattccagaaaaagacatggatgaaagacgacgacttcttgaacagaaaacacaagaaagtcaaaaaaagaagcaacaagatgattctgatgaatatgatgatgacgactctgcagcctcaacttcatttcagccacagcctgttcaacctcagcaaggttatattcctccaatggcacagccaggactgccaccagtaccaggagcaccaggaatgcctccaggcatacctccattaatgccaggtgttcctcctctgatgccaggaatgccaccagttatgccaggcatgccacctggattgcatcatcagagaaaatacacccagtcattttgcggtgaaaacataatgatgccaatgggtggaatgatgccacctggaccaggaataccacctctgatgcctggaatgccaccaggtatgcccccacctgttccacgtcctggaattcctccaatgactcaagcacaggctgtttcagcgccaggtattcttaatagaccacctgcaccaacagcaactgtacctgccccacagcctccagttactaagcctcttttccccagtgctggacagatggggacacctgtcacaagctcaagtacagcttcatccaattcagaaagtctgtctgcatcttctaaagctctgtttcctagcacagcacaagctcaggcagctgtccaaggacctgttggtacagatttcaaacccttaaatagtacccctgcaacaactacagaacccccaaagcctacattccctgcttatacacagtctacagcttcaacaactagtacaacaaatagtactgcagctaaaccagcggcttcaataacaagtaagcctgctacacttacaacaactagtgcaaccagtaagttgatccatccagatgaggatatatccctggaagagagaagggcacagttacctaagtatcaacgtaatcttcctcggccaggacaggcccccatcggtaatccaccagttggaccaattggaggtatgatgccaccacagccaggcatcccacagcaacaaggaatgagacccccaatgccacctcatggtcagtatggtggtcatcatcaaggcatgccaggataccttcctggtgctatgcccccgtatgggcagggaccgccaatggtgcccccttaccagggtgggcctcctcgacctccgatgggaatgagacctcctgtaatgtcgcaaggtggccgttactgatcttacttcatccagtctaataggtttggagattaaaccttttctcaacttgtgctgtttatatagccaagcttccgtcaataaggcttcattgtgactttaacaaacattatcttcccacataccaggaactattggacatttattttacatgggaaaaataaatgtccaatagttcctggtatgtggggggtggctggagaggaatgatgatagaggaggaaagtacttgtagtgtgactttcctcagagtcaagagaaggaagtgcttgcagcaataaaagtatttaaatataaactgaagaacacctctggttcttgtttttggtagatggagaaacccagagcagagctgaagaggtgtcatctgctctccagatggagtcagctgacaactcagaagcagaaaccaggtcttctgactctgggcaaatgttagatgctccctttagtagcaggaagacctgggtggaaatcctgatttggagtgtggtttgttgactactcccgagatcctgtaan

SEQ ID NO: 349165 - DNA, 2716 bp, Homo sapiens
  misc_feature (357)..(357): n is a, c, g, or t
  misc_feature (361)..(362): n is a, c, g, or t
  misc_feature (364)..(365): n is a, c, g, or t
  misc_feature (367)..(368): n is a, c, g, or t
  misc_feature (371)..(371): n is a, c, g, or t
  misc_feature (374)..(376): n is a, c, g, or t
  misc_feature (379)..(379): n is a, c, g, or t
  misc_feature (381)..(381): n is a, c, g, or t
  misc_feature (606)..(609): n is a, c, g, or t
  misc_feature (678)..(678): n is a, c, g, or t
  misc_feature (681)..(681): n is a, c, g, or t
  misc_feature (683)..(683): n is a, c, g, or t
  misc_feature (687)..(687): n is a, c, g, or t
atcattctctgaagagcatattttattaatcttcaagttcctcagcatattaataataaaaaccttgatatatattatcaacaagtctgactgttatgcccaaagaaaatccagattattttaagtgagtttgttctttttcatctgattcatcatccataacctgttctacgccttctactccggaatataaaactgcagcatgttctgaattccattggaggtatgatgccaccacagccaggcatcccacagcaacaaggaatgagacccccaatgccacctcatggtcagtatggtggtcatcatcaaggcatgccaggataccttcctggtgctatgcccccgtatgggcangganngnnannggngcnnnctnancagggtgggcctcctcgacctccgatgggaatgagacctcctgtaatgtcgcaaggtggccgttactgatcttacttcatccagtctaataggtttggagattaaaccttttctcaacttgtgctgtttatatagccaagcttccgtcaataaggcttcattgtgactttaacaaacattatcttcccacataccaggaactattggacattattttacatgggnnnnttatttggaataataaagcaggaacttttcctgaagttgcaatttaaaaaaaaaaaaaaaaaaaaaaanaananaaanaaaaaaaaaaaggaacgaggccgtcggccattttgtgtctgcttcctgtgggacgtggtggtagccgttgggttgggaaagtgagggatttttggcctcgtttctcctgcttcttttctcctcccttttactttgccggtagaacacagttatgggtcgcaagaagaagaagcagctgaagccgtggtgctggtattgtaatagagattttgatgatgagaagatccttattcagcaccaaaaagcaaagcattttaaatgccatatatgtcacaagaaattgtatacaggactgccaccagtaccaggagcaccaggaatgcctccaggcatacctccattaatgccaggtgttcctcctctgatgccaggaatgccaccagttatgccaggcatgccacctggattgcatcatcagagaaaatacacccagtcattttgcggtgaaaacataatgatgccaatgggtggaatgatgccacctggaccaggaataccacctctgatgcctggaatgccaccaggtatgcccccacctgttccacgtcctggaattcctccaatgactcaagcacaggctgtttcagcgccaggtattcttaatagaccacctgcaccaacagcaactgtacctgccccacagcctccagttactaagcctcttttccccagtgctggacagatggggacacctgtcacaagctcaagtacagcttcatccaattcagaaagtctgtctgcatcttctaaagctctgtttcctagcacagcacaagctcaggcagctgtccaaggacctgttggtacagatttcaaacccttaaatagtacccctgcaacaactacagaacccccaaagcctacattccctgcttatacacagtctacagcttcaacaactagtacaacaaatagtactgcagctaaaccagcggcttcaataacaagtaagcctgctacacttacaacaactagtgcaaccagtaagttgatccatccagatgaggatatatccctggaagagagaagggcacagttacctaagtatcaacgtaatcttcctcggccaggacaggcccccatcggtaatccaccagttggaccaattggaggtatgatgccaccacagccaggcatcccacagcaacaaggaatgagacccccaatgccacctcatggtcagtatggtggtcatcatcaaggcatgccaggataccttcctggtgctatgcccccgtatgggcagggaccgccaatggtgcccccttaccagggtgggcctcctcgacctccgatgggaatgagacctcctgtaatgtcgcaaggtggccgttactgatcttacttcatccagtctaataggtttggagattaaaccttttctcaacttgtgctgtttatatagccaagcttccgtcaataaggcttcattgtgactttaacaaacattatcttcccacataccaggaactattggacatttattttacatgggaaaaattatttggaataataaagcaggaacttttcctgaagttgcaatttatactgtatggcttctttttcatgtttcatctaggtttttagaagtgaagtatagtaaatttggttcgttaaattgtgaaggcgctggaattacatgaacataccaccctagtaaaggcaagttctgtaagcttacattgctatttgtaaagtttgccttcacagcatttcagatgctgttggacttcatgtccccaacctagcttggtgagggctgtaactgtttccaagtacttgtacattggaagtctgaatgtgtaacaatatttaatgtatttagagttcctcatgttgcagggtttaagaaatctgacccaccaaggtcatgtgacttttctgtactgttaaacttcattgtaataaaatgagagaaaaatttatgcctttttattcataacccagctgtggaccactgcctgaaaggtttgtacagatgcatgccacagtagatgtccacataataaaattcatagttaccaatgca

SEQ ID NO: 349166 - DNA, 1779 bp, Homo sapiens
ttgtatcgaagtatccgcattctcttccctctaactctttaatatttgttattattttgattgaaattcttgcttgtaggcatacctccattaatgccaggtgttcctcctctgatgccaggaatgccaccagttatgccaggcatgccacctggattgcatcatcagagaaaatacacccagtcattttgcggtgaaaacataatgatgccaatgggtggaatgatgccacctggaccaggaataccacctctgatgcctggaatgccaccaggtatgcccccacctgttccacgtcctggaattcctccaatgactcaagcacaggctgtttcagcgccaggtattcttaatagaccacctgcaccaacagcaactgtacctgccccacagcctccagttactaagcctcttttccccagtgctggacagatggggacacctgtcacaagctcaagtacagcttcatccaattcagaaagtctgtctgcatcttctaaagctctgtttcctagcacagcacaagctcaggcagctgtccaaggacctgttggtacagatttcaaacccttaaatagtacccctgcaacaactacagaacccccaaagcctacattccctgcttatacacagtctacagcttcaacaactagtacaacaaatagtactgcagctaaaccagcggcttcaataacaagtaagcctgctacacttacaacaactagtgcaaccagtaagttgatccatccagatgaggatatatccctggaagagagaagggcacagttacctaagtatcaacgtaatcttcctcggccaggacaggcccccatcggtaatccaccagttggaccaattggaggtatgatgccaccacagccaggcatcccacagcaacaaggaatgagacccccaatgccacctcatggtcagtatggtggtcatcatcaaggcatgccaggataccttcctggtgctatgcccccgtatgggcagggaccgccaatggtgcccccttaccagggtgggcctcctcgacctccgatgggaatgagacctcctgtaatgtcgcaaggtggccgttactgatcttacttcatccagtctaataggtttggagattaaaccttttctcaacttgtgctgtttatatagccaagcttccgtcaataaggcttcattgtgactttaacaaacattatcttcccacataccaggaactattggacatttattttacatgggaaaaattatttggaataataaagcaggaacttttcctgaagttgcaatttatactgtatggcttctttttcatgtttcatctaggtttttagaagtgaagtatagtaaatttggttcgttaaattgtgaaggcgctggaattacatgaacataccaccctagtaaaggcaagttctgtaagcttacattgctatttgtaaagtttgccttcacagcatttcagatgctgttggacttcatgtccccaacctagcttggtgagggctgtaactgtttccaagtacttgtacattggaagtctgaatgtgtaacaatatttaatgtatttagagttcctcatgttgcagggtttaagaaatctgacccaccaaggtcatgtgacttttctgtactgttaaacttcattgtaataaaatgagagaaaaatttatgcctttttattcataacccagctgtggaccactgcctgaaaggtttgtacagatgcatgccacagtagatgtccacataataaaattcatagttaccaatgca

SEQ ID NO: 349167 - DNA, 1764 bp, Homo sapiens
gttttagacaatttattttgataggattgttacagtgtgttgtgtgttctttcagctttgattcatttcagtattagaggtcagattcaagtcttctatctagtgttgtttcaggctttagccagaatattttttaatggtttatgctgttcattaacttactgtttcttgaaatttgctttctaataaatgatgccaatgggtggaatgatgccacctggaccaggaataccacctctgatgcctggaatgccaccaggtatgcccccacctgttccacgtcctggaattcctccaatgactcaagcacaggctgtttcagcgccaggtattcttaatagaccacctgcaccaacagcaactgtacctgccccacagcctccagttactaagcctcttttccccagtgctggacagatggggacacctgtcacaagctcaagtacagcttcatccaattcagaaagtctgtctgcatcttctaaagctctgtttcctagcacagcacaagctcaggcagctgtccaaggacctgttggtacagatttcaaacccttaaatagtacccctgcaacaactacagaacccccaaagcctacattccctgcttatacacagtctacagcttcaacaactagtacaacaaatagtactgcagctaaaccagcggcttcaataacaagtaagcctgctacacttacaacaactagtgcaaccagtaagttgatccatccagatgaggatatatccctggaagagagaagggcacagttacctaagtatcaacgtaatcttcctcggccaggacaggcccccatcggtaatccaccagttggaccaattggaggtatgatgccaccacagccaggcatcccacagcaacaaggaatgagacccccaatgccacctcatggtcagtatggtggtcatcatcaaggcatgccaggataccttcctggtgctatgcccccgtatgggcagggaccgccaatggtgcccccttaccagggtgggcctcctcgacctccgatgggaatgagacctcctgtaatgtcgcaaggtggccgttactgatcttacttcatccagtctaataggtttggagattaaaccttttctcaacttgtgctgtttatatagccaagcttccgtcaataaggcttcattgtgactttaacaaacattatcttcccacataccaggaactattggacatttattttacatgggaaaaattatttggaataataaagcaggaacttttcctgaagttgcaatttatactgtatggcttctttttcatgtttcatctaggtttttagaagtgaagtatagtaaatttggttcgttaaattgtgaaggcgctggaattacatgaacataccaccctagtaaaggcaagttctgtaagcttacattgctatttgtaaagtttgccttcacagcatttcagatgctgttggacttcatgtccccaacctagcttggtgagggctgtaactgtttccaagtacttgtacattggaagtctgaatgtgtaacaatatttaatgtatttagagttcctcatgttgcagggtttaagaaatctgacccaccaaggtcatgtgacttttctgtactgttaaacttcattgtaataaaatgagagaaaaatttatgcctttttattcataacccagctgtggaccactgcctgaaaggtttgtacagatgcatgccacagtagatgtccacataataaaattcatagttaccaatgca

SEQ ID NO: 349168 - DNA, 2352 bp, Homo sapiens
  misc_feature (357)..(357): n is a, c, g, or t
  misc_feature (361)..(362): n is a, c, g, or t
  misc_feature (364)..(365): n is a, c, g, or t
  misc_feature (367)..(368): n is a, c, g, or t
  misc_feature (371)..(371): n is a, c, g, or t
  misc_feature (374)..(376): n is a, c, g, or t
  misc_feature (379)..(379): n is a, c, g, or t
  misc_feature (381)..(381): n is a, c, g, or t
  misc_feature (606)..(609): n is a, c, g, or t
  misc_feature (678)..(678): n is a, c, g, or t
  misc_feature (681)..(681): n is a, c, g, or t
  misc_feature (683)..(683): n is a, c, g, or t
  misc_feature (687)..(687): n is a, c, g, or t
atcattctctgaagagcatattttattaatcttcaagttcctcagcatattaataataaaaaccttgatatatattatcaacaagtctgactgttatgcccaaagaaaatccagattattttaagtgagtttgttctttttcatctgattcatcatccataacctgttctacgccttctactccggaatataaaactgcagcatgttctgaattccattggaggtatgatgccaccacagccaggcatcccacagcaacaaggaatgagacccccaatgccacctcatggtcagtatggtggtcatcatcaaggcatgccaggataccttcctggtgctatgcccccgtatgggcangganngnnannggngcnnnctnancagggtgggcctcctcgacctccgatgggaatgagacctcctgtaatgtcgcaaggtggccgttactgatcttacttcatccagtctaataggtttggagattaaaccttttctcaacttgtgctgtttatatagccaagcttccgtcaataaggcttcattgtgactttaacaaacattatcttcccacataccaggaactattggacattattttacatgggnnnnttatttggaataataaagcaggaacttttcctgaagttgcaatttaaaaaaaaaaaaaaaaaaaaaaanaananaaanaaaaaaaaaaaggaacgaggccgtcggccattttgtgtctgcttcctgtgggacgtggtggtagccgttgggttgggaaagtgagggatttttggcctcgtttctcctgcttcttttctcctcccttttactttgccggtagaacacagttatgggtcgcaagaagaagaagcagctgaagccgtggtgctggtattgtaatagagattttgatgatgagaagatccttattcagcaccaaaaagcaaagcattttaaatgccatatatgtcacaagaaattgtatacaggacctggcttagctattcattgcatgcaggtacataaagaaacaatagatgccgtaccaaatgcaatacctggaagaacagacatagagttggaaatatatggtatggaaggtattccagaaaaagacatggatgaaagacgacgacttcttgaacagaaaacacaagaaagtcaaaaaaagaagcaacaagataacccccaaagcctacattccctgcttatacacagtctacagcttcaacaactagtacaacaaatagtactgcagctaaaccagcggcttcaataacaagtaagcctgctacacttacaacaactagtgcaaccagtaagttgatccatccagatgaggatatatccctggaagagagaagggcacagttacctaagtatcaacgtaatcttcctcggccaggacaggcccccatcggtaatccaccagttggaccaattggaggtatgatgccaccacagccaggcatcccacagcaacaaggaatgagacccccaatgccacctcatggtcagtatggtggtcatcatcaaggcatgccaggataccttcctggtgctatgcccccgtatgggcagggaccgccaatggtgcccccttaccagggtgggcctcctcgacctccgatgggaatgagacctcctgtaatgtcgcaaggtggccgttactgatcttacttcatccagtctaataggtttggagattaaaccttttctcaacttgtgctgtttatatagccaagcttccgtcaataaggcttcattgtgactttaacaaacattatcttcccacataccaggaactattggacatttattttacatgggaaaaattatttggaataataaagcaggaacttttcctgaagttgcaatttatactgtatggcttctttttcatgtttcatctaggtttttagaagtgaagtatagtaaatttggttcgttaaattgtgaaggcgctggaattacatgaacataccaccctagtaaaggcaagttctgtaagcttacattgctatttgtaaagtttgccttcacagcatttcagatgctgttggacttcatgtccccaacctagcttggtgagggctgtaactgtttccaagtacttgtacattggaagtctgaatgtgtaacaatatttaatgtatttagagttcctcatgttgcagggtttaagaaatctgacccaccaaggtcatgtgacttttctgtactgttaaacttcattgtaataaaatgagagaaaaatttatgcctttttattcataacccagctgtggaccactgcctgaaaggtttgtacagatgcatgccacagtagatgtccacataataaaattcatagttaccaatgca

SEQ ID NO: 349169 - DNA, 1566 bp, Homo sapiens
ttcagcaatctggaataaatacaaagcattgtaaatttaatttttggtgaggaggtagaagacatctaacaagttaaatatgcagtcttatttccactgctgtgttgtgggtgtgactttaacctagcatcttttgatatttttatgggttatcttgaattttgtggaatgtttatcacattaactttgtattaatttcatttaaagtttggtcctttatttaatgttgatgccttgttttaagttaaactgttgtagatatagttaatttaaggttttgaagtttcgttgatgaagtattgtattttacaggctcaggcagctgtccaaggacctgttggtacagatttcaaacccttaaatagtacccctgcaacaactacagaacccccaaagcctacattccctgcttatacacagtctacagcttcaacaactagtacaacaaatagtactgcagctaaaccagcggcttcaataacaagtaagcctgctacacttacaacaactagtgcaaccagtaagttgatccatccagatgaggatatatccctggaagagagaagggcacagttacctaagtatcaacgtaatcttcctcggccaggacaggcccccatcggtaatccaccagttggaccaattggaggtatgatgccaccacagccaggcatcccacagcaacaaggaatgagacccccaatgccacctcatggtcagtatggtggtcatcatcaaggcatgccaggataccttcctggtgctatgcccccgtatgggcagggaccgccaatggtgcccccttaccagggtgggcctcctcgacctccgatgggaatgagacctcctgtaatgtcgcaaggtggccgttactgatcttacttcatccagtctaataggtttggagattaaaccttttctcaacttgtgctgtttatatagccaagcttccgtcaataaggcttcattgtgactttaacaaacattatcttcccacataccaggaactattggacatttattttacatgggaaaaattatttggaataataaagcaggaacttttcctgaagttgcaatttatactgtatggcttctttttcatgtttcatctaggtttttagaagtgaagtatagtaaatttggttcgttaaattgtgaaggcgctggaattacatgaacataccaccctagtaaaggcaagttctgtaagcttacattgctatttgtaaagtttgccttcacagcatttcagatgctgttggacttcatgtccccaacctagcttggtgagggctgtaactgtttccaagtacttgtacattggaagtctgaatgtgtaacaatatttaatgtatttagagttcctcatgttgcagggtttaagaaatctgacccaccaaggtcatgtgacttttctgtactgttaaacttcattgtaataaaatgagagaaaaatttatgcctttttattcataacccagctgtggaccactgcctgaaaggtttgtacagatgcatgccacagtagatgtccacataataaaattcatagttaccaatgca

SEQ ID NO: 349170 - DNA, 1022 bp, Homo sapiens
  misc_feature (772)..(772): n is a, c, g, or t
  misc_feature (789)..(789): n is a, c, g, or t
  misc_feature (802)..(802): n is a, c, g, or t
  misc_feature (812)..(812): n is a, c, g, or t
  misc_feature (836)..(836): n is a, c, g, or t
  misc_feature (839)..(840): n is a, c, g, or t
  misc_feature (848)..(848): n is a, c, g, or t
agtgcttgacgggaggcggagcggggaacgaggccgtcggccattttgtgtctgcttcctgtgggacgtggtggtagccgttgggttgggaaagtgagggatttttggcctcgtttctcctgcttcttttctcctcccttttactttgccggtagaacacagttatgggtcgcaagaagaagaagcagctgaagccgtggtgctggtattgtaatagagattttgatgatgagaagatccttattcagcaccaaaaagcaaagcattttaaatgccatatatgtcacaagaaattgtatacaggacctggcttagctattcattgcatgcaggtacataaagaaacaatagatgccgtaccaaatgcaatacctggaagaacagacatagagttggaaatatatggtatggaaggtattccagaaaaagacatggatgaaagacgacgacttcttgaacagaaaacacaagaaagtcaaaaaaagaagcaacaagatgattctgatgaatatgatgatgacgactctgcagcctcaacttcatttcagccacagcctgttcaacctcagcaaggttatattcctccaatggcacagccaggactgccaccagtaccaggagcaccaggaatgcctccaggcatacctccattaatgccaggtgttcctcctctgatgccaggaatgccaccagttatgccaggcatgccacctggattgcatcatcagagaaaatacacccagtcattttgcggtgaaaacataatgatgcnatggtggatgatgcacntggacaggatacnactctatgcnggatgcacaggtatgcccactgtncanntctggatnctccatggtcaggcaagtgtcagcgccggatttatgacaccttgcaaaagagactgcccaactcagataagctttccggggatggactggcacatagttcaataaggtcgtttcaagtccccaaactgcggcgacgtgatacttgcgcaaaccacgtcgttgcaaaaaggaata

SEQ ID NO: 349171 - DNA, 547 bp, Homo sapiens
cggtagaacacagttatgggtcgcaagaagaagaagcagctgaagccgtggtgctggtatcctttgtcggtttgaagtcgaggtcgcgttggggtgccggttgttggggcctgggactaggaggcctggatttggcttacggcgtggagcgtttgtatttaggcgtctgcgtgggtggcctggtggctgggattggacttgggaaggcttctaggaaaatggggttccgaggtcgacaggcttttgcagttgtgggtcgtgtgactctgtgactcaggaggatcttgttcggtgcgaattttggactccgggaggcggcctggacccctccgccagggacagtgtcccctagggactattcagccaccttccgttgttttggtgacgattcaacaagggacttttcttcgagtgcgataggcttattactttcatggagggttggggacagcttcacagtctgtcacccactttttctgtttttatttactttatgtgtgttttgtgtttattttttcgaattggcggtttagtaaagaaccaagtt

SEQ ID NO: 349172 - DNA, 569 bp, Homo sapiens
cggcaggatggagggaccaggaatgtgggcgtcggggcaccagtggcaccacaggagaggagccactgacatcctgggcaccgcctgcccccaggtgaacacacccgcagccgaggtgctctacacagtcatccaggactgggcccaattggatgcggggagcatggtgctggacgtgtgctgtggcaccggcaccattggcctggccctggcccgggtgagccctcctgccctgctgagggcaccctctccccaccccaagacccccattgaccccagctcaaagtcaccacagctgactccatcatgccccaggcccagctcctctttgctgcccacagggccccatgtactcccctccctgggtggggcgacaccacgctttcctgtttcagaaggtaaagagggtcattggggtcgagctatgcccagaggctgtggaggacgcccgggtgaacgcccaggacaatggtgagtggcaaggccgtgggtgggggtggggagggcacataaccccagggacagcatatcagagctttgaacagggtgtgaaaggaactcttccggga

SEQ ID NO: 349173 - DNA, 3643 bp, Homo sapiens
gccaggatcatagagacgctcggcctccgccgcacgcgctggcggactaagagtggctggcgaagcgagcggccggcgcgggcccctggcgggcgggcggtacagccccaagcctgagacccggacctgagcatcgcaggttcgagtcccgccccgcctggggcgaagccgggggtggcggcgacctcgcggcgttgcaccggctctgtgagcacctcccctctgagcacttcccttgtgacaggccacttcccttgtgacaggcccaggacgaggtggccaggcggcccccatggcgtccctggtctaggcggagaaccgcctgggcgatgagtgagaacctcgacaacgagggcccgaagcccatggagagctgtggccaggagagcagcagtgccctgagctgccctaccgtctcggtgccccctgcagccccggcagccctggaggaggtggagaaagagggcgctggggcggctacagggccggggcctcagcccgggctctacagctacatcagggatgacttgtttacctctgagatctttaaactggagctgcagaacgtgcctcgccacgccagcttcagcgacgtccggcgcttcctgggccgctttggtctgcagccccacaaaaccaaactctttgggcaaccaccctgcgcctttgtgacattccgcagcgctgcagagagggacaaggccctgcgcgttttgcatggtgccctctggaaaggccgcccactcagtgtgcgcctggcccggcccaaggccgaccccatggccaggaggaggcgacaggagggtgagagtgagccaccagtaacacgagtggccgacgtggtgacccctctatggacagtgccctatgctgagcagcttgagcggaagcagctggagtgcgagcaggtgctgcagaaacttgccaaggaaatcgggagcaccaaccgtgccttgctgccctggctgctcgagcagaggcacaagcacaacaaggcctgctgcccgctggagggggtcaggccatcaccccagcagactgagtatcgtaataagtgtgagtttctggttggcgtcggggtggatggggaggataacaccgtgggctgtcggctcggcaagtacaagggcgggacgtgtgctgtggcagccccgtttgacaccgtgcacatccccgaagccaccaagcaggtggtgaaggccttccaggagttcatccggtgaggacctgtgacggggctcccgggaagtcctatgcggtgtgggagcagagggtggtgatcctgccccgggaattctggagtgcctgccatttcagccagatgaaggaaggtgtggccagaggagagagcagggggactgcttgcccagttgtgggcacttgggccagctcgtgattcccacaggtccactccatactcggcatacgacccagagacgtacacaggccactggaagcagctgactgtgcgcaccagccgccgccaccaggccatggccattgcctacttccacccccagaagctgagccctgaggagctggcagagctgaagacctccctagcgcagcacttcacagcagggccaggcagggccagtggagtgacctgcctctacttcgtggaggagggacagcgaaagactcctagccaggagggcctgcccctggagcatgtggctggggaccggtgcatccacgaggacctgctagggctgaccttccggatctctccacacgccttcttccaggtgaacacacccgcagccgaggtgctctacacagtcatccaggactgggcccaattggatgcggggagcatggtgctggacgtgtgctgtggcaccggcaccattggcctggccctggcccggaaggtaaagagggtcattggggtcgagctatgcccagaggctgtggaggacgcccgggtgaacgcccaggacaatgagttgagtaatgtggagttccactgcgggagggccgaggacctggtgcccaccctggtgagcagactggcctcccagcacctcgtggccatcctggacccaccccgtgctggcttgcattccaaggtgatcctggccatccggagagctaagaacctcaggcggctgctgtacgtctcatgcaacccccgggcagccatgggcaactttgtggacctctgcagagccccatctaaccgggtgaagggcattcccttccggccggtcaaggctgtggcagtggacctgttcccgcagaccccgcactgtgagatgctcatcctgtttgagagggtggagcaccccaatggcacaggggtcttggggccccacagccctccagctcaacccacaccaggacccccagataacaccctacaagaaactgggaccttcccctcatcctaggcccaggacccattatggggacaggagctgaagggctcccagggccccaggggcggggaaggcatggcttgctggccaggatattcagaggtaggcagccaaagggcacagaaccctgtgccccaccaggattggcctgctgctaggggccaggggccctgaccaggaagacaggtgggttcctgtagcctgttgcccatccccagggcctttgtggactagccaaggctgtgagggccagaataaacaactgctcaacaaagggtgtttctgtgatgagagccaggggtctgaacacagggcctgggtgccagggaaagggccaaactaggcctaggcagctctgcaagcctctctgcatggctgggggagtcagggcagagcttactttaaaaaagaatgttcgatttgatacttaaacttgaggagaggcagagagaggtctgggaactgcaccagctgggggcatggggtggagaacactgggcagagttggcccctctgtggccagcctggccctcagcccagcagagagggcatcaaccaaggaaggggccatgctggggtgctgctcagctgttacaaaggcagggtccagcctgcagggaggccccaggaggggatctggccagtcaagggtccacagggtgccagcctctcaccctcagaataaagacatcagccattcaaaaaaaaaaaagaaaaaacaaaaaaaaaaagaagaaagaagacacacaagaaaaaacaaacacgacaagaaggagtacccaaagaaaagaagcaaaaaaaaaagaagcgggcggcgggcgcacctttatgattttcacttctttacgatgcgtcagtgcctataacttatctatcatccatactacagcgtcctgcttgtttttttcatcactacgtatcgcttcgatcctttttatgcagcttgtgtattgtcttatttatgctataattccttgctgcgcagcgatgttagatttacaaatattctcgtgtgtccgggtcgcagacaatacccccgacgtcctgcgccggttccagcctacaatcatcgcacaaacaaggacagcactcaccgccatgggggcacatgacatcacccaccgcatcagcccccagcagcacatcccgccctataccacacatccctcgtaaccccatgtcccaggcgcatcacacaacatccaacacttcctgatggaaccacatgcccagtgcgaccccaccaccaccgcgttgttagc

SEQ ID NO: 349174 - DNA, 3028 bp, Homo sapiens
gccaggatcatagagacgctcggcctccgccgcacgcgctggcggactaagagtggctggcgaagcgagcggccggcgcgggcccctggcgggcgggcggtacagccccaagcctgagacccggacctgagcatcgcaggttcgagtcccgccccgcctggggcgaagccgggggtggcggcgacctcgcggcgttgcaccggctctgtgagcacctcccctctgagcacttcccttgtgacaggccacttcccttgtgacaggcccaggacgaggtggccaggcggcccccatggcgtccctggtctaggcggagaaccgcctgggcgatgagtgagaacctcgacaacgagggcccgaagcccatggagagctgtggccaggagagcagcagtgccctgagctgccctaccgtctcggtgccccctgcagccccggcagccctggaggaggtggagaaagagggcgctggggcggctacagggccggggcctcagcccgggctctacagctacatcagggatgacttgtttacctctgagatctttaaactggagctgcagaacgtgcctcgccacgccagcttcagcgacgtccggcgcttcctgggccgctttggtctgcagccccacaaaaccaaactctttgggcaaccaccctgcgcctttgtgacattccgcagcgctgcagagagggacaaggccctgcgcgttttgcatggtgccctctggaaaggccgcccactcagtgtgcgcctggcccggcccaaggccgaccccatggccaggaggaggcgacaggagggtgagagtgagccaccagtaacacgagtggccgacgtggtgacccctctatggacagtgccctatgctgagcagcttgagcggaagcagctggagtgcgagcaggtgctgcagaaacttgccaaggaaatcgggagcaccaaccgtgccttgctgccctggctgctcgagcagaggcacaagcacaacaaggcctgctgcccgctggagggggtcaggccatcaccccagcagactgagtatcgtaataagtgtgagtttctggttggcgtcggggtggatggggaggataacaccgtgggctgtcggctcggcaagtacaagggcgggacgtgtgctgtggcagccccgtttgacaccgtgcacatccccgaagccaccaagcaggtggtgaaggccttccaggagttcatccggtccactccatactcggcatacgacccagagacgtacacaggccactggaagcagctgactgtgcgcaccagccgccgccaccaggccatggccattgcctacttccacccccagaagctgagccctgaggagctggcagagctgaagacctccctagcgcagcacttcacagcagggccaggcagggccagtggagtgacctgcctctacttcgtggaggagggacagcgaaagactcctagccaggagggcctgcccctggagcatgtggctggggaccggtgcatccacgaggacctgctagggctgaccttccggatctctccacacgccttcttccaggtgaacacacccgcagccgaggtgctctacacagtcatccaggactgggcccaattggatgcggggagcatggtgctggacgtgtgctgtggcaccggcaccattggcctggccctggcccggaaggtaaagagggtcattggggtcgagctatgcccagaggctgtggaggacgcccgggtgaacgcccaggacaatgagttgagtaatgtggagttccactgcgggagggccgaggacctggtgcccaccctggtgagcagactggcctcccagcacctcgtggccatcctggacccaccccgtgctggcttgcattccaaggtgatcctggccatccggagagctaagaacctcaggcggctgctgtacgtctcatgcaacccccgggcagccatgggcaactttgtggacctctgcagagccccatctaaccgggtgaagggcattcccttccggccggtcaaggctgtggcagtggacctgttcccgcagaccccgcactgtgagatgctcatcctgtttgagagggtggagcaccccaatggcacaggggtcttggggccccacagccctccagctcaacccacaccaggacccccagataacaccctacaagaaactgggaccttcccctcatcctaggcccaggacccattatggggacaggagctgaagggctcccagggccccaggggcggggaaggcatggcttgctggccaggatattcagaggtaggcagccaaagggcacagaaccctgtgccccaccaggattggcctgctgctaggggccaggggccctgaccaggaagacaggtgggttcctgtagcctgttgcccatccccagggcctttgtggactagccaaggctgtgagggccagaataaacaactgctcaacaaaaaaaaaaaagaaaaaacaaaaaaaaaaagaagaaagaagacacacaagaaaaaacaaacacgacaagaaggagtacccaaagaaaagaagcaaaaaaaaaagaagcgggcggcgggcgcacctttatgattttcacttctttacgatgcgtcagtgcctataacttatctatcatccatactacagcgtcctgcttgtttttttcatcactacgtatcgcttcgatcctttttatgcagcttgtgtattgtcttatttatgctataattccttgctgcgcagcgatgttagatttacaaatattctcgtgtgtccgggtcgcagacaatacccccgacgtcctgcgccggttccagcctacaatcatcgcacaaacaaggacagcactcaccgccatgggggcacatgacatcacccaccgcatcagcccccagcagcacatcccgccctataccacacatccctcgtaaccccatgtcccaggcgcatcacacaacatccaacacttcctgatggaaccacatgcccagtgcgaccccaccaccaccgcgttgttagc

SEQ ID NO: 349175 - DNA, 1502 bp, Homo sapiens
gccaggatcatagagacgctcggcctccgccgcacgcgctggcggactaagagtggctggcgaagcgagcggccggcgcgggcccctggcgggcgggcggtacagccccaagcctgagacccggacctgagcatcgcaggttcgagtcccgccccgcctggggcgaagccgggggtggcggcgacctcgcggcgttgcaccggctctgtgagcacctcccctctgagcacttcccttgtgacaggccacttcccttgtgacaggcccaggacgaggtggccaggcggcccccatggcgtccctggtctaggcggagaaccgcctgggcgatgagtgagaacctcgacaacgagggcccgaagcccatggagagctgtggccaggagagcagcagtgccctgagctgccctaccgtctcggtgccccctgcagccccggcagccctggaggaggtggagaaagagggcgctggggcggctacagggccggggcctcagcccgggctctacagctacatcagggatgacttgtttacctctgagatctttaaactggagctgcagaacgtgcctcgccacgccagcttcagcgacgtccggcgcttcctgggccgctttggtctgcagccccacaaaaccaaactctttgggcaaccaccctgcgcctttgtgacattccgcagcgctgcagagagggacaaggccctgcgcgttttgcatggtgccctctggaaaggccgcccactcagtgtgcgcctggcccggcccaaggccgaccccatggccaggaggaggcgacaggagggtgagagtgagccaccagtaacacgagtggccgacgtggtgacccctctatggacagtgccctatgctgagcagcttgagcggaagcagctggagtgcgagcaggtgctgcagaaacttgccaaggaaatcgggagcaccaaccgtgccttgctgccctggctgctcgagcagaggcacaagcacaacaaggcctgctgcccgctggagggggtcaggccatcaccccagcagactgagtatcgtaataagtgtgagtttctggttggcgtcggggtggatggggaggataacaccgtgggctgtcggctcggcaagtacaagggcgggacgtgtgctgtggcagccccgtttgacaccgtgcacatccccgaagccaccaagcaggtggtgaaggccttccaggagttcatccggtccactccatactcggcatacgacccagagacgtacacaggccactggaagcagctgactgtgcgcaccagccgccgccaccaggcatggcttgctggccaggatattcagaggtaggcagccaaagggcacagaaccctgtgccccaccaggattggcctgctgctaggggccaggggccctgaccaggaagacaggtgggttcctgtagcctgttgcccatccccagggcctttgtggactagccaaggctgtgagggccagaataaacaactgctcaac

SEQ ID NO: 349176 - DNA, 1786 bp, Homo sapiens
cctgtgggctaccaaggtacaaatttttaatgatgtccatatctgtccacagtctaaaaaggacgcccgagtaaacgctcaggacaattgagttgagtaatgtggagttccactgcgggagggccgaggacctggtgcccaccctggtgagcagactggcctcccagcacctcgtggccatcctggacccaccccgtgctggcttgcattccaaggtgatcctggccatccggagagctaagaacctcaggcggctgctgtacgtctcatgcaacccccgggcagccatgggcaactttgtggacctctgcagagccccatctaaccgggtgaagggcattcccttccggccggtcaaggctgtggcagtggacctgttcccgcagaccccgcactgtgagatgctcatcctgtttgagagggtggagcaccccaatggcacaggggtcttggggccccacagccctccagctcaacccacaccaggacccccagataacaccctacaagaaactgggaccttcccctcatcctaggcccaggacccattatggggacaggagctgaagggctcccagggccccaggggcggggaaggcatggcttgctggccaggatattcagaggtaggcagccaaagggcacagaaccctgtgccccaccaggattggcctgctgctaggggccaggggccctgaccaggaagacaggtgggttcctgtagcctgttgcccatccccagggcctttgtggactagccaaggctgtgagggccagaataaacaactgctcaacaaagggtgtttctgtgatgagagccaggggtctgaacacagggcctgggtgccagggaaagggccaaactaggcctaggcagctctgcaagcctctctgcatggctgggggagtcagggcagagcttactttaaaaaagaatgttcgatttgatacttaaacttgaggagaggcagagagaggtctgggaactgcaccagctgggggcatggggtggagaacactgggcagagttggcccctctgtggccagcctggccctcagcccagcagagagggcatcaaccaaggaaggggccatgctggggtgctgctcagctgttacaaaggcagggtccagcctgcagggaggccccaggaggggatctggccagtcaagggtccacagggtgccagcctctcaccctcagaataaagacatcagccattcaaaaaaaaaaaagaaaaaacaaaaaaaaaaagaagaaagaagacacacaagaaaaaacaaacacgacaagaaggagtacccaaagaaaagaagcaaaaaaaaaagaagcgggcggcgggcgcacctttatgattttcacttctttacgatgcgtcagtgcctataacttatctatcatccatactacagcgtcctgcttgtttttttcatcactacgtatcgcttcgatcctttttatgcagcttgtgtattgtcttatttatgctataattccttgctgcgcagcgatgttagatttacaaatattctcgtgtgtccgggtcgcagacaatacccccgacgtcctgcgccggttccagcctacaatcatcgcacaaacaaggacagcactcaccgccatgggggcacatgacatcacccaccgcatcagcccccagcagcacatcccgccctataccacacatccctcgtaaccccatgtcccaggcgcatcacacaacatccaacacttcctgatggaaccacatgcccagtgcgaccccaccaccaccgcgttgttagc

SEQ ID NO: 349177 - DNA, 768 bp, Homo sapiens
cgacaggtagagcaagtgagcaagctctttggctaggggttccccagggctggccctgctgggagggcatgtggccctctgacaggccacggtgccatctcttcagagttgagtaatgtggagttccactgcgggagggccgaggacctggtgcccaccctggtgagcagactggcctcccagcacctcgtggccatcctggacccaccccgtgctggcttgcgtgagtggcttttgcttaaggaggtggcacgggaacgaggacacatggggtggctcaccatgttatgcactctctggctgtggggacccagctggtgtttgcctcctcagattccaaggtgatcctggccatccggagagctaagaacctcaggcggctgctgtacgtctcatgcaacccccgggcagccatgggcaactttgtggagtgagtgtctgcaggggcctgggtgggggctaggcctgctaccaagcccccagctcccacaggagcccctgattagcctatcggctgaccttagcgccccccttttccccccacagcctctgcagagccccatctaaccgggtgaagggcattcccttccggccggtcaaggctgtggcagtggacctgttcccgcagaccccgcactgtgagatgctcatcctgtttgagagggtggagcaccccaatggcacaggggtcttggggccccacagccctccagctcaacccacaccaggacccccagataacaccctacaagaaactgggaccttccc

SEQ ID NO: 349178 - DNA, 2466 bp, Homo sapiens
gccaggatcatagagacgctcggcctccgccgcacgcgctggcggactaagagtggctggcgaagcgagcggccggcgcgggcccctggcgggcgggcggtacagccccaagcctgagacccggacctgagcatcgcaggttcgagtcccgccccgcctggggcgaagccgggggtggcggcgacctcgcggcgttgcaccggctctgtgagcacctcccctctgagcacttcccttgtgacaggccacttcccttgtgacaggcccaggacgaggtggccaggcggcccccatggcgtccctggtctaggcggagaaccgcctgggcgatgagtgagaacctcgacaacgagggcccgaagcccatggagagctgtggccaggagagcagcagtgccctgagctgccctaccgtctcggtgccccctgcagccccggcagccctggaggaggtggagaaagagggcgctggggcggctacagggccggggcctcagcccgggctctacagctacatcagggatgacttgtttacctctgagatctttaaactggagctgcagaacgtgcctcgccacgccagcttcagcgacgtccggcgcttcctgggccgctttggtctgcagccccacaaaaccaaactctttgggcaaccaccctgcgcctttgtgacattccgcagcgctgcagagagggacaaggccctgcgcgttttgcatggtgccctctggaaaggccgcccactcagtgtgcgcctggcccggcccaaggccgaccccatggccaggaggaggcgacaggagggtgagagtgagccaccagtaacacgagtggccgacgtggtgacccctctatggacagtgccctatgctgagcagcttgagcggaagcagctggagtgcgagcaggtgctgcagaaacttgccaaggaaatcgggagcaccaaccgtgccttgctgccctggctgctcgagcagaggcacaagcacaacaaggcctgctgcccgctggagggggtcaggccatcaccccagcagactgagtatcgtaataagtgtgagtttctggttggcgtcggggtggatggggaggataacaccgtgggctgtcggctcggcaagtacaagggcgggacgtgtgctgtggcagccccgtttgacaccgtgcacatccccgaagccaccaagcaggtggtgaaggccttccaggagttcatccggtccactccatactcggcatacgacccagagacgtacacaggccactggaagcagctgactgtgcgcaccagccgccgccaccaggccatggccattgcctacttccacccccagaagctgagccctgaggagctggcagagctgaagacctccctagcgcagcacttcacagcagggccaggcagggccagtggagtgacctgcctctacttcgtggaggagggacagcgaaagactcctagccaggagggcctgcccctggagcatgtggctggggaccggtgcatccacgaggacctgctagggctgaccttccggatctctccacacgccttcttccaggtgaacacacccgcagccgaggtgctctacacagtcatccaggactgggcccaattggatgcggggagcatggtgctggacgtgtgctgtggcaccggcaccattggcctggccctggcccggaaggtaaagagggtcattggggtcgagctatgcccagaggctgtggaggacgcccgggtgaacgcccaggacaatgagttgagtaatgtggagttccactgcgggagggccgaggacctggtgcccaccctggtgagcagactggcctcccagcacctcgtggccatcctggacccaccccgtgctggcttgcattccaaggtgatcctggccatccggagagctaagaacctcaggcggctgctgtacgtctcatgcaacccccgggcagccatgggcaactttgtggacctctgcagagccccatctaaccgggtgaagggcattcccttccggccggtcaaggctgtggcagtggacctgttcccgcagaccccgcactgtgagatgctcatcctgtttgagagggtggagcaccccaatggcacaggggtcttggggccccacagccctccagctcaacccacaccaggacccccagataacaccctacaagaaactgggaccttcccctcatcctaggcccaggacccattatggggacaggagctgaagggctcccagggccccaggggcggggaaggcatggcttgctggccaggatattcagaggtaggcagccaaagggcacagaaccctgtgccccaccaggattggcctgctgctaggggccaggggccctgaccaggaagacaggtgggttcctgtagcctgttgcccatccccagggcctttgtggactagccaaggctgtgagggccagaataaacaactgctcaac

SEQ ID NO: 349179 - DNA, 2342 bp, Homo sapiens
gccaggatcatagagacgctcggcctccgccgcacgcgctggcggactaagagtggctggcgaagcgagcggccggcgcgggcccctggcgggcgggcggtacagccccaagcctgagacccggacctgagcatcgcaggcccaggacgaggtggccaggcggcccccatggcgtccctggtctaggcggagaaccgcctgggcgatgagtgagaacctcgacaacgagggcccgaagcccatggagagctgtggccaggagagcagcagtgccctgagctgccctaccgtctcggtgccccctgcagccccggcagccctggaggaggtggagaaagagggcgctggggcggctacagggccggggcctcagcccgggctctacagctacatcagggatgacttgtttacctctgagatctttaaactggagctgcagaacgtgcctcgccacgccagcttcagcgacgtccggcgcttcctgggccgctttggtctgcagccccacaaaaccaaactctttgggcaaccaccctgcgcctttgtgacattccgcagcgctgcagagagggacaaggccctgcgcgttttgcatggtgccctctggaaaggccgcccactcagtgtgcgcctggcccggcccaaggccgaccccatggccaggaggaggcgacaggagggtgagagtgagccaccagtaacacgagtggccgacgtggtgacccctctatggacagtgccctatgctgagcagcttgagcggaagcagctggagtgcgagcaggtgctgcagaaacttgccaaggaaatcgggagcaccaaccgtgccttgctgccctggctgctcgagcagaggcacaagcacaacaaggcctgctgcccgctggagggggtcaggccatcaccccagcagactgagtatcgtaataagtgtgagtttctggttggcgtcggggtggatggggaggataacaccgtgggctgtcggctcggcaagtacaagggcgggacgtgtgctgtggcagccccgtttgacaccgtgcacatccccgaagccaccaagcaggtggtgaaggccttccaggagttcatccggtccactccatactcggcatacgacccagagacgtacacaggccactggaagcagctgactgtgcgcaccagccgccgccaccaggccatggccattgcctacttccacccccagaagctgagccctgaggagctggcagagctgaagacctccctagcgcagcacttcacagcagggccaggcagggccagtggagtgacctgcctctacttcgtggaggagggacagcgaaagactcctagccaggagggcctgcccctggagcatgtggctggggaccggtgcatccacgaggacctgctagggctgaccttccggatctctccacacgccttcttccaggtgaacacacccgcagccgaggtgctctacacagtcatccaggactgggcccaattggatgcggggagcatggtgctggacgtgtgctgtggcaccggcaccattggcctggccctggcccggaaggtaaagagggtcattggggtcgagctatgcccagaggctgtggaggacgcccgggtgaacgcccaggacaatgagttgagtaatgtggagttccactgcgggagggccgaggacctggtgcccaccctggtgagcagactggcctcccagcacctcgtggccatcctggacccaccccgtgctggcttgcattccaaggtgatcctggccatccggagagctaagaacctcaggcggctgctgtacgtctcatgcaacccccgggcagccatgggcaactttgtggacctctgcagagccccatctaaccgggtgaagggcattcccttccggccggtcaaggctgtggcagtggacctgttcccgcagaccccgcactgtgagatgctcatcctgtttgagagggtggagcaccccaatggcacaggggtcttggggccccacagccctccagctcaacccacaccaggacccccagataacaccctacaagaaactgggaccttcccctcatcctaggcccaggacccattatggggacaggagctgaagggctcccagggccccaggggcggggaaggcatggcttgctggccaggatattcagaggtaggcagccaaagggcacagaaccctgtgccccaccaggattggcctgctgctaggggccaggggccctgaccaggaagacaggtgggttcctgtagcctgttgcccatccccagggcctttgtggactagccaaggctgtgagggccagaataaacaactgctcaac

SEQ ID NO: 349180 - DNA, 3457 bp, Homo sapiens
gccaggatcatagagacgctcggcctccgccgcacgcgctggcggactaagagtggctggcgaagcgagcggccggcgcgggcccctggcgggcgggcggtacagccccaagcctgagacccggacctgagcatcgcaggttcgagtcccgccccgcctggggcgaagccgggggtggcggcgacctcgcggcgttgcaccggctctgtgagcacctcccctctgagcacttcccttgtgacaggccacttcccttgtgacaggcccaggacgaggtggccaggcggcccccatggcgtccctggtctaggcggagaaccgcctgggcgatgagtgagaacctcgacaacgagggcccgaagcccatggagagctgtggccaggagagcagcagtgccctgagctgccctaccgtctcggtgccccctgcagccccggcagccctggaggaggtggagaaagagggcgctggggcggctacagggccggggcctcagcccgggctctacagctacatcagggatgacttgtttacctctgagatctttaaactggagctgcagaacgtgcctcgccacgccagcttcagcgacgtccggcgcttcctgggccgctttggtctgcagccccacaaaaccaaactctttgggcaaccaccctgcgcctttgtgacattccgcagcgctgcagagagggacaaggccctgcgcgttttgcatggtgccctctggaaaggccgcccactcagtgtgcgcctggcccggcccaaggccgaccccatggccaggaggaggcgacaggagggtgagagtgagccaccagtaacacgagtggccgacgtggtgacccctctatggacagtgccctatgctgagcagcttgagcggaagcagctggagtgcgagcaggtgctgcagaaacttgccaaggaaatcgggagcaccaaccgtgccttgctgccctggctgctcgagcagaggcacaagcacaacaaggcctgctgcccgctggagggggtcaggccatcaccccagcagactgagtatcgtaataagtgtgagtttctggttggcgtcggggtggatggggaggataacaccgtgggctgtcggctcggcaagtacaagggcgggacgtgtgctgtggcagccccgtttgacaccgtgcacatccccgaagccaccaagcaggtggtgaaggccttccaggagttcatccggtccactccatactcggcatacgacccagagacgtacacaggccactggaagcagctgactgtgcgcaccagccgccgccaccaggccatggccattgcctacttccacccccagaagctgagccctgaggagctggcagagctgaagacctccctagcgcagcacttcacagcagggccaggcagggccagtggagtgacctgcctctacttcgtggaggagggacagcgaaagactcctagccaggagggcctgcccctggagcatgtggctggggaccggtgcatccacgaggacctgctagggctgaccttccggatctctccacacgccttcttccaggtgaacacacccgcagccgaggtgctctacacagtcatccaggactgggcccaattggatgcggggagcatggtgctggacgtgtgctgtggcaccggcaccattggcctggccctggcccggaaggtaaagagggtcattggggtcgagctatgcccagaggctgtggaggacgcccgggtgaacgcccaggacaatgagttgagtaatgtggagttccactgcgggagggccgaggacctggtgcccaccctggtgagcagactggcctcccagcacctcgtggccatcctggacccaccccgtgctggcttgcattccaaggtgatcctggccatccggagagctaagaacctcaggcggctgctgtacgtctcatgcaacccccgggcagccatgggcaactttgtggacctctgcagagccccatctaaccgggtgaagggcattcccttccggccggtcaaggctgtggcagtggacctgttcccgcagaccccgcactgtgagatgctcatcctgtttgagagggtggagcaccccaatggcacaggggtcttggggccccacagccctccagctcaacccacaccaggacccccagataacaccctacaagaaactgggaccttcccctcatcctaggcccaggacccattatggggacaggagctgaagggctcccagggccccaggggcggggaaggcatggcttgctggccaggatattcagaggtaggcagccaaagggcacagaaccctgtgccccaccaggattggcctgctgctaggggccaggggccctgaccaggaagacaggtgggttcctgtagcctgttgcccatccccagggcctttgtggactagccaaggctgtgagggccagaataaacaactgctcaacaaagggtgtttctgtgatgagagccaggggtctgaacacagggcctgggtgccagggaaagggccaaactaggcctaggcagctctgcaagcctctctgcatggctgggggagtcagggcagagcttactttaaaaaagaatgttcgatttgatacttaaacttgaggagaggcagagagaggtctgggaactgcaccagctgggggcatggggtggagaacactgggcagagttggcccctctgtggccagcctggccctcagcccagcagagagggcatcaaccaaggaaggggccatgctggggtgctgctcagctgttacaaaggcagggtccagcctgcagggaggccccaggaggggatctggccagtcaagggtccacagggtgccagcctctcaccctcagaataaagacatcagccattcaaaaaaaaaaaagaaaaaacaaaaaaaaaaagaagaaagaagacacacaagaaaaaacaaacacgacaagaaggagtacccaaagaaaagaagcaaaaaaaaaagaagcgggcggcgggcgcacctttatgattttcacttctttacgatgcgtcagtgcctataacttatctatcatccatactacagcgtcctgcttgtttttttcatcactacgtatcgcttcgatcctttttatgcagcttgtgtattgtcttatttatgctataattccttgctgcgcagcgatgttagatttacaaatattctcgtgtgtccgggtcgcagacaatacccccgacgtcctgcgccggttccagcctacaatcatcgcacaaacaaggacagcactcaccgccatgggggcacatgacatcacccaccgcatcagcccccagcagcacatcccgccctataccacacatccctcgtaaccccatgtcccaggcgcatcacacaacatccaacacttcctgatggaaccacatgcccagtgcgaccccaccaccaccgcgttgttagc

SEQ ID NO: 349181 - DNA, 2684 bp, Homo sapiens
ggcacgaggctggaacacccacgctgacttcgccgacgagtgccccaagccagagctgctggccatccgcttcctgacccaggcacggtcgctacctgcgttgggcttcagctccatcatcggcgtgatgtagtggttggcacagatcttcagggtcttgtccctccgcatgaggaggcggatggcccctttctccttgtgcttcaggagcttgacgtcaccagtgcctcgctccttccattctgggagatcgttctcagaggcactgagtatcgtaataagtgtgagtttctggttggcgtcggggtggatggggaggataacaccgtgggctgtcggctcggcaagtacaagggcgggacgtgtgctgtggcagccccgtttgacaccgtgcacatccccgaagccaccaagcaggtggtgaaggccttccaggagttcatccggtccactccatactcggcatacgacccagagacgtacacaggccactggaagcagctgactgtgcgcaccagccgccgccaccaggccatggccattgcctacttccacccccagaagctgagccctgaggagctggcagagctgaagacctccctagcgcagcacttcacagcagggccaggcagggccagtggagtgacctgcctctacttcgtggaggagggacagcgaaagactcctagccaggagggcctgcccctggagcatgtggctggggaccggtgcatccacgaggacctgctagggctgaccttccggatctctccacacgccttcttccaggtgaacacacccgcagccgaggtgctctacacagtcatccaggactgggcccaattggatgcggggagcatggtgctggacgtgtgctgtggcaccggcaccattggcctggccctggcccggaaggtaaagagggtcattggggtcgagctatgcccagaggctgtggaggacgcccgggtgaacgcccaggacaatgagttgagtaatgtggagttccactgcgggagggccgaggacctggtgcccaccctggtgagcagactggcctcccagcacctcgtggccatcctggacccaccccgtgctggcttgcattccaaggtgatcctggccatccggagagctaagaacctcaggcggctgctgtacgtctcatgcaacccccgggcagccatgggcaactttgtggacctctgcagagccccatctaaccgggtgaagggcattcccttccggccggtcaaggctgtggcagtggacctgttcccgcagaccccgcactgtgagatgctcatcctgtttgagagggtggagcaccccaatggcacaggggtcttggggccccacagccctccagctcaacccacaccaggacccccagataacaccctacaagaaactgggaccttcccctcatcctaggcccaggacccattatggggacaggagctgaagggctcccagggccccaggggcggggaaggcatggcttgctggccaggatattcagaggtaggcagccaaagggcacagaaccctgtgccccaccaggattggcctgctgctaggggccaggggccctgaccaggaagacaggtgggttcctgtagcctgttgcccatccccagggcctttgtggactagccaaggctgtgagggccagaataaacaactgctcaacaaagggtgtttctgtgatgagagccaggggtctgaacacagggcctgggtgccagggaaagggccaaactaggcctaggcagctctgcaagcctctctgcatggctgggggagtcagggcagagcttactttaaaaaagaatgttcgatttgatacttaaacttgaggagaggcagagagaggtctgggaactgcaccagctgggggcatggggtggagaacactgggcagagttggcccctctgtggccagcctggccctcagcccagcagagagggcatcaaccaaggaaggggccatgctggggtgctgctcagctgttacaaaggcagggtccagcctgcagggaggccccaggaggggatctggccagtcaagggtccacagggtgccagcctctcaccctcagaataaagacatcagccattcaaaaaaaaaaaagaaaaaacaaaaaaaaaaagaagaaagaagacacacaagaaaaaacaaacacgacaagaaggagtacccaaagaaaagaagcaaaaaaaaaagaagcgggcggcgggcgcacctttatgattttcacttctttacgatgcgtcagtgcctataacttatctatcatccatactacagcgtcctgcttgtttttttcatcactacgtatcgcttcgatcctttttatgcagcttgtgtattgtcttatttatgctataattccttgctgcgcagcgatgttagatttacaaatattctcgtgtgtccgggtcgcagacaatacccccgacgtcctgcgccggttccagcctacaatcatcgcacaaacaaggacagcactcaccgccatgggggcacatgacatcacccaccgcatcagcccccagcagcacatcccgccctataccacacatccctcgtaaccccatgtcccaggcgcatcacacaacatccaacacttcctgatggaaccacatgcccagtgcgaccccaccaccaccgcgttgttagc

SEQ ID NO: 349182 - DNA, 956 bp, Homo sapiens
  misc_feature (931)..(931): n is a, c, g, or t
gccaggatcatagagacgctcggcctccgccgcacgcgctggcggactaagagtggctggcgaagcgagcggccggcgcgggcccctggcgggcgggcggtacagccccaagcctgagacccggacctgagcatcgcaggttcgagtcccgccccgcctggggcgaagccgggggtggcggcgacctcgcggcgttgcaccggctctgtgagcacctcccctctgagcacttcccttgtgacaggccacttcccttgtgacaggcccaggacgaggtggccaggcggcccccatggcgtccctggtctaggcggagaaccgcctgggcgatgagtgagaacctcgacaacgagggcccgaagcccatggagagctgtggccaggagagcagcagtgccctgagctgccctaccgtctcggtgccccctgcagccccggcagccctggaggaggtggacgacaagatgtgtgctgcttgagtgtgcctggtgggcttaccaatgtggccggggcctcagccctgggctctacagccttaaccatccagtgggaattgaactttttggtttacctctgagatctttaaaccttgtgaggctttgcacggaaaacctggttgcctccgcgcaaccggtccccatgggcgttttccaatggcagaccgttcctgggctgcctttacccatttggggtggcccactggcctattttggcggttccgtagcgaatgtgcgcccgcctaaaccaatagtagagcgccgaaaagaagcgtccgttttagtggtcgcaaaaagacaccgacctcgtcagttgacaatggcgcagtttatatggttggacaccgagtttttcccgtcgacaattgaccagctttggcccaggcaaagaatggggggaaccacaaatggggcccccttggcgcgccaggttntttttgccacttgggttgcccccta

SEQ ID NO: 349183 - DNA, 564 bp, Homo sapiens
ctcattttaacagcatccatttgtagagcatcactaggaattagattctgtactagacagagcctgatgcatatatgtatacatgtatatatgaatgtatataaatatatatgtgtgtgtatatatatacacacatatacaaatatactgtatgttatgtgatgcccacaaaaactctatgaagtagacactatgagccccattttgtagaggaaattccagtttagactgactacaaactttcccaagatcacagtgattgattggcagagccaggatcccactccaaagcctgtacttttctccttgttctctgctgtccctgtactaggtggattcatcaccattcattgctctaattggactttgttttctttacagggccatgctatgatagtggaagcttatccaaaataatagatccagaagaagtgacctgaagtttctgtgcaacactcacactaggcaatgccatttcaatgcattactaaatgacatttgtagttcctagctcctcttaggaaaacagttcttgtggccttctattaaatactttgcacttaa

SEQ ID NO: 349184 - DNA, 838 bp, Homo sapiens
  misc_feature (761)..(761): n is a, c, g, or t
  misc_feature (768)..(768): n is a, c, g, or t
  misc_feature (805)..(805): n is a, c, g, or t
  misc_feature (826)..(826): n is a, c, g, or t
  misc_feature (833)..(833): n is a, c, g, or t
cctttctgggcaggacccgccccttggtcccgcagagccttggtacttggacctgaaccttgctccgagagggagtcctcgcggacgtcagccaagattccagaatgactactatcttgacttacccctttaaaaatcttcccactgcatcaaaatgggccctcagattttccataagacctctgagctgttcctcccagctacgagctgccccagctgtccagaccaaaacgaagaagacgttagccaaacccaatataaggaatgttgtggtggtggatggtgttcgcactccatttttgctgtctggcacttcatataaagacctgatgccacatgatttggctagagcagcgcttacgggtttgttgcatcggaccagtgtccctaaggaagtagttgattatatcatctttggtacagttattcaggaagtgaaaacaagcaatgtggctagagaggctgcccttggagctggcttctctgacaagactcctgctcacactgtcaccatggcttgtatctctgccaaccaagccatgaccacaggtgttggcttgattgcttctggccagtgtgatgtgatcgtggcaggtggtgttgagttgatgtccgatgtccctattcgtcactcaaggaaaatgagaaaactgatgcttgatctcaataaggccaaatctatgggccagcgactgtctttaatctctaaattccgatttaatttcctagcacctgagctcccctgcggtttctgaagttcncaaccantggagaaccaaggggccaattctggcaaaaacggacngggccggcctgccctttggcngttttcnccggg

SEQ ID NO: 349185 - DNA, 1219 bp, Homo sapiens
acagacagacagacagacagacagacagacacagacagacagacagacagacagacagacacagacagacagacagacagacagacagacacagacagacagacagacagacagacagacacagacagacagacagacagacagacagacacagacagacagacagacagacagacagacacagacagacagacagacagacagacagacacagacagacagacagacagacagacagacacagacagacagacagacagacagacagacacagacagacagacagacagacagacagacacagacagacagacagacagacagacagacacagacagacagacagacagacagacagacacagacagacagacagacagacagacagacacagacagacagacagacagacagacagacacagacagacagacagacagacagacagacacagacagacagacagacagacagacagacacagacagacagacagacagacagacagacacagacagacagacagacagacagacagacacagacagacagacagacagacagacagacacagacagacagacagacagacagacagacacagacagacagacagacagacagacagacacagacagacagacagacagacagacagacacagacagacagacagacagacagacagacacagacagacagacagacagatccagaagaagtgacctgaagtttctgtgcaacactcacactaggcaatgccatttcaatgcattactaaatgacatttgtagttcctagctcctcttaggaaaacagttcttgtggccttctattaaatactttgcacttaagccttgccagtgttctgagcttttcaataatcagtttactgctctttcagggatttctaagccaccagaatctcacatgagatgtgtgggtggttgtttttggtctctgttgtcactaaagactaaatgagggtttgcagttgggaaagaggtcaactgagatttggaaatcatctttgtaatatttgcaaattatacttgttcttatctgtgtcctaaagatgtgttctctataaaatacaaaccaacgtgcctaattaattatggaaaaataattcagaatctaaacaccactgaaaacttataaaaaatgtttagatacataaatatggtggtcagcgttaataaagtggagaaatattgga

SEQ ID NO: 349186 - DNA, 670 bp, Homo sapiens
cacgagggaaactcctcggacaagattccagaatgactactatcttgacttacccctttaaaaatcttcccactgcatcaaaatgggccctcagattttccataagacctctgagctgttcctcccagctacgagctgccccagctgtccagaccaaaacgaagaagacgttagccaaacccaatataaggaatgttgtggtggtggatggtgttcgcactccatttttgctgtctggcacttcatataaataccttataccacataacttaactatatcgacccttacgactttattacatcagaccagtatccctacaaaattacttcattatatcatcttgtatacacttattcagcaattttactcctactcacactttcaccataacttatatctcttgcaaccaaccattaccaccatctttacctttattactttacccaatgtactgcatcctagcaattcttctctcatttatctcccatgaccctcattctcactcagtgtaccctctcatccttcctccttcactgaatctcagccaatctaccactcacgtctccctttactctttccatttcacttacttcctacgctctacttcctctccatgttactctccccctctctcctctctcctctttccacctctatcctttccctccg

SEQ ID NO: 349187 - DNA, 514 bp, Homo sapiens
gctttttgtaaacagtttattttgtcttccagccataagacctctgagctgttcctcccagctacgagctgccccaggtacagtaatttgtaaaataaatatttctgatttaaatgttagattccagattctatagtttgtgaactctgaataaaaaccaaaactaatttgctaattctcccctttttatgagcacatgaacatctctgttgccttcaaattaaaaaattataggtccaatcaataatgatactacattatttaggattaggcttgaggatgttaatgggaggctgttttctgggatttgaacctgctggagtcatggaggttccataaacctcgttggtcagtttatttatcctcttgctgtccgtcctggaggtgaatggcatacaaatgctcttgagacctgctatggaaccaaaagttaactttaaatttgcaatttgtgaaatgcttctctattgatgaatatcttcttctcccatgtgcaagagggcccattcctgaa

SEQ ID NO: 349188 - DNA, 2037 bp, Homo sapiens
  misc_feature (1124)..(1126): n is a, c, g, or t
  misc_feature (1129)..(1129): n is a, c, g, or t
  misc_feature (1132)..(1132): n is a, c, g, or t
  misc_feature (1153)..(1153): n is a, c, g, or t
cctttctgggcaggacccgccccttggtcccgcagagccttggtacttggacctgaaccttgctccgagagggagtcctcgcggacgtcagccaagattccagaatgactactatcttgacttacccctttaaaaatcttcccactgcatcaaaatgggccctcagattttccataagacctctgagctgttcctcccagctacgagctgccccagctgtccagaccaaaacgaagaagacgttagccaaacccaatataaggaatgttgtggtggtggatggtgttcgcactccatttttgctgtctggcacttcatataaagacctgatgccacatgatttggctagagcagcgcttacgggtttgttgcatcggaccagtgtccctaaggaagtagttgattatatcatctttggtacagttattcaggaagtgaaaacaagcaatgtggctagagaggctgcccttggagctggcttctctgacaagactcctgctcacactgtcaccatggcttgtatctctgccaaccaagccatgaccacaggtgttggcttgattgcttctggccagtgtgatgtgatcgtggcaggtggtgttgagttgatgtccgatgtccctattcgtcactcaaggaaaatgagaaaactgatgcttgatctcaataaggccaaatctatgggccagcgactgtctttaatctctaaattccgatttaatttcctagcacctgagctccctgcggtttctgagttctccaccagtgagaccatgggccactctgcagaccgactggccgctgcctttgctgtttctcggctggaacaggatgaatatgcactgcgctctcacagtctagccaagaaggcacaggatgaaggactcctttctgatgtggtacccttcaaagtaccaggaaaagatacagttaccaaagataatggcatccgtccttcctcactggagcagatggccaaactaaaacctgcattcatcaagccctacggcacagtgacagctgcaaattcttctttcttgactgatggtgcatctgcaatgttaatcatggcggaggaaaaggctctggccatgggttataagccgaaggcatatttgaggatnnntgntgngtctcggatccaagatcactnttactgggaccaacatatgctactccaaaagttctagaaaaggcaggattgaccatgaatgatattgatgcttttgaatttcatgaagctttctcgggtcagattttggcaaattttaaagccatggattctgattggtttgcagaaaactacatgggtagaaaaaccaaggttggattgcctcctttggagaagtttaataactggggtggatctctgtccctgggacacccatttggagccactggctgcaggttggtcatggctgctgccaacagattacggaaagaaggaggccagtatggcttagtggctgcgtgtgcagctggagggcagggccatgctatgatagtggaagcttatccaaaataatagatccagaagaagtgacctgaagtttctgtgcaacactcacactaggcaatgccatttcaatgcattactaaatgacatttgtagttcctagctcctcttaggaaaacagttcttgtggccttctattaaatactttgcacttaagccttgccagtgttctgagcttttcaataatcagtttactgctctttcagggatttctaagccaccagaatctcacatgagatgtgtgggtggttgtttttggtctctgttgtcactaaagactaaatgagggtttgcagttgggaaagaggtcaactgagatttggaaatcatctttgtaatatttgcaaattatacttgttcttatctgtgtcctaaagatgtgttctctataaaatacaaaccaacgtgcctaattaattatggaaaaataattcagaatctaaacaccactgaaaacttataaaaaatgtttagatacataaatatggtggtcagcgttaataaagtggagaaatattgga

SEQ ID NO: 349189 - DNA, 2724 bp, Homo sapiens
cctttctgggcaggacccgccccttggtcccgcagagccttggtacttggacctgaaccttgctccgagagggagtcctcgcggacgtcagccaagattccagaatgactactatcttgacttacccctttaaaaatcttcccactgcatcaaaatgggccctcagattttccataagacctctgagctgttcctcccagctacgagctgccccagctgtccagaccaaaacgaagaagacgttagccaaacccaatataaggaatgttgtggtggtggatggtgttcgcactccatttttgctgtctggcacttcatataaagacctgatgccacatgatttggctagagcagcgcttacgggtttgttgcatcggaccagtgtccctaaggaagtagttgattatatcatctttggtacagttattcaggaagtgaaaacaagcaatgtggctagagaggctgcccttggagctggcttctctgacaagactcctgctcacactgtcaccatggcttgtatctctgccaaccaagccatgaccacaggtgttggcttgattgcttctggccagtgtgatgtgatcgtggcaggtggtgttgagttgatgtccgatgtccctattcgtcactcaaggaaaatgagaaaactgatgcttgatctcaataaggccaaatctatgggccagcgactgtctttaatctctaaattccgatttaatttcctagcacctgagctccctgcggtttctgagttctccaccagtgagaccatgggccactctgcagaccgactggccgctgcctttgctgtttctcggctggaacaggatgaatatgcactgcgctctcacagtctagccaagaaggcacaggatgaaggactcctttctgatgtggtacccttcaaagtaccagggtgaaatgaaatgcttcatgacacttattagggagttctgaattgctcctaaaactcaaaaacatcccgagtgatttttccataagtatgttggttctgtttccaaagtattcagcctttattcttaaatatggatgcaaattttgatttatgttgtaacaataggttaacattttttaatgtttctataagagtgtccttttaagatctgagcactaatctcagcactttgggaggctgaggcaggaggatcgcttgaggccaggagttcaagaccagcctggtcaacagcgtgagacttcatctctaattaaaaaaaaaaaaaagaaaaacagagtctccttttagatcttgctgatatattttagttcttacatacatgcctgtttttaaaattcctgaatcgtctgacttctgtatagaatagccaactgtgaatgaatgtcttaagaaaatagggtgtcctatttttagtaaagcatttagatgatttcccaattgtcttttaagactttagtttaaaatttgataatatgataattataaaacactttccttctagtgaataggtaaggtttatatttcatttgtttttgtaatttttaaagcatatttctgtggagaagatatataaggcttgtggttccatagagttaaaaaaattcatttttttaatagggaaaagatacagttaccaaagataatggcatccgtccttcctcactggagcagatggccaaactaaaacctgcattcatcaagccctacggcacagtgacagctgcaaattcttctttcttgactgatggtgcatctgcaatgttaatcatggcggaggaaaaggctctggccatgggttataagccgaaggcatatttgagggattttatgtatgtgtctcaggatccaaaagatcaactattacttggaccaacatatgctactccaaaagttctagaaaaggcaggattgaccatgaatgatattgatgcttttgaatttcatgaagctttctcgggtcagattttggcaaattttaaagccatggattctgattggtttgcagaaaactacatgggtagaaaaaccaaggttggattgcctcctttggagaagtttaataactggggtggatctctgtccctgggacacccatttggagccactggctgcaggttggtcatggctgctgccaacagattacggaaagaaggaggccagtatggcttagtggctgcgtgtgcagctggagggcagggccatgctatgatagtggaagcttatccaaaataatagatccagaagaagtgacctgaagtttctgtgcaacactcacactaggcaatgccatttcaatgcattactaaatgacatttgtagttcctagctcctcttaggaaaacagttcttgtggccttctattaaatactttgcacttaagccttgccagtgttctgagcttttcaataatcagtttactgctctttcagggatttctaagccaccagaatctcacatgagatgtgtgggtggttgtttttggtctctgttgtcactaaagactaaatgagggtttgcagttgggaaagaggtcaactgagatttggaaatcatctttgtaatatttgcaaattatacttgttcttatctgtgtcctaaagatgtgttctctataaaatacaaaccaacgtgcctaattaattatggaaaaataattcagaatctaaacaccactgaaaacttataaaaaatgtttagatacataaatatggtggtcagcgttaataaagtggagaaatattgga

SEQ ID NO: 349190 - DNA, 1679 bp, Homo sapiens
cctttctgggcaggacccgccccttggtcccgcagagccttggtacttggacctgaaccttgctccgagagggagtcctcgcggacgtcagccaagattccagaatgactactatcttgacttacccctttaaaaatcttcccactgcatcaaaatgggccctcagattttccataagacctctgagctgttcctcccagctacgagctgccccagctgtccagaccaaaacgaagaagacgttagccaaacccaatataaggaatgttgtggtggtggatggtgttcgcactccatttttgctgtctggcacttcatataaagacctgatgccacatgatttggctagagcagcgcttacgggtttgttgcatcggaccagtgtccctaaggaagtagttgattatatcatctttggtacagttattcaggaagtgaaaacaagcaatgtggctagagaggctgcccttggagctggcttctctgacaagactcctgctcacactgtcaccatggcttgtatctctgccaaccaagccatgaccacaggtgttggcttgattgcttctggccagtgtgatgtgatcgtggcaggtggtgttgagttgatgtccgatgtccctattcgtcactcaaggaaaatgagaaaactgatgcttgatctcaataaggccaaatctatgggccagcgactgtctttaatctctaaattccgatttaatttcctagcacctgagctccctgcggtttctgagttctccaccagtgagaccatgggccactctgcagaccgactggccgctgcctttgctgtttctcggctggaacaggatgaatatgcactgcgctctcacagtctagccaagaaggcacaggatgaaggactcctttctgatgtggtacccttcaaagtaccaggaaaagatacagttaccaaagataatggcatccgtccttcctcactggagcagatggccaaactaaaacctgcattcatcaagccctacggcacagtgacagctgcaaattcttctttcttgactgatggtgcatctgcaatgttaatcatggcggaggaaaaggctctggccatgggttataagccgaaggcatatttgagggattttatgtatgtgtctcaggatccaaaagatcaactattacttggaccaacatatgctactccaaaagttctagaaaaggcaggattgaccatgaatgatattgatgcttttgaatttcatgaagctttctcgggtcagattttggcaaattttaaagccatggattctgattggtttgcagaaaactacatgggtagaaaaaccaaggttggattgcctcctttggagaagtttaataactggggtggatctctgtccctgggacacccatttggagccactggctgcaggttggtcatggctgctgccaacagattacggaaagaaggaggccagtatggcttagtggctgcgtgtgcagctggagggcagggccatgctatgatagtggaagcttatccaaaataatagatccagaagaagtgacctgaagtttctgtgcaacactcacactaggcaatgccatttcaatgcattactaaatgacatttgtagttcctagctcctcttaggaaaacagttcttgtggccttctattaaatactttgcacttaa

SEQ ID NO: 349191 - DNA, 2043 bp, Homo sapiens
cctttctgggcaggacccgccccttggtcccgcagagccttggtacttggacctgaaccttgctccgagagggagtcctcgcggacgtcagccaagattccagaatgactactatcttgacttacccctttaaaaatcttcccactgcatcaaaatgggccctcagattttccataagacctctgagctgttcctcccagctacgagctgccccagctgtccagaccaaaacgaagaagacgttagccaaacccaatataaggaatgttgtggtggtggatggtgttcgcactccatttttgctgtctggcacttcatataaagacctgatgccacatgatttggctagagcagcgcttacgggtttgttgcatcggaccagtgtccctaaggaagtagttgattatatcatctttggtacagttattcaggaagtgaaaacaagcaatgtggctagagaggctgcccttggagctggcttctctgacaagactcctgctcacactgtcaccatggcttgtatctctgccaaccaagccatgaccacaggtgttggcttgattgcttctggccagtgtgatgtgatcgtggcaggtggtgttgagttgatgtccgatgtccctattcgtcactcaaggaaaatgagaaaactgatgcttgatctcaataaggccaaatctatgggccagcgactgtctttaatctctaaattccgatttaatttcctagcacctgagctccctgcggtttctgagttctccaccagtgagaccatgggccactctgcagaccgactggccgctgcctttgctgtttctcggctggaacaggatgaatatgcactgcgctctcacagtctagccaagaaggcacaggatgaaggactcctttctgatgtggtacccttcaaagtaccaggaaaagatacagttaccaaagataatggcatccgtccttcctcactggagcagatggccaaactaaaacctgcattcatcaagccctacggcacagtgacagctgcaaattcttctttcttgactgatggtgcatctgcaatgttaatcatggcggaggaaaaggctctggccatgggttataagccgaaggcatatttgagggattttatgtatgtgtctcaggatccaaaagatcaactattacttggaccaacatatgctactccaaaagttctagaaaaggcaggattgaccatgaatgatattgatgcttttgaatttcatgaagctttctcgggtcagattttggcaaattttaaagccatggattctgattggtttgcagaaaactacatgggtagaaaaaccaaggttggattgcctcctttggagaagtttaataactggggtggatctctgtccctgggacacccatttggagccactggctgcaggttggtcatggctgctgccaacagattacggaaagaaggaggccagtatggcttagtggctgcgtgtgcagctggagggcagggccatgctatgatagtggaagcttatccaaaataatagatccagaagaagtgacctgaagtttctgtgcaacactcacactaggcaatgccatttcaatgcattactaaatgacatttgtagttcctagctcctcttaggaaaacagttcttgtggccttctattaaatactttgcacttaaaaaaaaaaaaaaaaaaaaaaagaagaaaaacacttgtgtggggcgcggcccgcgggcccccagaagaaaagttttctaagaacccatgcgcgttggggcgccgggggccccaagggggtaggggaacagggggacaaaagcgcggtgtgcccaagggagaaacaccgcggggccaacagaacaaagcgaggcggggggttctctccacacatgtataaaaaaaacagccggcggggggaaaacacgcggagcgttgtctggggaaaccaatttcccagaggagggactctagagaaggcacaacagcggggtctcttacaccgggagggagggtcccagaggaagctcgcgaaataaaaatagg

SEQ ID NO: 349192 - DNA, 1678 bp, Homo sapiens
  misc_feature (1124)..(1126): n is a, c, g, or t
  misc_feature (1129)..(1129): n is a, c, g, or t
  misc_feature (1132)..(1132): n is a, c, g, or t
  misc_feature (1153)..(1153): n is a, c, g, or t
cctttctgggcaggacccgccccttggtcccgcagagccttggtacttggacctgaaccttgctccgagagggagtcctcgcggacgtcagccaagattccagaatgactactatcttgacttacccctttaaaaatcttcccactgcatcaaaatgggccctcagattttccataagacctctgagctgttcctcccagctacgagctgccccagctgtccagaccaaaacgaagaagacgttagccaaacccaatataaggaatgttgtggtggtggatggtgttcgcactccatttttgctgtctggcacttcatataaagacctgatgccacatgatttggctagagcagcgcttacgggtttgttgcatcggaccagtgtccctaaggaagtagttgattatatcatctttggtacagttattcaggaagtgaaaacaagcaatgtggctagagaggctgcccttggagctggcttctctgacaagactcctgctcacactgtcaccatggcttgtatctctgccaaccaagccatgaccacaggtgttggcttgattgcttctggccagtgtgatgtgatcgtggcaggtggtgttgagttgatgtccgatgtccctattcgtcactcaaggaaaatgagaaaactgatgcttgatctcaataaggccaaatctatgggccagcgactgtctttaatctctaaattccgatttaatttcctagcacctgagctccctgcggtttctgagttctccaccagtgagaccatgggccactctgcagaccgactggccgctgcctttgctgtttctcggctggaacaggatgaatatgcactgcgctctcacagtctagccaagaaggcacaggatgaaggactcctttctgatgtggtacccttcaaagtaccaggaaaagatacagttaccaaagataatggcatccgtccttcctcactggagcagatggccaaactaaaacctgcattcatcaagccctacggcacagtgacagctgcaaattcttctttcttgactgatggtgcatctgcaatgttaatcatggcggaggaaaaggctctggccatgggttataagccgaaggcatatttgaggatnnntgntgngtctcggatccaagatcactnttactgggaccaacatatgctactccaaaagttctagaaaaggcaggattgaccatgaatgatattgatgcttttgaatttcatgaagctttctcgggtcagattttggcaaattttaaagccatggattctgattggtttgcagaaaactacatgggtagaaaaaccaaggttggattgcctcctttggagaagtttaataactggggtggatctctgtccctgggacacccatttggagccactggctgcaggttggtcatggctgctgccaacagattacggaaagaaggaggccagtatggcttagtggctgcgtgtgcagctggagggcagggccatgctatgatagtggaagcttatccaaaataatagatccagaagaagtgacctgaagtttctgtgcaacactcacactaggcaatgccatttcaatgcattactaaatgacacagtatcctatctttcgttctgaacattgactcgctcactgtttctataagctctataacagaaaaaaaaaaa

SEQ ID NO: 349193 - DNA, 1979 bp, Homo sapiens
cctttctgggcaggacccgccccttggtcccgcagagccttggtacttggacctgaaccttgctccgagagggagtcctcgcggacgtcagccaagattccagaatgactactatcttgacttacccctttaaaaatcttcccactgcatcaaaatgggccctcagattttccataagacctctgagctgttcctcccagctacgagctgccccagctgtccagaccaaaacgaagaagacgttagccaaacccaatataaggaatgttgtggtggtggatggtgttcgcactccatttttgctgtctggcacttcatataaagacctgatgccacatgatttggctagagcagcgcttacgggtttgttgcatcggaccagtgtccctaaggaagtagttgattatatcatctttggtacagttattcaggaagtgaaaacaagcaatgtggctagagaggctgcccttggagctggcttctctgacaagactcctgctcacactgtcaccatggcttgtatctctgccaaccaagccatgaccacaggtgttggcttgattgcttctggccagtgtgatgtgatcgtggcaggtggtgttgagttgatgtccgatgtccctattcgtcactcaaggaaaatgagaaaactgatgcttgatctcaataaggccaaatctatgggccagcgactgtctcagtgagaccatgggccactctgcagaccgactggccgctgcctttgctgtttctcggctggaacaggatgaatatgcactgcgctctcacagtctagccaagaaggcacaggatgaaggactcctttctgatgtggtacccttcaaagtaccaggaaaagatacagttaccaaagataatggcatccgtccttcctcactggagcagatggccaaactaaaacctgcattcatcaagccctacggcacagtgacagctgcaaattcttctttcttgactgatggtgcatctgcaatgttaatcatggcggaggaaaaggctctggccatgggttataagccgaaggcatatttgagggattttatgtatgtgtctcaggatccaaaagatcaactattacttggaccaacatatgctactccaaaagttctagaaaaggcaggattgaccatgaatgatattgatgcttttgaatttcatgaagctttctcgggtcagattttggcaaattttaaagccatggattctgattggtttgcagaaaactacatgggtagaaaaaccaaggttggattgcctcctttggagaagtttaataactggggtggatctctgtccctgggacacccatttggagccactggctgcaggttggtcatggctgctgccaacagattacggaaagaaggaggccagtatggcttagtggctgcgtgtgcagctggagggcagggccatgctatgatagtggaagcttatccaaaataatagatccagaagaagtgacctgaagtttctgtgcaacactcacactaggcaatgccatttcaatgcattactaaatgacatttgtagttcctagctcctcttaggaaaacagttcttgtggccttctattaaatactttgcacttaagccttgccagtgttctgagcttttcaataatcagtttactgctctttcagggatttctaagccaccagaatctcacatgagatgtgtgggtggttgtttttggtctctgttgtcactaaagactaaatgagggtttgcagttgggaaagaggtcaactgagatttggaaatcatctttgtaatatttgcaaattatacttgttcttatctgtgtcctaaagatgtgttctctataaaatacaaaccaacgtgcctaattaattatggaaaaataattcagaatctaaacaccactgaaaacttataaaaaatgtttagatacataaatatggtggtcagcgttaataaagtggagaaatattgga

SEQ ID NO: 349194 - DNA, 1856 bp, Homo sapiens
cctttctgggcaggacccgccccttggtcccgcagagccttggtacttggacctgaaccttgctccgagagggagtcctcgcggacgtcagccaagattccagaatgactactatcttgacttacccctttaaaaatcttcccactgcatcaaaatgggccctcagattttccataagacctctgagctgttcctcccagctacgagctgccccagctgtccagaccaaaacgaagaagacgttagccaaacccaatataaggaatgttgtggtggtggatggtgttcgcactccatttttgctgtctggcacttcatataaagacctgatgccacatgatttggctagagcagcgcttacgggtttgttgcatcggaccagtgtccctaaggaagtagttgattatatcatctttggtacagttattcaggaagtgaaaacaagcaatgtggctagagaggctgcccttggagctggcttctctgacaagactcctgctcacactgtcaccatggcttgtatctctgccaaccaagccatgaccacagctccctgcggtttctgagttctccaccagtgagaccatgggccactctgcagaccgactggccgctgcctttgctgtttctcggctggaacaggatgaatatgcactgcgctctcacagtctagccaagaaggcacaggatgaaggactcctttctgatgtggtacccttcaaagtaccaggaaaagatacagttaccaaagataatggcatccgtccttcctcactggagcagatggccaaactaaaacctgcattcatcaagccctacggcacagtgacagctgcaaattcttctttcttgactgatggtgcatctgcaatgttaatcatggcggaggaaaaggctctggccatgggttataagccgaaggcatatttgagggattttatgtatgtgtctcaggatccaaaagatcaactattacttggaccaacatatgctactccaaaagttctagaaaaggcaggattgaccatgaatgatattgatgcttttgaatttcatgaagctttctcgggtcagattttggcaaattttaaagccatggattctgattggtttgcagaaaactacatgggtagaaaaaccaaggttggattgcctcctttggagaagtttaataactggggtggatctctgtccctgggacacccatttggagccactggctgcaggttggtcatggctgctgccaacagattacggaaagaaggaggccagtatggcttagtggctgcgtgtgcagctggagggcagggccatgctatgatagtggaagcttatccaaaataatagatccagaagaagtgacctgaagtttctgtgcaacactcacactaggcaatgccatttcaatgcattactaaatgacatttgtagttcctagctcctcttaggaaaacagttcttgtggccttctattaaatactttgcacttaagccttgccagtgttctgagcttttcaataatcagtttactgctctttcagggatttctaagccaccagaatctcacatgagatgtgtgggtggttgtttttggtctctgttgtcactaaagactaaatgagggtttgcagttgggaaagaggtcaactgagatttggaaatcatctttgtaatatttgcaaattatacttgttcttatctgtgtcctaaagatgtgttctctataaaatacaaaccaacgtgcctaattaattatggaaaaataattcagaatctaaacaccactgaaaacttataaaaaatgtttagatacataaatatggtggtcagcgttaataaagtggagaaatattgga

SEQ ID NO: 349195 - DNA, 1675 bp, Homo sapiens
cctttctgggcaggacccgccccttggtcccgcagagccttggtacttggacctgaaccttgctccgagagggagtcctcgcggacgtcagccaagattccagaatgactactatcttgacttacccctttaaaaatcttcccactgcatcaaaatgggccctcagattttccataagacctctgagctgttcctcccagctacgagctgccccagctgtccagaccaaaacgaagaagacgttagccaaacccaatataaggaatgttgtggtggtggatggtgttcgcactccatttttgctgtctggcacttcatataaagacctgatgccacatgatttggctagagcagcgcttacgggtttgttgcatcggaccagtgtccctaaggaagtagttgattatatcatctttggtacagttattcaggaagtgaaaacaagcaatgtggctagagaggctgcccttggagctggcttctctgacaagactcctgctcacactgtcaccatggcttgtatctctgccaaccaagccatgaccacaggaaaagatacagttaccaaagataatggcatccgtccttcctcactggagcagatggccaaactaaaacctgcattcatcaagccctacggcacagtgacagctgcaaattcttctttcttgactgatggtgcatctgcaatgttaatcatggcggaggaaaaggctctggccatgggttataagccgaaggcatatttgagggattttatgtatgtgtctcaggatccaaaagatcaactattacttggaccaacatatgctactccaaaagttctagaaaaggcaggattgaccatgaatgatattgatgcttttgaatttcatgaagctttctcgggtcagattttggcaaattttaaagccatggattctgattggtttgcagaaaactacatgggtagaaaaaccaaggttggattgcctcctttggagaagtttaataactggggtggatctctgtccctgggacacccatttggagccactggctgcaggttggtcatggctgctgccaacagattacggaaagaaggaggccagtatggcttagtggctgcgtgtgcagctggagggcagggccatgctatgatagtggaagcttatccaaaataatagatccagaagaagtgacctgaagtttctgtgcaacactcacactaggcaatgccatttcaatgcattactaaatgacatttgtagttcctagctcctcttaggaaaacagttcttgtggccttctattaaatactttgcacttaagccttgccagtgttctgagcttttcaataatcagtttactgctctttcagggatttctaagccaccagaatctcacatgagatgtgtgggtggttgtttttggtctctgttgtcactaaagactaaatgagggtttgcagttgggaaagaggtcaactgagatttggaaatcatctttgtaatatttgcaaattatacttgttcttatctgtgtcctaaagatgtgttctctataaaatacaaaccaacgtgcctaattaattatggaaaaataattcagaatctaaacaccactgaaaacttataaaaaatgtttagatacataaatatggtggtcagcgttaataaagtggagaaatattgga

SEQ ID NO: 349196 - DNA, 2127 bp, Homo sapiens
cctttctgggcaggacccgccccttggtcccgcagagccttggtacttggacctgaaccttgctccgagagggagtcctcgcggacgtcagccaagattccagaatgactactatcttgacttacccctttaaaaatcttcccactgcatcaaaatgggccctcagattttccataagacctctgagctgttcctcccagctacgagctgccccagagagagaatctgaccaacacagttgatcacttgtaggtagatgacactggtttctggttggctcctatatggatggatcattgctgtccagaccaaaacgaagaagacgttagccaaacccaatataaggaatgttgtggtggtggatggtgttcgcactccatttttgctgtctggcacttcatataaagacctgatgccacatgatttggctagagcagcgcttacgggtttgttgcatcggaccagtgtccctaaggaagtagttgattatatcatctttggtacagttattcaggaagtgaaaacaagcaatgtggctagagaggctgcccttggagctggcttctctgacaagactcctgctcacactgtcaccatggcttgtatctctgccaaccaagccatgaccacaggtgttggcttgattgcttctggccagtgtgatgtgatcgtggcaggtggtgttgagttgatgtccgatgtccctattcgtcactcaaggaaaatgagaaaactgatgcttgatctcaataaggccaaatctatgggccagcgactgtctttaatctctaaattccgatttaatttcctagcacctgagctccctgcggtttctgagttctccaccagtgagaccatgggccactctgcagaccgactggccgctgcctttgctgtttctcggctggaacaggatgaatatgcactgcgctctcacagtctagccaagaaggcacaggatgaaggactcctttctgatgtggtacccttcaaagtaccaggaaaagatacagttaccaaagataatggcatccgtccttcctcactggagcagatggccaaactaaaacctgcattcatcaagccctacggcacagtgacagctgcaaattcttctttcttgactgatggtgcatctgcaatgttaatcatggcggaggaaaaggctctggccatgggttataagccgaaggcatatttgagggattttatgtatgtgtctcaggatccaaaagatcaactattacttggaccaacatatgctactccaaaagttctagaaaaggcaggattgaccatgaatgatattgatgcttttgaatttcatgaagctttctcgggtcagattttggcaaattttaaagccatggattctgattggtttgcagaaaactacatgggtagaaaaaccaaggttggattgcctcctttggagaagtttaataactggggtggatctctgtccctgggacacccatttggagccactggctgcaggttggtcatggctgctgccaacagattacggaaagaaggaggccagtatggcttagtggctgcgtgtgcagctggagggcagggccatgctatgatagtggaagcttatccaaaataatagatccagaagaagtgacctgaagtttctgtgcaacactcacactaggcaatgccatttcaatgcattactaaatgacatttgtagttcctagctcctcttaggaaaacagttcttgtggccttctattaaatactttgcacttaagccttgccagtgttctgagcttttcaataatcagtttactgctctttcagggatttctaagccaccagaatctcacatgagatgtgtgggtggttgtttttggtctctgttgtcactaaagactaaatgagggtttgcagttgggaaagaggtcaactgagatttggaaatcatctttgtaatatttgcaaattatacttgttcttatctgtgtcctaaagatgtgttctctataaaatacaaaccaacgtgcctaattaattatggaaaaataattcagaatctaaacaccactgaaaacttataaaaaatgtttagatacataaatatggtggtcagcgttaataaagtggagaaatattgga

SEQ ID NO: 349197 - DNA, 1999 bp, Homo sapiens
cctttctgggcaggacccgccccttggtcccgcagagccttggtacttggacctgaaccttgctccgagagggagtcctcgcggacgtcagccaagattccagaatgactactatcttgacttacccctttaaaaatcttcccactgcatcaaaatgggccctcagattttccataagacctctgagctgttcctcccagctacgagctgccccagctgtccagaccaaaacgaagaagacgttagccaaacccaatataaggaatgttgtggtggtggatggtgttcgcactccatttttgctgtctggcacttcgggtttgttgcatcggaccagtgtccctaaggaagtagttgattatatcatctttggtacagttattcaggaagtgaaaacaagcaatgtggctagagaggctgcccttggagctggcttctctgacaagactcctgctcacactgtcaccatggcttgtatctctgccaaccaagccatgaccacaggtgttggcttgattgcttctggccagtgtgatgtgatcgtggcaggtggtgttgagttgatgtccgatgtccctattcgtcactcaaggaaaatgagaaaactgatgcttgatctcaataaggccaaatctatgggccagcgactgtctttaatctctaaattccgatttaatttcctagcacctgagctccctgcggtttctgagttctccaccagtgagaccatgggccactctgcagaccgactggccgctgcctttgctgtttctcggctggaacaggatgaatatgcactgcgctctcacagtctagccaagaaggcacaggatgaaggactcctttctgatgtggtacccttcaaagtaccaggaaaagatacagttaccaaagataatggcatccgtccttcctcactggagcagatggccaaactaaaacctgcattcatcaagccctacggcacagtgacagctgcaaattcttctttcttgactgatggtgcatctgcaatgttaatcatggcggaggaaaaggctctggccatgggttataagccgaaggcatatttgagggattttatgtatgtgtctcaggatccaaaagatcaactattacttggaccaacatatgctactccaaaagttctagaaaaggcaggattgaccatgaatgatattgatgcttttgaatttcatgaagctttctcgggtcagattttggcaaattttaaagccatggattctgattggtttgcagaaaactacatgggtagaaaaaccaaggttggattgcctcctttggagaagtttaataactggggtggatctctgtccctgggacacccatttggagccactggctgcaggttggtcatggctgctgccaacagattacggaaagaaggaggccagtatggcttagtggctgcgtgtgcagctggagggcagggccatgctatgatagtggaagcttatccaaaataatagatccagaagaagtgacctgaagtttctgtgcaacactcacactaggcaatgccatttcaatgcattactaaatgacatttgtagttcctagctcctcttaggaaaacagttcttgtggccttctattaaatactttgcacttaagccttgccagtgttctgagcttttcaataatcagtttactgctctttcagggatttctaagccaccagaatctcacatgagatgtgtgggtggttgtttttggtctctgttgtcactaaagactaaatgagggtttgcagttgggaaagaggtcaactgagatttggaaatcatctttgtaatatttgcaaattatacttgttcttatctgtgtcctaaagatgtgttctctataaaatacaaaccaacgtgcctaattaattatggaaaaataattcagaatctaaacaccactgaaaacttataaaaaatgtttagatacataaatatggtggtcagcgttaataaagtggagaaatattgga

SEQ ID NO: 349198 - DNA, 1982 bp, Homo sapiens
cctttctgggcaggacccgccccttggtcccgcagagccttggtacttggacctgaaccttgctccgagagggagtcctcgcggacgtcagccaagattccagaatgactactatcttgacttacccctttaaaaatcttcccactgcatcaaaatgggccctcagattttccataagacctctgagctgttcctcccagctacgagctgccccaggatggtgttcgcactccatttttgctgtctggcacttcatataaagacctgatgccacatgatttggctagagcagcgcttacgggtttgttgcatcggaccagtgtccctaaggaagtagttgattatatcatctttggtacagttattcaggaagtgaaaacaagcaatgtggctagagaggctgcccttggagctggcttctctgacaagactcctgctcacactgtcaccatggcttgtatctctgccaaccaagccatgaccacaggtgttggcttgattgcttctggccagtgtgatgtgatcgtggcaggtggtgttgagttgatgtccgatgtccctattcgtcactcaaggaaaatgagaaaactgatgcttgatctcaataaggccaaatctatgggccagcgactgtctttaatctctaaattccgatttaatttcctagcacctgagctccctgcggtttctgagttctccaccagtgagaccatgggccactctgcagaccgactggccgctgcctttgctgtttctcggctggaacaggatgaatatgcactgcgctctcacagtctagccaagaaggcacaggatgaaggactcctttctgatgtggtacccttcaaagtaccaggaaaagatacagttaccaaagataatggcatccgtccttcctcactggagcagatggccaaactaaaacctgcattcatcaagccctacggcacagtgacagctgcaaattcttctttcttgactgatggtgcatctgcaatgttaatcatggcggaggaaaaggctctggccatgggttataagccgaaggcatatttgagggattttatgtatgtgtctcaggatccaaaagatcaactattacttggaccaacatatgctactccaaaagttctagaaaaggcaggattgaccatgaatgatattgatgcttttgaatttcatgaagctttctcgggtcagattttggcaaattttaaagccatggattctgattggtttgcagaaaactacatgggtagaaaaaccaaggttggattgcctcctttggagaagtttaataactggggtggatctctgtccctgggacacccatttggagccactggctgcaggttggtcatggctgctgccaacagattacggaaagaaggaggccagtatggcttagtggctgcgtgtgcagctggagggcagggccatgctatgatagtggaagcttatccaaaataatagatccagaagaagtgacctgaagtttctgtgcaacactcacactaggcaatgccatttcaatgcattactaaatgacatttgtagttcctagctcctcttaggaaaacagttcttgtggccttctattaaatactttgcacttaagccttgccagtgttctgagcttttcaataatcagtttactgctctttcagggatttctaagccaccagaatctcacatgagatgtgtgggtggttgtttttggtctctgttgtcactaaagactaaatgagggtttgcagttgggaaagaggtcaactgagatttggaaatcatctttgtaatatttgcaaattatacttgttcttatctgtgtcctaaagatgtgttctctataaaatacaaaccaacgtgcctaattaattatggaaaaataattcagaatctaaacaccactgaaaacttataaaaaatgtttagatacataaatatggtggtcagcgttaataaagtggagaaatattgga

SEQ ID NO: 349199 - DNA, 322 bp, Homo sapiens
attattagatgaagaatagttgataagattaagttttaatgttttctagtagccatggatgaggttatcagagttcatagactacaatgtaaactacaaattgttcagctaatccaggatatacttttgttcttctctttttagattccagaatgactactatcttgacttacccctttaaaaatcttcccactgcatcaaaatgggccctcagattttgtaagtttattattatttttttatttttagagattggatttggatttataaacatctcgcacagatactgaatggtattgctttttgtaaacagtttattttg

SEQ ID NO: 349200 - DNA, 2044 bp, Homo sapiens
cctttctgggcaggacccgccccttggtcccgcagagccttggtacttggacctgaaccttgctccgagagggagtcctcgcggacgtcagccaagattccagaatgactactatcttgacttacccctttaaaaatcttcccactgcatcaaaatgggccctcagattttccataagacctctgagctgttcctcccagctacgagctgccccagctgtccagaccaaaacgaagaagacgttagccaaacccaatataaggaatgttgtggtggtggatggtgttcgcactccatttttgctgtctggcacttcatataaagacctgatgccacatgatttggctagagcagcgcttacgggtttgttgcatcggaccagtgtccctaaggaagtagttgattatatcatctttggtacagttattcaggaagtgaaaacaagcaatgtggctagagaggctgcccttggagctggcttctctgacaagactcctgctcacactgtcaccatggcttgtatctctgccaaccaagccatgaccacaggtgttggcttgattgcttctggccagtgtgatgtgatcgtggcaggtggtgttgagttgatgtccgatgtccctattcgtcactcaaggaaaatgagaaaactgatgcttgatctcaataaggccaaatctatgggccagcgactgtctttaatctctaaattccgatttaatttcctagcacctgagctccctgcggtttctgagttctccaccagtgagaccatgggccactctgcagaccgactggccgctgcctttgctgtttctcggctggaacaggatgaatatgcactgcgctctcacagtctagccaagaaggcacaggatgaaggactcctttctgatgtggtacccttcaaagtaccaggaaaagatacagttaccaaagataatggcatccgtccttcctcactggagcagatggccaaactaaaacctgcattcatcaagccctacggcacagtgacagctgcaaattcttctttcttgactgatggtgcatctgcaatgttaatcatggcggaggaaaaggctctggccatgggttataagccgaaggcatatttgagggattttatgtatgtgtctcaggatccaaaagatcaactattacttggaccaacatatgctactccaaaagttctagaaaaggcaggattgaccatgaatgatattgatgcttttgaatttcatgaagctttctcgggtcagattttggcaaattttaaagccatggattctgattggtttgcagaaaactacatgggtagaaaaaccaaggttggattgcctcctttggagaagtttaataactggggtggatctctgtccctgggacacccatttggagccactggctgcaggttggtcatggctgctgccaacagattacggaaagaaggaggccagtatggcttagtggctgcgtgtgcagctggagggcagggccatgctatgatagtggaagcttatccaaaataatagatccagaagaagtgacctgaagtttctgtgcaacactcacactaggcaatgccatttcaatgcattactaaatgacatttgtagttcctagctcctcttaggaaaacagttcttgtggccttctattaaatactttgcacttaagccttgccagtgttctgagcttttcaataatcagtttactgctctttcagggatttctaagccaccagaatctcacatgagatgtgtgggtggttgtttttggtctctgttgtcactaaagactaaatgagggtttgcagttgggaaagaggtcaactgagatttggaaatcatctttgtaatatttgcaaattatacttgttcttatctgtgtcctaaagatgtgttctctataaaatacaaaccaacgtgcctaattaattatggaaaaataattcagaatctaaacaccactgaaaacttataaaaaatgtttagatacataaatatggtggtcagcgttaataaagtggagaaatattgga

SEQ ID NO: 349201 - DNA, 2089 bp, Homo sapiens
cctttctgggcaggacccgccccttggtcccgcagagccttggtacttggacctgaaccttgctccgagagggagtcctcgcggacgtcagccaagattccagaatgactactatcttgacttacccctttaaaaatcttcccactgcatcaaaatgggccctcagattttccataagacctctgagctgttcctcccagctacgagctgccccagctgtccagaccaaaacgaagaagacgttagccaaacccaatataaggaatgttgtggtggtggatggtgttcgcactccatttttgctgtctggcacttcatataaagacctgatgccacatgatttggctagagcagcgcttacgggtttgttgcatcggaccagtgtccctaaggaagtagttgattatatcatctttggtacagttattcaggaagtgaaaacaagcaatgtggctagagaggctgcccttggagctggcttctctgacaagactcctgctcacactgtcaccatggcttgtatctctgccaaccaagccatgaccacaggtgttggcttgattgcttctggccagtgtgatgtgatcgtggcaggtggtgttgagttgatgtccgatgtccctattcgtcactcaaggaaaatgagaaaactgatgcttgatctcaataaggccaaatctatgggccagcgactgtctttaatctctaaattccgatttaatttcctagcacctgagctccctgcggtttctgagttctccaccagtgagaccatgggccactctgcagaccgactggccgctgcctttgctgtttctcggctggaacaggatgaatatgcactgcgctctcacagtctagccaagaaggcacaggatgaaggactcctttctgatgtggtacccttcaaagtaccaggaaaagatacagttaccaaagataatggcatccgtccttcctcactggagcagatggccaaactaaaacctgcattcatcaagccctacggcacagtgacagctgcaaattcttctttcttgactgatggtgcatctgcaatgttaatcatggcggaggaaaaggctctggccatgggttataagccgaaggcatatttgagggattttatgtatgtgtctcaggatccaaaagatcaactattacttggaccaacatatgctactccaaaagttctagaaaaggcaggattgaccatgaatgatattgatgcttttgaatttcatgaagctttctcgggtcagattttggcaaattttaaagccatggattctgattggtttgcagaaaactacatgggtagaaaaaccaaggttggattgcctcctttggagaagtttaataactggggtggatctctgtccctgggacacccatttggagccactggctgcaggttggtcatggctgctgccaacagattacggaaagaaggaggccagtatggcttagtggctgcgtgtgcagctggagggcagggccatgctatgatagtggaagcttatccaaaataatagatccagaagaagtgacctgaagtttctgtgcaacactcacactaggcaatgccatttcaatgcattactaaatgacatttgtagttcctagctcctcttaggaaaacagttcttgtggccttctattaaatactttgcacttaagccttgccagtgttctgagcttttcaataatcagtttactgctctttcagggatttctaagccaccagaatctcacatgagatgtgtgggtggttgtttttggtctctgttgtcactaaagactaaatgagggtttgcagttgggaaagaggtcaactgagatttggaaatcatctttgtaatatttgcaaattatacttgttcttatctgtgtcctaaagatgtgttctctataaaatacaaaccaacgtgcctaattaattatggaaaaataattcagaatctaaacaccactgaaaacttataaaaaatgtttagatacataaatatggtggtcagcgttaataaagtggagaaatattggaaaaaaaaaagtacataaaataaataaagtaaaaaaagggaaaaag

SEQ ID NO: 349202 - DNA, 1981 bp, Homo sapiens
cctttctgggcaggacccgccccttggtcccgcagagccttggtacttggacctgaaccttgctccgagagggagtcctcgcggacgtcagccaagattccagaatgactactatcttgacttacccctttaaaaatcttcccactgcatcaaaatgggccctcagattttccataagacctctgagctgttcctcccagctacgagctgccccagctgtccagaccaaaacgaagaagacgttagccaaacccaatataaggaatgttgtggtggtggatggtgttcgcactccatttttgctgtctggcacttcatataaagacctgatgccacatgatttggctagagcagcgcttacgggtttgttgcatcggaccagtgtccctaaggaagtagttgattatatcatctttggtacagttattcaggaagtgaaaacaagcaatgtggctagagaggctgcccttggagctggcttctctgacaagactcctgctcacactgtcaccatggcttgtatctctgccaaccaagccatgaccacaggtgttggcttgattgcttctggccagtgtgatgtgatcgtggcaggtggtgttgagttgatgtccgatgtccctattcgtcactcaaggaaaatgagaaaactgatgcttgatctcaataaggccaaatctatgggccagcgactgtctttaatctctaaattccgatttaatttcctagcacctgagctccctgcggtttctgagttctccaccagtgagaccatgggccactctgcagaccgactggccgctgcctttgctgtttctcggctggaacaggatgaatatgcactgcgctctcacagtctagccaagaaggcacaggatgaaggactcctttctgatgtggtacccttcaaagtaccaggaaaagatacagttaccaaagataatggcatccgtccttcctcactggagcagatggccactgatggtgcatctgcaatgttaatcatggcggaggaaaaggctctggccatgggttataagccgaaggcatatttgagggattttatgtatgtgtctcaggatccaaaagatcaactattacttggaccaacatatgctactccaaaagttctagaaaaggcaggattgaccatgaatgatattgatgcttttgaatttcatgaagctttctcgggtcagattttggcaaattttaaagccatggattctgattggtttgcagaaaactacatgggtagaaaaaccaaggttggattgcctcctttggagaagtttaataactggggtggatctctgtccctgggacacccatttggagccactggctgcaggttggtcatggctgctgccaacagattacggaaagaaggaggccagtatggcttagtggctgcgtgtgcagctggagggcagggccatgctatgatagtggaagcttatccaaaataatagatccagaagaagtgacctgaagtttctgtgcaacactcacactaggcaatgccatttcaatgcattactaaatgacatttgtagttcctagctcctcttaggaaaacagttcttgtggccttctattaaatactttgcacttaagccttgccagtgttctgagcttttcaataatcagtttactgctctttcagggatttctaagccaccagaatctcacatgagatgtgtgggtggttgtttttggtctctgttgtcactaaagactaaatgagggtttgcagttgggaaagaggtcaactgagatttggaaatcatctttgtaatatttgcaaattatacttgttcttatctgtgtcctaaagatgtgttctctataaaatacaaaccaacgtgcctaattaattatggaaaaataattcagaatctaaacaccactgaaaacttataaaaaatgtttagatacataaatatggtggtcagcgttaataaagtggagaaatattgga

SEQ ID NO: 349203 - DNA, 1999 bp, Homo sapiens
cctttctgggcaggacccgccccttggtcccgcagagccttggtacttggacctgaaccttgctccgagagggagtcctcgcggacgtcagccaagattccagaatgactactatcttgacttacccctttaaaaatcttcccactgcatcaaaatgggccctcagattttccataagacctctgagctgttcctcccagctacgagctgccccagctgtccagaccaaaacgaagaagacgttagccaaacccaatataaggaatgttgtggtggtggatggtgttcgcactccatttttgctgtctggcacttcatataaagacctgatgccacatgatttggctagagcagcgcttacgggtttgttgcatcggaccagtgtccctaaggaagtagttgattatatcatctttggtacagttattcaggaagtgaaaacaagcaatgtggctagagaggctgcccttggagctggcttctctgacaagactcctgctcacactgtcaccatggcttgtatctctgccaaccaagccatgaccacaggtgttggcttgattgcttctggccagtgtgatgtgatcgtggcaggtggtgttgagttgatgtccgatgtccctattcgtcactcaaggaaaatgagaaaactgatgcttgatctcaataaggccaaatctatgggccagcgactgtctttaatctctaaattccgatttaatttcctagcacctgagctccctgcggtttctgagttctccaccagtgagaccatgggccactctgcagaccgactggccgctgcctttgctgtttctcggctggaacaggatgaatatgcactgcgctctcacagtctagccaagaaggcacaggatgaaggactcctttctgatgtggtacccttcaaagtaccaggaaaagatacagttaccaaagataatggcatccgtccttcctcactggagcagatggccaaactaaaacctgcattcatcaagccctacggcacagtgacagctgcaaattcttctttcttgactgatggtgcatctgcaatgttaatcatggcggaggaaaaggctctggccatgggttataagccgaaggcatatttgagggattttatgtatgtgtctcaggatccaaaagatcaactattacttggaccaacatatgctactccaaaagttctagaaaaggcaggattgaccatgaatgatattgatgcttttgaatttcatgaagctttctcgggtcagattttggcaaattttaaagccatggattctgattggtttgcagaaaactacatgggtagaaaaaccaaggttggattgcctcctttggagaagtttaataactggggtggatctctgtccctgggacacccatttggagccactggctgcaggttggtcatggctgctgccaacagattacggaaagaaggaggccagtatggcttagtggctgcgtgtgcagctggagggcagggccatgctatgatagtggaagcttatccaaaataataggcaatgccatttcaatgcattactaaatgacatttgtagttcctagctcctcttaggaaaacagttcttgtggccttctattaaatactttgcacttaagccttgccagtgttctgagcttttcaataatcagtttactgctctttcagggatttctaagccaccagaatctcacatgagatgtgtgggtggttgtttttggtctctgttgtcactaaagactaaatgagggtttgcagttgggaaagaggtcaactgagatttggaaatcatctttgtaatatttgcaaattatacttgttcttatctgtgtcctaaagatgtgttctctataaaatacaaaccaacgtgcctaattaattatggaaaaataattcagaatctaaacaccactgaaaacttataaaaaatgtttagatacataaatatggtggtcagcgttaataaagtggagaaatattgga

SEQ ID NO: 349204 - DNA, 1266 bp, Homo sapiens
cctttctgggcaggacccgccccttggtcccgcagagccttggtacttggacctgaaccttgctccgagagggagtcctcgcggacgtcagccaagattccagaatgactactatcttgacttacccctttaaaaatcttcccactgcatcaaaatgggccctcagattttccataagacctctgagctgttcctcccagctacgagctgccccagctgtccagaccaaaacgaagaagacgttagccaaacccaatataaggaatgttgtggtggtggatggtgttcgcactccatttttgctgtctggcacttcatataaagacctgatgccacatgatttggctagagcagcgcttacgggtttgttgcatcggaccagtgtccctaaggaagtagttgattatatcatctttggtacagttattcaggaagtgaaaacaagcaatgtggctagagaggctgcccttggagctggcttctctgacaagactcctgctcacactgtcaccatggcttgtatctctgccaaccaagccatgaccacaggtgttggcttgattgcttctggccagtgtgatgtgatcgtggcaggtggtgttgagttgatgtccgatgtccctattcgtcactcaaggaaaatgagaaaactgatgcttgatctcaataaggccaaatctatgggccagcgactgtctttaatctctaaattccgatttaatttcctagcacctgagctccctgcggtttctgagttctccaccagtgagaccatgggccactctgcagaccgactggccgctgcctttgctgtttctcggctggaacaggatgaatatgcactgcgctctcacagtctagccaagaaggcacaggatgaaggactcctttctgatgtggtacccttcaaagtaccaggaaaagatacagttaccaaagataatggcatccgtccttcctcactggagcagatggccaaactaaaacctgcattcatcaagccctacggcacagtgacagctgcaaattcttctttcttgactgatggtgcatctgcaatgttaatcatggcggaggaaaaggctctggccatgggttataagccgaaggcatatttgagggattttatgtatgtgtctcaggatccaaaagatcaactattacttggaccaacatatgcttctccaaaggaggcaatccaaccttggtttttctacccatgtagttttctgcaaaccaatcagaatccatggctttaagtcgacc

SEQ ID NO: 349205 - DNA, 1864 bp, Homo sapiens
cctttctgggcaggacccgccccttggtcccgcagagccttggtacttggacctgaaccttgctccgagagggagtcctcgcggacgtcagccaagattccagaatgactactatcttgacttacccctttaaaaatcttcccactgcatcaaaatgggccctcagattttccataagacctctgagctgttcctcccagctacgagctgccccagctgtccagaccaaaacgaagaagacgttagccaaacccaatataaggaatgttgtggtggtggatggtgttcgcactccatttttgctgtctggcacttcatataaagacctgatgccacatgatttggctagagcagcgcttacgggtttgttgcatcggaccagtgtccctaaggaagtagttgattatatcatctttggtacagttattcaggaagtgaaaacaagcaatgtggctagagaggctgcccttggagctggcttctctgacaagactcctgctcacactgtcaccatggcttgtatctctgccaaccaagccatgaccacaggtgttggcttgattgcttctggccagtgtgatgtgatcgtggcaggtggtgttgagttgatgtccgatgtccctattcgtcactcaaggaaaatgagaaaactgatgcttgatctcaataaggccaaatctatgggccagcgactgtctttaatctctaaattccgatttaatttcctagcacctgagctccctgcggtttctgagttctccaccagtgagaccatgggccactctgcagaccgactggccgctgcctttgctgtttctcggctggaacaggatgaatatgcactgcgctctcacagtctagccaagaaggcacaggatgaaggactcctttctgatgtggtacccttcaaagtaccagggtgaaatgaaatgcttcatgacacttattagggagttctgaattgctcctaaaactcaaaaacatcccgagtgatttttccataagtatgttggttctgtttccaaagtattcagcctttattcttaaatatggatgcaaattttgatttatgttgtaacaataggttaacattttttaatgtttctataagagtgtccttttaagatctgagcactaatctcagcactttgggaggctgaggcaggaggatcgcttgaggccaggagttcaagaccagcctggtcaacagcgtgagacttcatctctaattaaaaaaaaaaaaaagaaaaacagagtctccttttagatcttgctgatatattttagttcttacatacatgcctgtttttaaaattcctgaatcgtctgacttctgtatagaatagccaactgtgaatgaatgtcttaagaaaatagggtgtcctatttttagtaaagcatttagatgatttcccaattgtcttttaagactttagtttaaaatttgataatatgataattataaaacactttccttctagtgaataggtaaggtttatatttcatttgtttttgtaatttttaaagcatatttctgtggagaagatatataaggcttgtggttccatagagttaaaaaaattcatttttttaatagggaaaagatacagttaccaaagataatggcatccgtccttcctcactggagcagatggccaaactaaaacctgcattcatcaagccctacggcacagtgacagctgcaaattcttctttcttggtaactgtcaatgttatttgtatttagtagtgacttttctatttctgtactctctgtagaaaagcctaatataactttttgtgtgtgttatgaatagagggttaaaaatatagttattcattttaatgtgaaagtggagtcatt

SEQ ID NO: 349206 - DNA, 1989 bp, Homo sapiens
cctttctgggcaggacccgccccttggtcccgcagagccttggtacttggacctgaaccttgctccgagagggagtcctcgcggacgtcagccaagattccagaatgactactatcttgacttacccctttaaaaatcttcccactgcatcaaaatgggccctcagattttccataagacctctgagctgttcctcccagctacgagctgccccagctgtccagaccaaaacgaagaagacgttagccaaacccaatataaggaatgttgtggtggtggatggtgttcgcactccatttttgctgtctggcacttcatataaagacctgatgccacatgatttggctagagcagcgcttacgggtttgttgcatcggaccagtgtccctaaggaagtagttgattatatcatctttggtacagttattcaggaagtgaaaacaagcaatgtggctagagaggctgcccttggagctggcttctctgacaagactcctgctcacactgtcaccatggcttgtatctctgccaaccaagccatgaccacaggtgttggcttgattgcttctggccagtgtgatgtgatcgtggcaggtggtgttgagttgatgtccgatgtccctattcgtcactcaaggaaaatttaatctctaaattccgatttaatttcctagcacctgagctccctgcggtttctgagttctccaccagtgagaccatgggccactctgcagaccgactggccgctgcctttgctgtttctcggctggaacaggatgaatatgcactgcgctctcacagtctagccaagaaggcacaggatgaaggactcctttctgatgtggtacccttcaaagtaccaggaaaagatacagttaccaaagataatggcatccgtccttcctcactggagcagatggccaaactaaaacctgcattcatcaagccctacggcacagtgacagctgcaaattcttctttcttgactgatggtgcatctgcaatgttaatcatggcggaggaaaaggctctggccatgggttataagccgaaggcatatttgagggattttatgtatgtgtctcaggatccaaaagatcaactattacttggaccaacatatgctactccaaaagttctagaaaaggcaggattgaccatgaatgatattgatgcttttgaatttcatgaagctttctcgggtcagattttggcaaattttaaagccatggattctgattggtttgcagaaaactacatgggtagaaaaaccaaggttggattgcctcctttggagaagtttaataactggggtggatctctgtccctgggacacccatttggagccactggctgcaggttggtcatggctgctgccaacagattacggaaagaaggaggccagtatggcttagtggctgcgtgtgcagctggagggcagggccatgctatgatagtggaagcttatccaaaataatagatccagaagaagtgacctgaagtttctgtgcaacactcacactaggcaatgccatttcaatgcattactaaatgacatttgtagttcctagctcctcttaggaaaacagttcttgtggccttctattaaatactttgcacttaagccttgccagtgttctgagcttttcaataatcagtttactgctctttcagggatttctaagccaccagaatctcacatgagatgtgtgggtggttgtttttggtctctgttgtcactaaagactaaatgagggtttgcagttgggaaagaggtcaactgagatttggaaatcatctttgtaatatttgcaaattatacttgttcttatctgtgtcctaaagatgtgttctctataaaatacaaaccaacgtgcctaattaattatggaaaaataattcagaatctaaacaccactgaaaacttataaaaaatgtttagatacataaatatggtggtcagcgttaataaagtggagaaatattgga

SEQ ID NO: 349207 - DNA, 1982 bp, Homo sapiens
agttgagggagcggaaggaaactcctcggacaagattccagaatgactactatcttgacttacccctttaaaaatcttcccactgcatcaaaatgggccctcagattttccataagacctctgagctgttcctcccagctacgagctgccccagctgtccagaccaaaacgaagaagacgttagccaaacccaatataaggaatgttgtggtggtggatggtgttcgcactccatttttgctgtctggcacttcatataaagacctgatgccacatgatttggctagagcagcgcttacgggtttgttgcatcggaccagtgtccctaaggaagtagttgattatatcatctttggtacagttattcaggaagtgaaaacaagcaatgtggctagagaggctgcccttggagctggcttctctgacaagactcctgctcacactgtcaccatggcttgtatctctgccaaccaagccatgaccacaggtgttggcttgattgcttctggccagtgtgatgtgatcgtggcaggtggtgttgagttgatgtccgatgtccctattcgtcactcaaggaaaatgagaaaactgatgcttgatctcaataaggccaaatctatgggccagcgactgtctttaatctctaaattccgatttaatttcctagcacctgagctccctgcggtttctgagttctccaccagtgagaccatgggccactctgcagaccgactggccgctgcctttgctgtttctcggctggaacaggatgaatatgcactgcgctctcacagtctagccaagaaggcacaggatgaaggactcctttctgatgtggtacccttcaaagtaccaggaaaagatacagttaccaaagataatggcatccgtccttcctcactggagcagatggccaaactaaaacctgcattcatcaagccctacggcacagtgacagctgcaaattcttctttcttgactgatggtgcatctgcaatgttaatcatggcggaggaaaaggctctggccatgggttataagccgaaggcatatttgagggattttatgtatgtgtctcaggatccaaaagatcaactattacttggaccaacatatgctactccaaaagttctagaaaaggcaggattgaccatgaatgatattgatgcttttgaatttcatgaagctttctcgggtcagattttggcaaattttaaagccatggattctgattggtttgcagaaaactacatgggtagaaaaaccaaggttggattgcctcctttggagaagtttaataactggggtggatctctgtccctgggacacccatttggagccactggctgcaggttggtcatggctgctgccaacagattacggaaagaaggaggccagtatggcttagtggctgcgtgtgcagctggagggcagggccatgctatgatagtggaagcttatccaaaataatagatccagaagaagtgacctgaagtttctgtgcaacactcacactaggcaatgccatttcaatgcattactaaatgacatttgtagttcctagctcctcttaggaaaacagttcttgtggccttctattaaatactttgcacttaagccttgccagtgttctgagcttttcaataatcagtttactgctctttcagggatttctaagccaccagaatctcacatgagatgtgtgggtggttgtttttggtctctgttgtcactaaagactaaatgagggtttgcagttgggaaagaggtcaactgagatttggaaatcatctttgtaatatttgcaaattatacttgttcttatctgtgtcctaaagatgtgttctctataaaatacaaaccaacgtgcctaattaattatggaaaaataattcagaatctaaacaccactgaaaacttataaaaaatgtttagatacataaatatggtggtcagcgttaataaagtggagaaatattgga

SEQ ID NO: 349208 - DNA, 2271 bp, Homo sapiens
gtctcacatattccctcagccttctcattgtagggacatcacaaagctaagggttttttggtgtagtaatggaccctcaagttaaggatgagaaggtttgtgtgtactacagctggaaaggtgttaggaaccaagcaagcagctctaggggccagctactttgtctcacacaccacatggtatgtccctttcctggtctttctgcttctatcattcttcattctggctggcttatttgctcacttatggtttacaaactctggcttacgaatgacatcagtttaccatcaacctgttcttcctcatggcatctttttagcttcaactaattggcatttctttccatgcttctttgcctagagagagaatctgaccaacacagttgatcacttgtaggtagatgacactggtttctggttggctcctatatggatggatcattgctgtccagaccaaaacgaagaagacgttagccaaacccaatataaggaatgttgtggtggtggatggtgttcgcactccatttttgctgtctggcacttcatataaagacctgatgccacatgatttggctagagcagcgcttacgggtttgttgcatcggaccagtgtccctaaggaagtagttgattatatcatctttggtacagttattcaggaagtgaaaacaagcaatgtggctagagaggctgcccttggagctggcttctctgacaagactcctgctcacactgtcaccatggcttgtatctctgccaaccaagccatgaccacaggtgttggcttgattgcttctggccagtgtgatgtgatcgtggcaggtggtgttgagttgatgtccgatgtccctattcgtcactcaaggaaaatgagaaaactgatgcttgatctcaataaggccaaatctatgggccagcgactgtctttaatctctaaattccgatttaatttcctagcacctgagctccctgcggtttctgagttctccaccagtgagaccatgggccactctgcagaccgactggccgctgcctttgctgtttctcggctggaacaggatgaatatgcactgcgctctcacagtctagccaagaaggcacaggatgaaggactcctttctgatgtggtacccttcaaagtaccaggaaaagatacagttaccaaagataatggcatccgtccttcctcactggagcagatggccaaactaaaacctgcattcatcaagccctacggcacagtgacagctgcaaattcttctttcttgactgatggtgcatctgcaatgttaatcatggcggaggaaaaggctctggccatgggttataagccgaaggcatatttgagggattttatgtatgtgtctcaggatccaaaagatcaactattacttggaccaacatatgctactccaaaagttctagaaaaggcaggattgaccatgaatgatattgatgcttttgaatttcatgaagctttctcgggtcagattttggcaaattttaaagccatggattctgattggtttgcagaaaactacatgggtagaaaaaccaaggttggattgcctcctttggagaagtttaataactggggtggatctctgtccctgggacacccatttggagccactggctgcaggttggtcatggctgctgccaacagattacggaaagaaggaggccagtatggcttagtggctgcgtgtgcagctggagggcagggccatgctatgatagtggaagcttatccaaaataatagatccagaagaagtgacctgaagtttctgtgcaacactcacactaggcaatgccatttcaatgcattactaaatgacatttgtagttcctagctcctcttaggaaaacagttcttgtggccttctattaaatactttgcacttaagccttgccagtgttctgagcttttcaataatcagtttactgctctttcagggatttctaagccaccagaatctcacatgagatgtgtgggtggttgtttttggtctctgttgtcactaaagactaaatgagggtttgcagttgggaaagaggtcaactgagatttggaaatcatctttgtaatatttgcaaattatacttgttcttatctgtgtcctaaagatgtgttctctataaaatacaaaccaacgtgcctaattaattatggaaaaataattcagaatctaaacaccactgaaaacttataaaaaatgtttagatacataaatatggtggtcagcgttaataaagtggagaaatattgga

SEQ ID NO: 349209 - DNA, 1684 bp, Homo sapiens
gacaatagagcatccccgactacatacttccggaagtagttgattatatcatctttggtacagttattcaggaagtgaaaacaagcaatgtggctagagaggctgcccttggagctggcttctctgacaagactcctgctcacactgtcaccatggcttgtatctctgccaaccaagccatgaccacaggtgttggcttgattgcttctggccagtgtgatgtgatcgtggcaggtggtgttgagttgatgtccgatgtccctattcgtcactcaaggaaaatgagaaaactgatgcttgatctcaataaggccaaatctatgggccagcgactgtctttaatctctaaattccgatttaatttcctagcacctgagctccctgcggtttctgagttctccaccagtgagaccatgggccactctgcagaccgactggccgctgcctttgctgtttctcggctggaacaggatgaatatgcactgcgctctcacagtctagccaagaaggcacaggatgaaggactcctttctgatgtggtacccttcaaagtaccaggaaaagatacagttaccaaagataatggcatccgtccttcctcactggagcagatggccaaactaaaacctgcattcatcaagccctacggcacagtgacagctgcaaattcttctttcttgactgatggtgcatctgcaatgttaatcatggcggaggaaaaggctctggccatgggttataagccgaaggcatatttgagggattttatgtatgtgtctcaggatccaaaagatcaactattacttggaccaacatatgctactccaaaagttctagaaaaggcaggattgaccatgaatgatattgatgcttttgaatttcatgaagctttctcgggtcagattttggcaaattttaaagccatggattctgattggtttgcagaaaactacatgggtagaaaaaccaaggttggattgcctcctttggagaagtttaataactggggtggatctctgtccctgggacacccatttggagccactggctgcaggttggtcatggctgctgccaacagattacggaaagaaggaggccagtatggcttagtggctgcgtgtgcagctggagggcagggccatgctatgatagtggaagcttatccaaaataatagatccagaagaagtgacctgaagtttctgtgcaacactcacactaggcaatgccatttcaatgcattactaaatgacatttgtagttcctagctcctcttaggaaaacagttcttgtggccttctattaaatactttgcacttaagccttgccagtgttctgagcttttcaataatcagtttactgctctttcagggatttctaagccaccagaatctcacatgagatgtgtgggtggttgtttttggtctctgttgtcactaaagactaaatgagggtttgcagttgggaaagaggtcaactgagatttggaaatcatctttgtaatatttgcaaattatacttgttcttatctgtgtcctaaagatgtgttctctataaaatacaaaccaacgtgcctaattaattatggaaaaataattcagaatctaaacaccactgaaaacttataaaaaatgtttagatacataaatatggtggtcagcgttaataaagtggagaaatattgga

SEQ ID NO: 349210 - DNA, 1399 bp, Homo sapiens
gacctggagctgctgcataacaatatctggcatttacacaacgaggcctctgctccggacactgttctgaggcttgacccgtccttaagaacctaggacaaccctgtgcggtgggttttatccttaactccattatacaggccagagaactgagccagggtggagatgttccactgagaagaagccacatggctctccgccggctctcaagccaaaaacagttccgaaaatctgggcggggagcgggccagagagcgctggggctctgcccccagcaccccctccacgcagacgactcggtaactgggttgcaggcccgcggctgcggagtgcgcaggcgcgccgagatggccgcgctcctggccgcctagagccggagcggcccgcggagctgcggaggcagccatggtcggggcgctgtgcggctgctggttccgcctgggcggggcccgcccgctcatcccgttgggcccgactgtggtacagacctccatgagccggtcccaggtagccctgctgggcctgagtctgctgctcatgctcctactgtatgtggggctgccaggcccccctgagcagacttcctgcctctggggagaccccaatgtcacagtcctggctggtctcacccctggcaactcgcccatcttttaccgcgaggtgctcccactcaaccaggcacacagggtggaggtggtgctgcttcatggaaaggcctttaactctcacacgtgggagcagctgggcacactgcagctactgtcacagaggggctaccgggccgtggcccttgaccttccaggttttgggaactcggcaccttcaaaggaggcaagcacagaggcagggcgggcagcgctgctggagcgggcgctgcgggacctggaggtacagaatgccgtgttggtgagcccctcgctgagtggccactatgccctgcccttcctgatgcgaggccaccaccagctacatggatttgtgcccatcgcacccacctccacccagaactacacccaggagcaattctgggctgtgaagactccaacccttatcctgtatggagagctggaccacatcctggctcgagagtcactgcggcagctccgccacctgcccaaccactctgtggtgaagctacgcaatgcaggccatgcctgttacctccacaagccgcaagacttccaccttgtcctgcttgccttccttgaccatctaccttgaactaacccactcccagctcccagcctggcatgagcttggacagtctggaccgccaccctccctgaaccagggagacagcctctgggattggaggccagaggccagggtcagacccagccaggactcctcatttcatctcacagacacaataaaaaagcatatttgtcctgcctgggaa

SEQ ID NO: 349211 - DNA, 1163 bp, Homo sapiens
gacctggagctgctgcataacaatatctggcatttacacaacgaggcctctgctccggacactgttctgaggcttgacccgtccttaagaacctaggacaaccctgtgcggtgggttttatccttaactccattatacaggccagagaactgagccagggtggagatgttccactgagaagaagccacatggctctccgccggctctcaagccaaaaacagttccgaaaatctgggcggggagcgggccagagagcgctggggctctgcccccagcaccccctccacgcagacgactcggtaactgggttgcaggcccgcggctgcggagtgcgcaggcgcgccgagatggccgcgctcctggccgcctagagccggagcggcccgcggagctgcggaggcagccatggtcggggcgctgtgcggctgctggttccgcctgggcggggcccgcccgctcatcccgttgggcccgactgtggtacagacctccatgagccggtcccaggtagccctgctgggcctgagtctgctgctcatgctcctactgtatgtggggctgccaggcccccctgagcagacttcctgcctctggggagaccccaatgtcacagtcctggctggtctcacccctggcaactcgcccatcttttaccgcgaggtgctcccactcaaccaggcacacagggtggaggtggtgctgcttcatggaaaggcctttaactctcacacgtgggagcagctgggcacactgcagctactgtcacagaggggctaccgggccgtggcccttgaccttccagactccaacccttatcctgtatggagagctggaccacatcctggctcgagagtcactgcggcagctccgccacctgcccaaccactctgtggtgaagctacgcaatgcaggccatgcctgttacctccacaagccgcaagacttccaccttgtcctgcttgccttccttgaccatctaccttgaactaacccactcccagctcccagcctggcatgagcttggacagtctggaccgccaccctccctgaaccagggagacagcctctgggattggaggccagaggccagggtcagacccagccaggactcctcatttcatctcacagacacaataaaaaagcatatttgtcctgcctgggaa

SEQ ID NO: 349212 - DNA, 1047 bp, Homo sapiens
gacctggagctgctgcataacaatatctggcatttacacaacgaggcctctgctccggacactgttctgaggcttgacccgtccttaagaacctaggacaaccctgtgcggtgggttttatccttaactccattatacaggccagagaactgagccagggtggagatgttccactgagaagaagccacatggctctccgccggctctcaagccaaaaacagttccgaaaatctgggcggggagcgggccagagagcgctggggctctgcccccagcaccccctccacgcagacgactcggtaactgggttgcaggcccgcggctgcggagtgcgcaggcgcgccgagatggccgcgctcctggccgcctagagccggagcggcccgcggagctgcggaggcagccatggtcggggcgctgtgcggctgctggttccgcctgggcggggcccgcccgctcatcccgttgggcccgactgtggtacagacctccatgagccggtcccaggtagccctgctgggcctgagtctgctgctcatgctcctactgtatgtggggctgccaggcccccctgagcagacttcctgcctctggggagaccccaatgtcacagtcctggctggtctcacccctggcaactcgcccatcttttaccgcgaggtgctcccactcaaccaggcacacagactccaacccttatcctgtatggagagctggaccacatcctggctcgagagtcactgcggcagctccgccacctgcccaaccactctgtggtgaagctacgcaatgcaggccatgcctgttacctccacaagccgcaagacttccaccttgtcctgcttgccttccttgaccatctaccttgaactaacccactcccagctcccagcctggcatgagcttggacagtctggaccgccaccctccctgaaccagggagacagcctctgggattggaggccagaggccagggtcagacccagccaggactcctcatttcatctcacagacacaataaaaaagcatatttgtcctgcctgggaa

SEQ ID NO: 349213 - DNA, 1152 bp, Homo sapiens
gacctggagctgctgcataacaatatctggcatttacacaacgaggcctctgctccggacactgttctgaggcttgacccgtccttaagaacctaggacaaccctgtgcggtgggttttatccttaactccattatacaggccagagaactgagccagggtggagatgttccactgagaagaagccacatggctctccgccggctctcaagccaaaaacagttccgaaaatctgggcggggagcgggccagagagcgctggggctctgcccccagcaccccctccacgcagacgactcggtaactgggttgcaggcccgcggctgcggagtgcgcaggcgcgccgagatggccgcgctcctggccgcctagagccggagcggcccgcggagctgcggaggcagccatggtcggggcgctgtgcggctgctggttccgcctgggcggggcccgcccgctcatcccgttgggcccgactgtggtacagacctccatgagccggtcccaggtagccctgctgggcctgagtctgctgctcatgctcctactgtatgtggggctgccaggcccccctgagcagacttcctgcctctggggagaccccaatgtcacagtcctggctggtctcacccctggcaactcgcccatcttttaccgcgaggtgctcccactcaaccaggcacacagggtggaggtggtgctgcttcatggaaaggcctttaactctcacacgtgggagcagctgggcacactgcagctactgtcacagaggggctaccgggccgtggcccttgaccttccaggttttgggaactcggcaccttcaaaggaggcaagcacagaggcagggcgggcagcgctgctggagcgggcgctgcgggacctggaggtacagaatgccgtgttggtgagcccctcgctgagtggccactatgccctgcccttcctgatgcgaggccaccaccagctacatggatttgtgcccatcgcacccacctccacccagaactacacccaggagcaattctgggctgtgaaggtactgggagaaggatctcaaaggtcctggcaccctgtctgtggcttgggggggttcaggactcaagtcttacttggagggacatggccttatccctgaccttggatggaagag

SEQ ID NO: 349214 - DNA, 1115 bp, Homo sapiens
aagagaagatgtctcgctctgtcgtccaggctggagtgcagtggcgcaatcatggatcactgcagccttgaccttcctgggctcaagtgatcctcccggctcacccccagtagctggaaccacaggcgcgcttccacaccggaaagcccattttctagaggcggaaaccgaagcgcccagtgggaaaggcgacccgccggggatgcggggtgctcaacgcgctgccacctggggcccaacgcgttgacctcgcggtcaggttgcttccgcggactacggttctggctcgctagctctggaagggagcaccgggagggaatggtggcaactcccaaggaggggacccagggatccgagaaaggaagacttggggtaggtggggttggattttgactggagagaagaaagggtcaggagtgcagggcgggtacctggggagctgcgtggactcgcgcagacgggaagcaggcgcgtgctggcggtgacctggggccggaggaggaacgctgggaagaggccgggccccatccagcgggggcggggactgggccgtgctccggggcgccctcttgtggccacaagctcgcagcgtccatagactccgctaaactcgttctcacagcggcgtcagtttcccaaagcctctcggtctcacatgccccaaacgcggtgctgagcacggtttcgaactcttcagcgacctgccccacatggacatggagcagtctgaggaggaaagttccttcgggatcgcatccttgctgctgtcttcctgctccccatcccccttatccccagcttgaactgcccagggcaacttgttggcctggcacggagttgaggcccgacaggtttgagtgcgaggctccgccagtgtccagccaagtggccttgatcgttttcccaatgcccccgagcctgtttcctgccagtagagcgggtcagatgttgccaacctctgcagagtagcaataagcagtaaacgccacgctctgcacagcctcccagtgctgggcctggtcgccacgcggagccttgggctgggacaggccagacgttggtaacacatcgccaaccagggcaggcgccatgagtagacgtgaacgagcccaggg

SEQ ID NO: 349215 - DNA, 1318 bp, Homo sapiens
cccaaaccctgcccagaagcctgccccttaagtacctggcaggtcaatggccacagcccggtagccagcctgggccagcctgtgcagtgtacccaggttctgccaggtctcggaggagaagcgaataccatgcagcagcagtacagagaagcgagcctgcccactgccgggcagggcctctcggaagaagagggcctggccctgcacctggatggtgccctcgcgctgctccacgcttgctgccatgcctgctgctgctgtgctggtgaagggcctgtggttcaaaaccacgatgatgaggggccacagaacaccctgcccagggtggcagtcccagaggagcagcaaggaagcctccaggaggtttccagaactttaagaacatgccttgggactgtggtacagacctccatgagccggtcccaggtagccctgctgggcctgagtctgctgctcatgctcctactgtatgtggggctgccaggcccccctgagcagacttcctgcctctggggagaccccaatgtcacagtcctggctggtctcacccctggcaactcgcccatcttttaccgcgaggtgctcccactcaaccaggcacacagggtggaggtggtgctgcttcatggaaaggcctttaactctcacacgtgggagcagctgggcacactgcagctactgtcacagaggggctaccgggccgtggcccttgaccttccaggttttgggaactcggcaccttcaaaggaggcaagcacagaggcagggcgggcagcgctgctggagcgggcgctgcgggacctggaggtacagaatgccgtgttggtgagcccctcgctgagtggccactatgccctgcccttcctgatgcgaggccaccaccagctacatggatttgtgcccatcgcacccacctccacccagaactacacccaggagcaattctgggctgtgaagactccaacccttatcctgtatggagagctggaccacatcctggctcgagagtcactgcggcagctccgccacctgcccaaccactctgtggtgaagctacgcaatgcaggccatgcctgttacctccacaagccgcaagacttccaccttgtcctgcttgccttccttgaccatctaccttgaactaacccactcccagctcccagcctggcatgagcttggacagtctggaccgccaccctccctgaaccagggagacagcctctgggattggaggccagaggccagggtcagacccagccaggactcctcatttcatctcacagacacaataaaaaagcatatttgtcctgcctgggaa

SEQ ID NO: 349216 - DNA, 1288 bp, Homo sapiens
gacctggagctgctgcataacaatatctggcatttacacaacgaggcctctgctccggacactgttctgaggcttgacccgtccttaagaacctaggacaaccctgtgcggtgggttttatccttaactccattatacaggccagagaactgagccagggtggagatgttccactgagaagaagccacatggctctccgccggctctcaagccaaaaacagttccgaaaatctgggcggggagcgggccagagagcgctggggctctgcccccagcaccccctccacgcagacgactcggtaactgggttgcaggcccgcggctgcggagtgcgcaggcgcgccgagatggccgcgctcctggccgcctagagccggagcggcccgcggagctgcggaggcagccatggtcggggcgctgtgcggctgctggttccgcctgggcggggcccgcccgctcatcccgttgggcccgactgtggtacagacctccatgagccggtcccaggtagccctgctgggcctgagtctgctgctcatgctcctactgtatgtggggctgccaggcccccctgagcagacttcctgcctctggggagaccccaatgtcacagtcctggctggtctcacccctggcaactcgcccatcttttaccgcgaggtgctcccactcaaccaggcacacagggtggaggtggtgctgcttcatggaaaggcctttaactctcacacgtgggagcagctgggcacactgcagctactgtcacagaggggctaccgggccgtggcccttgaccttccaggttttgggaactcggcaccttcaaaggaggcaagcacagaggcagggcgggcagcgctgctggagcgggcgctgcgggacctggaggtacagaactacacccaggagcaattctgggctgtgaagactccaacccttatcctgtatggagagctggaccacatcctggctcgagagtcactgcggcagctccgccacctgcccaaccactctgtggtgaagctacgcaatgcaggccatgcctgttacctccacaagccgcaagacttccaccttgtcctgcttgccttccttgaccatctaccttgaactaacccactcccagctcccagcctggcatgagcttggacagtctggaccgccaccctccctgaaccagggagacagcctctgggattggaggccagaggccagggtcagacccagccaggactcctcatttcatctcacagacacaataaaaaagcatatttgtcctgcctgggaa

SEQ ID NO: 349217 - DNA, 507 bp, Homo sapiens
cccaaaccctgcccagaagcctgccccttaagtacctggcaggtcaatggccacagcccggtagccagcctgggccagcctgtgcagtgtacccaggttctgccaggtctcggaggagaagcgaataccatgcagcagcagtacagagaagcgagcctgcccactgccgggcagggcctctcggaagaagagggcctggccctgcacctggatggtgccctcgcgctgctccacgcttgctgccatgcctgctgctgctgtgctggtgaagggcctgtggttcaaaaccacgatgatgaggggccacagaacaccctgcccagggtggcagtcccagaggagcagcaaggaagcctccaggaggtttccagaactttaagaacatgccttggggtcaggaggacataggtgttatttctgcctctgccatttactttagtgtgtaacctggggcctcagcttcttgatctgaaatatgggaacaataaagccaacttcaagaattag

SEQ ID NO: 349218 - DNA, 1297 bp, Homo sapiens
aagagaagatgtctcgctctgtcgtccaggctggagtgcagtggcgcaatcatggatcactgcagccttgaccttcctgggctcaagtgatcctcccggctcacccccagtagctggaaccacaggcgcgcttccacaccggaaagcccattttctagaggcggaaaccgaagcgcccagtgggaaaggcgacccgccggggatgcggggtgctcaacgcgctgccacctggggcccaacgcgttgacctcgcggtcaggttgcttccgcggactacggttctggctcgctagctctggaagggagcaccgggagggaatggtggcaactcccaaggaggggacccagggatccgagaaaggaagacttgggactgtggtacagacctccatgagccggtcccaggtagccctgctgggcctgagtctgctgctcatgctcctactgtatgtggggctgccaggcccccctgagcagacttcctgcctctggggagaccccaatgtcacagtcctggctggtctcacccctggcaactcgcccatcttttaccgcgaggtgctcccactcaaccaggcacacagggtggaggtggtgctgcttcatggaaaggcctttaactctcacacgtgggagcagctgggcacactgcagctactgtcacagaggggctaccgggccgtggcccttgaccttccaggttttgggaactcggcaccttcaaaggaggcaagcacagaggcagggcgggcagcgctgctggagcgggcgctgcgggacctggaggtacagaatgccgtgttggtgagcccctcgctgagtggccactatgccctgcccttcctgatgcgaggccaccaccagctacatggatttgtgcccatcgcacccacctccacccagaactacacccaggagcaattctgggctgtgaagactccaacccttatcctgtatggagagctggaccacatcctggctcgagagtcactgcggcagctccgccacctgcccaaccactctgtggtgaagctacgcaatgcaggccatgcctgttacctccacaagccgcaagacttccaccttgtcctgcttgccttccttgaccatctaccttgaactaacccactcccagctcccagcctggcatgagcttggacagtctggaccgccaccctccctgaaccagggagacagcctctgggattggaggccagaggccagggtcagacccagccaggactcctcatttcatctcacagacacaataaaaaagcatatttgtcctgcctgggaa

SEQ ID NO: 349219 - DNA, 1016 bp, Homo sapiens
gacctggagctgctgcataacaatatctggcatttacacaacgaggcctctgctccggacactgttctgaggcttgacccgtccttaagaacctaggacaaccctgtgcggtgggttttatccttaactccattatacaggccagagaactgagccagggtggagatgttccactgagaagaagccacatggctctccgccggctctcaagccaaaaacagttccgaaaatctgggcggggagcgggccagagagcgctggggctctgcccccagcaccccctccacgcagacgactcggtaactgggttgcaggcccgcggctgcggagtgcgcaggcgcgccgagatggccgcgctcctggccgcctagagccggagcggcccgcggagctgcggaggcagccatggtcggggcgctgtgcggctgctggttccgcctgggcggggcccgcccgctcatcccgttgggcccgactgtggtacagacctccatgagccggtcccaggtagccctgctgggcctgagtctgctgctcatgctcctactgtatgtggggctgccaggcccccctgagcagacttcctgcctctggggagaccccaatgtcacagtcctggctggtctcacccctggcaactcgcccatcttttaccgcgaggtgctcccactcaaccaggcacacagggtggaggtggtgctgcttcatggaaaggcctttaactctcacacgtgggagcagctgggcacactgcagctactgtcacagaggggctaccgggccgtggcccttgaccttccagcttgtcctgcttgccttccttgaccatctaccttgaactaacccactcccagctcccagcctggcatgagcttggacagtctggaccgccaccctccctgaaccagggagacagcctctgggattggaggccagaggccagggtcagacccagccaggactcctcatttcatctcacagacacaataaaaaagcatatttgtcctgcctgggaa

SEQ ID NO: 349220 - DNA, 3215 bp, Homo sapiens
aggtgtctgacccccgaagttcacggttcgcagggggtgggggagttgttaaccggaggggcagccgcagtcgcgcggattgagcgggctcgcggcgctgggttcctggtctccgggccagggcaatgttccgcacggcagtgatgatggcggccagcctggcgctgaccggggctgtggtggctcacgcctactacctcaaacaccagttctaccccactgtggtgtacctgaccaagtccagccccagcatggcagtcctgtacatccaggcctttgtccttgtcttccttctgggcaaggtgatgggcaaggtgttctttgggcaactgagggcagcagagatggagcaccttctggaacgttcctggtacgccgtcacagagacttgtctggccttcaccgtttttcgggatgacttcagcccccgctttgttgcactcttcactcttcttctcttcctcaaatgtttccactggctggctgaggaccgtgtggacttttatgccatcctgatgacgatggtgctcaccatcttcatcaagtatgtgctgcactccgtggacctccagagtgagaacccctgggacaacaaggctgtgtacatgctctacacagagctgtttacaggcttcatcaaggttctgctgtacatggccttcatgaccatcatgatcaaggtgcacaccttcccactctttgccatccggcccatgtacctggccatgagacagttcaagaaagctgtgacagatgccatcatgtctcgccgagccatccgcaacatgaacaccctgtatccagatgccaccccagaggagctccaggcaatggacaatgtctgcatcatctgccgagaagagatggtgactggtgccaagagactgccctgcaaccacattttccataccagctgcctgcgctcctggttccagcggcagcagacctgccccacctgccgtatggatgtccttcgtgcatcgctgccagcgcagtcaccaccacccccggagcctgcggatcaggggccaccccctgccccccaccccccaccactcttgcctcagccccccaacttcccccagggcctcctgcctccttttcctccaggcatgttcccactgtggccccccatgggcccctttccacctgtcccgcctccccccagctcaggagaggctgtggctcctccatccaccagtgcagccctttctcggcccagtggagcagctacaaccacagctgctggcaccagtgctactgctgcttctgccacagcatctggcccaggctctggctctgccccagaggctggccctgcccctggtttccccttccctcctccctggatgggtatgcccctgcctccaccctttgccttccccccaatgcctgtgccccctgcgggctttgctgggctgaccccagaggagctacgagctctggagggccatgagcggcagcacctggaggcccggctgcagagcctgcgtaacatccacacactgctggacgccgccatgctgcagatcaaccagtacctcaccgtgctggcctccttggggcccccccggcctgccacttcagtcaactccactgaggagactgccactacagttgttgctgctgcctcctccaccagcatccctagctcagaggccacgaccccaaccccaggagcctccccaccagcccctgaaatggaaaggcctccagctcctgagtcagtgggcacagaggagatgcctgaggatggagagcccgatgcagcagagctccgccggcgccgcctgcagaagctggagtctcctgttgcccactgacactgccccagcccagccccagcctctgctcttttgagcagccctcgctggaacatgtcctgccaccaagtgccagctccctctctgtctgcaccagggagtagtacccccagctctgagaaagaggcggcatcccctaggccaagtggaaagaggctggggttcccatttgactccagtcccaggcagccatggggatctcgggtcagttccagccttcctctccaactcttcagccctgtgttctgctggggccatgaaggcagaaggtttagcctctgagaagccctcttcttcccccacccctttccaggagaaggggctgcccctccaagccctacttgtatgtgcggagtcacactgcagtgccgaacagtattagctcccgttcccaagtgtggactccagaggggctggaggcaagctatgaacttgctcgctggcccacccctaagactggtacccatttccttttcttaccctgatctccccagaagcctcttgtggtggtggctgtgccccctatgccctgtggcatttctgcgtcttactggcaaccacacaactcagggaaaggaatgcctgggagtgggggtgcaggcgggcagcactgagggaccctgccccgcccctccccccaggcccctttcccctgcagcttctcaagtgagactgacctgtctcacccagcagccactgcccagccgcactccaggcaagggccagtgcgcctgctcctgaccactgcaatcccagcgcccaaggaaggccacttctcaactggcagaacttctgaagtttagaattggaattacttccttactagtgtcttttggcttaaattttgtcttttgaagttgaatgcttaatcccgggaaagaggaacaggagtgccagactcctggtctttccagtttagaaaaggctctgtgccaaggagggaccacaggagctgggacctgcctgcccctgtcttttccccttggttttgtgttacaagagttgttggagacagtttcagatgattatttaatttgtaaatattgtacaaattttaatagcttaaattgtatatacagccaaataaaaacttgcattaacaattggtggggtttgtgtcacagaatcgatcaaatcagtgtcgggctccttgctgtggctgtacacttgaaaatggaatggaatctccaggagtgagggtttccatggaagccagcactatccttggggacaccactgaccattaacagattaggaagatgtgcccattttacacacagagaagcagcccagagttcagtgccctgcttcagggcagagaccaagttggggagtcaggaactgaaagctgtcttagccagtttgggggcagggtggggtctcaggcctttg

SEQ ID NO: 349221 - DNA, 581 bp, Homo sapiens
gcatagggggcacagccaccaccacaagaggcttctggggagatcagggtaaggaaaggaatgcctgggagtgggggtgcaggcgggcagcactgagggaccctgccccgcccctccccccaggcccctttcccctgcagcttctcaagtgagactgacctgtctcacccagcagccactgcccagccgcactccaggcaagggccagtgcgcctgctcctgaccactgcaatcccagcgcccaaggaaggccacttctcaactggcagaacttctgaagtttagaattggaattacttccttactagtgtcttttggcttaaattttgtcttttgaagttgaatgcttaatcccgggaaagaggaacaggagtgccagactcctggtctttccagtttagaaaaggctctgtgccaaggagggaccacaggagctgggacctgcctgcccctgtcttttccccttggttttgtgttacaagagttgttggagacagtttcagatgattatttaatttgtaaatattgtacaaattttaatagcttaaattgtatatacagccaaataaaaacttgcatta

SEQ ID NO: 349222 - DNA, 780 bp, Homo sapiens
aggtgtctgacccccgaagttcacggttcgcagggggtgggggagttgttaaccggaggggcagccgcagtcgcgcggattgagcgggctcgcggcgctgggttcctggtctccgggccagggcaatgttccgcacggcagtgatgatggcggccagcctggcgctgaccggggctgtggtggctcacgcctactacctcaaacaccagttctaccccactgtggtgtacctgaccaagtccagccccagcatggcagtcctgtacatccaggcctttgtccttgtcttccttctgggcaaggtgatgggcaaggtgttctttgggcaactgagggcagcagagatggagcaccttctggaacgttcctggtacgccgtcacagagacttgtctggccttcaccgtttttcgggatgacttcagcccccgctttgttgcactcttcactcttcttctcttcctcaaatgtttccactggctggctgaggaccgtgtggactttatggaacgcagccccaacatctcctggctctttcactgccgcattgtctgtgagtgagattcaggggaggggaagggaggactggaacgtgaaccgtggacctgtactccagagcacaggctaccccccacagctgtacaggacagataatttaggaagttaatttgcatagtctctgtgctgttccactctagggcttctcaactgcctgggccctcagccctttgccttctcacctgcagcctgggcagccccaacaactccccctcccccagga

SEQ ID NO: 349223 - DNA, 591 bp, Homo sapiens
tgcatgatgagtcccaaggagaggaaagcagaaagtgacctcaaaccacagcctctccccactcctaggtcctgtacatccaggcctttgtccttgtcttccttctgggcaaggtgatgggcaaggtgttctttgggcaactgagggcagcagagatggagcaccttctggaacgttcctggtacgccgtcacagagacttgtctggccttcaccgtttttcgggatgacttcagcccccgctttgttgcactcttcactcttcttctcttcctcaaatgtttccactggctggctgaggaccgtgtggactttatggaacgcagccccaacatctcctggctctttcactgccgcattgtctgtgagtgagattcaggggaggggaagggaggactggaacgtgaaccgtggacctgtactccagagcacaggctaccccccacagctgtacaggacagataatttaggaagttaatttgcatagtctctgtgctgttccactctagggcttctcaactgcctgggccctcagccctttgccttctcacctgcagcctgggcagccccaacaactccccctcccccagga

SEQ ID NO: 349224 - DNA, 3346 bp, Homo sapiens
aggtgtctgacccccgaagttcacggttcgcagggggtgggggagttgttaaccggaggggcagccgcagtcgcgcggattgagcgggctcgcggcgctgggttcctggtctccgggccagggcaatgttccgcacggcagtgatgatggcggccagcctggcgctgaccggggctgtggtggctcacgcctactacctcaaacaccagttctaccccactgtggtgtacctgaccaagtccagccccagcatggcagtcctgtacatccaggcctttgtccttgtcttccttctgggcaaggtgatgggcaaggtgttctttgggcaactgagggcagcagagatggagcaccttctggaacgttcctggtacgccgtcacagagacttgtctggccttcaccgtttttcgggatgacttcagcccccgctttgttgcactcttcactcttcttctcttcctcaaatgtttccactggctggctgaggaccgtgtggactttatggaacgcagccccaacatctcctggctctttcactgccgcattgtctctcttatgttcctcctgggcatcctggacttcctcttcgtcagccacgcctatcacagcatcctgacccgtggggcctctgtgcagctggtgtttggctttgagtatgccatcctgatgacgatggtgctcaccatcttcatcaagtatgtgctgcactccgtggacctccagagtgagaacccctgggacaacaaggctgtgtacatgctctacacagagctgtttacaggcttcatcaaggttctgctgtacatggccttcatgaccatcatgatcaaggtgcacaccttcccactctttgccatccggcccatgtacctggccatgagacagttcaagaaagctgtgacagatgccatcatgtctcgccgagccatccgcaacatgaacaccctgtatccagatgccaccccagaggagctccaggcaatggacaatgtctgcatcatctgccgagaagagatggtgactggtgccaagagactgccctgcaaccacattttccataccagcggcagcagacctgccccacctgccgtatggatgtccttcgtgcatcgctgccagcgcagtcaccaccacccccggagcctgcggatcaggggccaccccctgccccccaccccccaccactcttgcctcagccccccaacttcccccagggcctcctgcctccttttcctccaggcatgttcccactgtggccccccatgggcccctttccacctgtcccgcctccccccagctcaggagaggctgtggctcctccatccaccagtgcagccctttctcggcccagtggagcagctacaaccacagctgctggcaccagtgctactgctgcttctgccacagcatctggcccaggctctggctctgccccagaggctggccctgcccctggtttccccttccctcctccctggatgggtatgcccctgcctccaccctttgccttccccccaatgcctgtgccccctgcgggctttgctgggctgaccccagaggagctacgagctctggagggccatgagcggcagcacctggaggcccggctgcagagcctgcgtaacatccacacactgctggacgccgccatgctgcagatcaaccagtacctcaccgtgctggcctccttggggcccccccggcctgccacttcagtcaactccactgaggagactgccactacagttgttgctgctgcctcctccaccagcatccctagctcagaggccacgaccccaaccccaggagcctccccaccagcccctgaaatggaaaggcctccagctcctgagtcagtgggcacagaggagatgcctgaggatggagagcccgatgcagcagagctccgccggcgccgcctgcagaagctggagtctcctgttgcccactgacactgccccagcccagccccagcctctgctcttttgagcagccctcgctggaacatgtcctgccaccaagtgccagctccctctctgtctgcaccagggagtagtacccccagctctgagaaagaggcggcatcccctaggccaagtggaaagaggctggggttcccatttgactccagtcccaggcagccatggggatctcgggtcagttccagccttcctctccaactcttcagccctgtgttctgctggggccatgaaggcagaaggtttagcctctgagaagccctcttcttcccccacccctttccaggagaaggggctgcccctccaagccctacttgtatgtgcggagtcacactgcagtgccgaacagtattagctcccgttcccaagtgtggactccagaggggctggaggcaagctatgaacttgctcgctggcccacccctaagactggtacccatttccttttcttaccctgatctccccagaagcctcttgtggtggtggctgtgccccctatgccctgtggcatttctgcgtcttactggcaaccacacaactcagggaaaggaatgcctgggagtgggggtgcaggcgggcagcactgagggaccctgccccgcccctccccccaggcccctttcccctgcagcttctcaagtgagactgacctgtctcacccagcagccactgcccagccgcactccaggcaagggccagtgcgcctgctcctgaccactgcaatcccagcgcccaaggaaggccacttctcaactggcagaacttctgaagtttagaattggaattacttccttactagtgtcttttggcttaaattttgtcttttgaagttgaatgcttaatcccgggaaagaggaacaggagtgccagactcctggtctttccagtttagaaaaggctctgtgccaaggagggaccacaggagctgggacctgcctgcccctgtcttttccccttggttttgtgttacaagagttgttggagacagtttcagatgattatttaatttgtaaatattgtacaaattttaatagcttaaattgtatatacagccaaataaaaacttgcattaacaattggtggggtttgtgtcacagaatcgatcaaatcagtgtcgggctccttgctgtggctgtacacttgaaaatggaatggaatctccaggagtgagggtttccatggaagccagcactatccttggggacaccactgaccattaacagattaggaagatgtgcccattttacacacagagaagcagcccagagttcagtgccctgcttcagggcagagaccaagttggggagtcaggaactgaaagctgtcttagccagtttgggggcagggtggggtctcaggcctttg

SEQ ID NO: 349225 - DNA, 3289 bp, Homo sapiens
  misc_feature (30)..(30): n is a, c, g, or t
agtccaaggctgtacggtcctgagatttangatcgcggcgctgggttcctggtctccgggccagggcaatgttccgcacggcagtgatgatggcggccagcctggcgctgaccggggctgtggtggctcacgcctactacctcaaacaccagttctaccccactgtggtgtacctgaccaagtccagccccagcatggcagtcctgtacatccaggcctttgtccttgtcttccttctgggcaaggtgatgggcaaggtgttctttgggcaactgagggcagcagagatggagcaccttctggaacgttcctggtacgccgtcacagagacttgtctggccttcaccgtttttcgggatgacttcagcccccgctttgttgcactcttcactcttcttctcttcctcaaatgtttccactggctggctgaggaccgtgtggactttatggaacgcagccccaacatctcctggctctttcactgccgcattgtctctcttatgttcctcctgggcatcctggacttcctcttcgtcagccacgcctatcacagcatcctgacccgtggggcctctgtgcagctggtgtttggctttgagtatgccatcctgatgacgatggtgctcaccatcttcatcaagtatgtgctgcactccgtggacctccagagtgagaacccctgggacaacaaggctgtgtacatgctctacacagagctgtttacaggcttcatcaaggttctgctgtacatggccttcatgaccatcatgatcaaggtgcacaccttcccactctttgccatccggcccatgtacctggccatgagacagttcaagaaagctgtgacagatgccatcatgtctcgccgagccatccgcaacatgaacaccctgtatccagatgccaccccagaggagctccaggcaatggacaatgtctgcatcatctgccgagaagagatggtgactggtgccaagagactgccctgcaaccacattttccataccagcggcagcagacctgccccacctgccgtatggatgtccttcgtgcatcgctgccagcgcagtcaccaccacccccggagcctgcggatcaggggccaccccctgccccccaccccccaccactcttgcctcagccccccaacttcccccagggcctcctgcctccttttcctccaggcatgttcccactgtggccccccatgggcccctttccacctgtcccgcctccccccagctcaggagaggctgtggctcctccatccaccagtgcagccctttctcggcccagtggagcagctacaaccacagctgctggcaccagtgctactgctgcttctgccacagcatctggcccaggctctggctctgccccagaggctggccctgcccctggtttccccttccctcctccctggatgggtatgcccctgcctccaccctttgccttccccccaatgcctgtgccccctgcgggctttgctgggctgaccccagaggagctacgagctctggagggccatgagcggcagcacctggaggcccggctgcagagcctgcgtaacatccacacactgctggacgccgccatgctgcagatcaaccagtacctcaccgtgctggcctccttggggcccccccggcctgccacttcagtcaactccactgaggagactgccactacagttgttgctgctgcctcctccaccagcatccctagctcagaggccacgaccccaaccccaggagcctccccaccagcccctgaaatggaaaggcctccagctcctgagtcagtgggcacagaggagatgcctgaggatggagagcccgatgcagcagagctccgccggcgccgcctgcagaagctggagtctcctgttgcccactgacactgccccagcccagccccagcctctgctcttttgagcagccctcgctggaacatgtcctgccaccaagtgccagctccctctctgtctgcaccagggagtagtacccccagctctgagaaagaggcggcatcccctaggccaagtggaaagaggctggggttcccatttgactccagtcccaggcagccatggggatctcgggtcagttccagccttcctctccaactcttcagccctgtgttctgctggggccatgaaggcagaaggtttagcctctgagaagccctcttcttcccccacccctttccaggagaaggggctgcccctccaagccctacttgtatgtgcggagtcacactgcagtgccgaacagtattagctcccgttcccaagtgtggactccagaggggctggaggcaagctatgaacttgctcgctggcccacccctaagactggtacccatttccttttcttaccctgatctccccagaagcctcttgtggtggtggctgtgccccctatgccctgtggcatttctgcgtcttactggcaaccacacaactcagggaaaggaatgcctgggagtgggggtgcaggcgggcagcactgagggaccctgccccgcccctccccccaggcccctttcccctgcagcttctcaagtgagactgacctgtctcacccagcagccactgcccagccgcactccaggcaagggccagtgcgcctgctcctgaccactgcaatcccagcgcccaaggaaggccacttctcaactggcagaacttctgaagtttagaattggaattacttccttactagtgtcttttggcttaaattttgtcttttgaagttgaatgcttaatcccgggaaagaggaacaggagtgccagactcctggtctttccagtttagaaaaggctctgtgccaaggagggaccacaggagctgggacctgcctgcccctgtcttttccccttggttttgtgttacaagagttgttggagacagtttcagatgattatttaatttgtaaatattgtacaaattttaatagcttaaattgtatatacagccaaataaaaacttgcattaacaattggtggggtttgtgtcacagaatcgatcaaatcagtgtcgggctccttgctgtggctgtacacttgaaaatggaatggaatctccaggagtgagggtttccatggaagccagcactatccttggggacaccactgaccattaacagattaggaagatgtgcccattttacacacagagaagcagcccagagttcagtgccctgcttcagggcagagaccaagttggggagtcaggaactgaaagctgtcttagccagtttgggggcagggtggggtctcaggcctttg

SEQ ID NO: 349226 - DNA, 3540 bp, Homo sapiens
aggtgtctgacccccgaagttcacggttcgcagggggtgggggagttgttaaccggaggggcagccgcagtcgcgcggattgagcgggctcgcggcgctgggttcctggtctccgggccagggcaatgttccgcacggcagtgatgatggcggccagcctggcgctgaccggggctgtggtggctcacgcctactacctcaaacaccagttctaccccactgtggtgtacctgaccaagtccagccccagcatggcagtcctgtacatccaggcctttgtccttgtcttccttctgggcaaggtgatgggcaaggtgttctttgggcaactgagggcagcagagatggagcaccttctggaacgttcctggtacgccgtcacagagacttgtctggccttcaccgtttttcgggatgacttcagcccccgctttgttgcactcttcactcttcttctcttcctcaaatgtttccactggctggctgaggaccgtgtggactttatggaacgcagccccaacatctcctggctctttcactgccgcattgtctctcttatgttcctcctgggcatcctggacttcctcttcgtcagccacgcctatcacagcatcctgacccgtggggcctctgtgcagctggtgtttggctttgagtatgccatcctgatgacgatggtgctcaccatcttcatcaagtatgtgctgcactccgtggacctccagagtgagaacccctgggacaacaaggctgtgtacatgctctacacagagctgtttacaggtgagaggggcctgggcctctcctgatctggaccagcatcctccactctgcctcctggccctgtgacctgctgctttctgcatcccctcccctcaggcttcatcaaggttctgctgtacatggccttcatgaccatcatgatcaaggtgcacaccttcccactctttgccatccggcccatgtacctggccatgaggtgagcccggccctgtcccccgatcctcctgacctgatcccgtcccttctcctgctttcactgactgtcctttcagacagttcaagaaagctgtgacagatgccatcatgtctcgccgagccatccgcaacatgaacaccctgtatccagatgccaccccagaggagctccaggcaatggacaatgtctgcatcatctgccgagaagagatggtgactggtgccaagagactgccctgcaaccacattttccataccagctgcctgcgctcctggttccagcggcagcagacctgccccacctgccgtatggatgtccttcgtgcatcgctgccagcgcagtcaccaccacccccggagcctgcggatcaggggccaccccctgccccccaccccccaccactcttgcctcagccccccaacttcccccagggcctcctgcctccttttcctccaggcatgttcccactgtggccccccatgggcccctttccacctgtcccgcctccccccagctcaggagaggctgtggctcctccatccaccagtgcagccctttctcggcccagtggagcagctacaaccacagctgctggcaccagtgctactgctgcttctgccacagcatctggcccaggctctggctctgccccagaggctggccctgcccctggtttccccttccctcctccctggatgggtatgcccctgcctccaccctttgccttccccccaatgcctgtgccccctgcgggctttgctgggctgaccccagaggagctacgagctctggagggccatgagcggcagcacctggaggcccggctgcagagcctgcgtaacatccacacactgctggacgccgccatgctgcagatcaaccagtacctcaccgtgctggcctccttggggcccccccggcctgccacttcagtcaactccactgaggagactgccactacagttgttgctgctgcctcctccaccagcatccctagctcagaggccacgaccccaaccccaggagcctccccaccagcccctgaaatggaaaggcctccagctcctgagtcagtgggcacagaggagatgcctgaggatggagagcccgatgcagcagagctccgccggcgccgcctgcagaagctggagtctcctgttgcccactgacactgccccagcccagccccagcctctgctcttttgagcagccctcgctggaacatgtcctgccaccaagtgccagctccctctctgtctgcaccagggagtagtacccccagctctgagaaagaggcggcatcccctaggccaagtggaaagaggctggggttcccatttgactccagtcccaggcagccatggggatctcgggtcagttccagccttcctctccaactcttcagccctgtgttctgctggggccatgaaggcagaaggtttagcctctgagaagccctcttcttcccccacccctttccaggagaaggggctgcccctccaagccctacttgtatgtgcggagtcacactgcagtgccgaacagtattagctcccgttcccaagtgtggactccagaggggctggaggcaagctatgaacttgctcgctggcccacccctaagactggtacccatttccttttcttaccctgatctccccagaagcctcttgtggtggtggctgtgccccctatgccctgtggcatttctgcgtcttactggcaaccacacaactcagggaaaggaatgcctgggagtgggggtgcaggcgggcagcactgagggaccctgccccgcccctccccccaggcccctttcccctgcagcttctcaagtgagactgacctgtctcacccagcagccactgcccagccgcactccaggcaagggccagtgcgcctgctcctgaccactgcaatcccagcgcccaaggaaggccacttctcaactggcagaacttctgaagtttagaattggaattacttccttactagtgtcttttggcttaaattttgtcttttgaagttgaatgcttaatcccgggaaagaggaacaggagtgccagactcctggtctttccagtttagaaaaggctctgtgccaaggagggaccacaggagctgggacctgcctgcccctgtcttttccccttggttttgtgttacaagagttgttggagacagtttcagatgattatttaatttgtaaatattgtacaaattttaatagcttaaattgtatatacagccaaataaaaacttgcattaacaattggtggggtttgtgtcacagaatcgatcaaatcagtgtcgggctccttgctgtggctgtacacttgaaaatggaatggaatctccaggagtgagggtttccatggaagccagcactatccttggggacaccactgaccattaacagattaggaagatgtgcccattttacacacagagaagcagcccagagttcagtgccctgcttcagggcagagaccaagttggggagtcaggaactgaaagctgtcttagccagtttgggggcagggtggggtctcaggcctttg

SEQ ID NO: 349227 - DNA, 3157 bp, Homo sapiens
tgcatgatgagtcccaaggagaggaaagcagaaagtgacctcaaaccacagcctctccccactcctaggtcctgtacatccaggcctttgtccttgtcttccttctgggcaaggtgatgggcaaggtgttctttgggcaactgagggcagcagagatggagcaccttctggaacgttcctggtacgccgtcacagagacttgtctggccttcaccgtttttcgggatgacttcagcccccgctttgttgcactcttcactcttcttctcttcctcaaatgtttccactggctggctgaggaccgtgtggactttatggaacgcagccccaacatctcctggctctttcactgccgcattgtctctcttatgttcctcctgggcatcctggacttcctcttcgtcagccacgcctatcacagcatcctgacccgtggggcctctgtgcagctggtgtttggctttgagtatgccatcctgatgacgatggtgctcaccatcttcatcaagtatgtgctgcactccgtggacctccagagtgagaacccctgggacaacaaggctgtgtacatgctctacacagagctgtttacaggcttcatcaaggttctgctgtacatggccttcatgaccatcatgatcaaggtgcacaccttcccactctttgccatccggcccatgtacctggccatgagacagttcaagaaagctgtgacagatgccatcatgtctcgccgagccatccgcaacatgaacaccctgtatccagatgccaccccagaggagctccaggcaatggacaatgtctgcatcatctgccgagaagagatggtgactggtgccaagagactgccctgcaaccacattttccataccagcggcagcagacctgccccacctgccgtatggatgtccttcgtgcatcgctgccagcgcagtcaccaccacccccggagcctgcggatcaggggccaccccctgccccccaccccccaccactcttgcctcagccccccaacttcccccagggcctcctgcctccttttcctccaggcatgttcccactgtggccccccatgggcccctttccacctgtcccgcctccccccagctcaggagaggctgtggctcctccatccaccagtgcagccctttctcggcccagtggagcagctacaaccacagctgctggcaccagtgctactgctgcttctgccacagcatctggcccaggctctggctctgccccagaggctggccctgcccctggtttccccttccctcctccctggatgggtatgcccctgcctccaccctttgccttccccccaatgcctgtgccccctgcgggctttgctgggctgaccccagaggagctacgagctctggagggccatgagcggcagcacctggaggcccggctgcagagcctgcgtaacatccacacactgctggacgccgccatgctgcagatcaaccagtacctcaccgtgctggcctccttggggcccccccggcctgccacttcagtcaactccactgaggagactgccactacagttgttgctgctgcctcctccaccagcatccctagctcagaggccacgaccccaaccccaggagcctccccaccagcccctgaaatggaaaggcctccagctcctgagtcagtgggcacagaggagatgcctgaggatggagagcccgatgcagcagagctccgccggcgccgcctgcagaagctggagtctcctgttgcccactgacactgccccagcccagccccagcctctgctcttttgagcagccctcgctggaacatgtcctgccaccaagtgccagctccctctctgtctgcaccagggagtagtacccccagctctgagaaagaggcggcatcccctaggccaagtggaaagaggctggggttcccatttgactccagtcccaggcagccatggggatctcgggtcagttccagccttcctctccaactcttcagccctgtgttctgctggggccatgaaggcagaaggtttagcctctgagaagccctcttcttcccccacccctttccaggagaaggggctgcccctccaagccctacttgtatgtgcggagtcacactgcagtgccgaacagtattagctcccgttcccaagtgtggactccagaggggctggaggcaagctatgaacttgctcgctggcccacccctaagactggtacccatttccttttcttaccctgatctccccagaagcctcttgtggtggtggctgtgccccctatgccctgtggcatttctgcgtcttactggcaaccacacaactcagggaaaggaatgcctgggagtgggggtgcaggcgggcagcactgagggaccctgccccgcccctccccccaggcccctttcccctgcagcttctcaagtgagactgacctgtctcacccagcagccactgcccagccgcactccaggcaagggccagtgcgcctgctcctgaccactgcaatcccagcgcccaaggaaggccacttctcaactggcagaacttctgaagtttagaattggaattacttccttactagtgtcttttggcttaaattttgtcttttgaagttgaatgcttaatcccgggaaagaggaacaggagtgccagactcctggtctttccagtttagaaaaggctctgtgccaaggagggaccacaggagctgggacctgcctgcccctgtcttttccccttggttttgtgttacaagagttgttggagacagtttcagatgattatttaatttgtaaatattgtacaaattttaatagcttaaattgtatatacagccaaataaaaacttgcattaacaattggtggggtttgtgtcacagaatcgatcaaatcagtgtcgggctccttgctgtggctgtacacttgaaaatggaatggaatctccaggagtgagggtttccatggaagccagcactatccttggggacaccactgaccattaacagattaggaagatgtgcccattttacacacagagaagcagcccagagttcagtgccctgcttcagggcagagaccaagttggggagtcaggaactgaaagctgtcttagccagtttgggggcagggtggggtctcaggcctttg

SEQ ID NO: 349228 - DNA, 3301 bp, Homo sapiens
aggtgtctgacccccgaagttcacggttcgcagggggtgggggagttgttaaccggaggggcagccgcagtcgcgcggattgagcgggctcgcggcgctgggttcctggtctccgggccagggcaatgttccgcacggcagtgatgatggcggccagcctggcgctgaccggggctgtggtggctcacgcctactacctcaaacaccagttctaccccactgtggtgtacctgaccaagtccagccccagcatggcagtgatgggcaaggtgttctttgggcaactgagggcagcagagatggagcaccttctggaacgttcctggtacgccgtcacagagacttgtctggccttcaccgtttttcgggatgacttcagcccccgctttgttgcactcttcactcttcttctcttcctcaaatgtttccactggctggctgaggaccgtgtggactttatggaacgcagccccaacatctcctggctctttcactgccgcattgtctctcttatgttcctcctgggcatcctggacttcctcttcgtcagccacgcctatcacagcatcctgacccgtggggcctctgtgcagctggtgtttggctttgagtatgccatcctgatgacgatggtgctcaccatcttcatcaagtatgtgctgcactccgtggacctccagagtgagaacccctgggacaacaaggctgtgtacatgctctacacagagctgtttacaggcttcatcaaggttctgctgtacatggccttcatgaccatcatgatcaaggtgcacaccttcccactctttgccatccggcccatgtacctggccatgagacagttcaagaaagctgtgacagatgccatcatgtctcgccgagccatccgcaacatgaacaccctgtatccagatgccaccccagaggagctccaggcaatggacaatgtctgcatcatctgccgagaagagatggtgactggtgccaagagactgccctgcaaccacattttccataccagcggcagcagacctgccccacctgccgtatggatgtccttcgtgcatcgctgccagcgcagtcaccaccacccccggagcctgcggatcaggggccaccccctgccccccaccccccaccactcttgcctcagccccccaacttcccccagggcctcctgcctccttttcctccaggcatgttcccactgtggccccccatgggcccctttccacctgtcccgcctccccccagctcaggagaggctgtggctcctccatccaccagtgcagccctttctcggcccagtggagcagctacaaccacagctgctggcaccagtgctactgctgcttctgccacagcatctggcccaggctctggctctgccccagaggctggccctgcccctggtttccccttccctcctccctggatgggtatgcccctgcctccaccctttgccttccccccaatgcctgtgccccctgcgggctttgctgggctgaccccagaggagctacgagctctggagggccatgagcggcagcacctggaggcccggctgcagagcctgcgtaacatccacacactgctggacgccgccatgctgcagatcaaccagtacctcaccgtgctggcctccttggggcccccccggcctgccacttcagtcaactccactgaggagactgccactacagttgttgctgctgcctcctccaccagcatccctagctcagaggccacgaccccaaccccaggagcctccccaccagcccctgaaatggaaaggcctccagctcctgagtcagtgggcacagaggagatgcctgaggatggagagcccgatgcagcagagctccgccggcgccgcctgcagaagctggagtctcctgttgcccactgacactgccccagcccagccccagcctctgctcttttgagcagccctcgctggaacatgtcctgccaccaagtgccagctccctctctgtctgcaccagggagtagtacccccagctctgagaaagaggcggcatcccctaggccaagtggaaagaggctggggttcccatttgactccagtcccaggcagccatggggatctcgggtcagttccagccttcctctccaactcttcagccctgtgttctgctggggccatgaaggcagaaggtttagcctctgagaagccctcttcttcccccacccctttccaggagaaggggctgcccctccaagccctacttgtatgtgcggagtcacactgcagtgccgaacagtattagctcccgttcccaagtgtggactccagaggggctggaggcaagctatgaacttgctcgctggcccacccctaagactggtacccatttccttttcttaccctgatctccccagaagcctcttgtggtggtggctgtgccccctatgccctgtggcatttctgcgtcttactggcaaccacacaactcagggaaaggaatgcctgggagtgggggtgcaggcgggcagcactgagggaccctgccccgcccctccccccaggcccctttcccctgcagcttctcaagtgagactgacctgtctcacccagcagccactgcccagccgcactccaggcaagggccagtgcgcctgctcctgaccactgcaatcccagcgcccaaggaaggccacttctcaactggcagaacttctgaagtttagaattggaattacttccttactagtgtcttttggcttaaattttgtcttttgaagttgaatgcttaatcccgggaaagaggaacaggagtgccagactcctggtctttccagtttagaaaaggctctgtgccaaggagggaccacaggagctgggacctgcctgcccctgtcttttccccttggttttgtgttacaagagttgttggagacagtttcagatgattatttaatttgtaaatattgtacaaattttaatagcttaaattgtatatacagccaaataaaaacttgcattaacaattggtggggtttgtgtcacagaatcgatcaaatcagtgtcgggctccttgctgtggctgtacacttgaaaatggaatggaatctccaggagtgagggtttccatggaagccagcactatccttggggacaccactgaccattaacagattaggaagatgtgcccattttacacacagagaagcagcccagagttcagtgccctgcttcagggcagagaccaagttggggagtcaggaactgaaagctgtcttagccagtttgggggcagggtggggtctcaggcctttg

SEQ ID NO: 349229 - DNA, 3242 bp, Homo sapiens
tgcatgatgagtcccaaggagaggaaagcagaaagtgacctcaaaccacagcctctccccactcctaggtcctgtacatccaggcctttgtccttgtcttccttctgggcaaggtgatgggcaaggtgttctttgggcaactgagggcagcagagatggaggtaagatgtcggctgccccaaaggtgagggcagggtgctgggaaagaatgtttggtatccacattattccctgcctggcccccagcaccttctggaacgttcctggtacgccgtcacagagacttgtctggccttcaccgtttttcgggatgacttcagcccccgctttgttgcactcttcactcttcttctcttcctcaaatgtttccactggctggctgaggaccgtgtggactttatggaacgcagccccaacatctcctggctctttcactgccgcattgtctctcttatgttcctcctgggcatcctggacttcctcttcgtcagccacgcctatcacagcatcctgacccgtggggcctctgtgcagctggtgtttggctttgagtatgccatcctgatgacgatggtgctcaccatcttcatcaagtatgtgctgcactccgtggacctccagagtgagaacccctgggacaacaaggctgtgtacatgctctacacagagctgtttacaggcttcatcaaggttctgctgtacatggccttcatgaccatcatgatcaaggtgcacaccttcccactctttgccatccggcccatgtacctggccatgagacagttcaagaaagctgtgacagatgccatcatgtctcgccgagccatccgcaacatgaacaccctgtatccagatgccaccccagaggagctccaggcaatggacaatgtctgcatcatctgccgagaagagatggtgactggtgccaagagactgccctgcaaccacattttccataccagcggcagcagacctgccccacctgccgtatggatgtccttcgtgcatcgctgccagcgcagtcaccaccacccccggagcctgcggatcaggggccaccccctgccccccaccccccaccactcttgcctcagccccccaacttcccccagggcctcctgcctccttttcctccaggcatgttcccactgtggccccccatgggcccctttccacctgtcccgcctccccccagctcaggagaggctgtggctcctccatccaccagtgcagccctttctcggcccagtggagcagctacaaccacagctgctggcaccagtgctactgctgcttctgccacagcatctggcccaggctctggctctgccccagaggctggccctgcccctggtttccccttccctcctccctggatgggtatgcccctgcctccaccctttgccttccccccaatgcctgtgccccctgcgggctttgctgggctgaccccagaggagctacgagctctggagggccatgagcggcagcacctggaggcccggctgcagagcctgcgtaacatccacacactgctggacgccgccatgctgcagatcaaccagtacctcaccgtgctggcctccttggggcccccccggcctgccacttcagtcaactccactgaggagactgccactacagttgttgctgctgcctcctccaccagcatccctagctcagaggccacgaccccaaccccaggagcctccccaccagcccctgaaatggaaaggcctccagctcctgagtcagtgggcacagaggagatgcctgaggatggagagcccgatgcagcagagctccgccggcgccgcctgcagaagctggagtctcctgttgcccactgacactgccccagcccagccccagcctctgctcttttgagcagccctcgctggaacatgtcctgccaccaagtgccagctccctctctgtctgcaccagggagtagtacccccagctctgagaaagaggcggcatcccctaggccaagtggaaagaggctggggttcccatttgactccagtcccaggcagccatggggatctcgggtcagttccagccttcctctccaactcttcagccctgtgttctgctggggccatgaaggcagaaggtttagcctctgagaagccctcttcttcccccacccctttccaggagaaggggctgcccctccaagccctacttgtatgtgcggagtcacactgcagtgccgaacagtattagctcccgttcccaagtgtggactccagaggggctggaggcaagctatgaacttgctcgctggcccacccctaagactggtacccatttccttttcttaccctgatctccccagaagcctcttgtggtggtggctgtgccccctatgccctgtggcatttctgcgtcttactggcaaccacacaactcagggaaaggaatgcctgggagtgggggtgcaggcgggcagcactgagggaccctgccccgcccctccccccaggcccctttcccctgcagcttctcaagtgagactgacctgtctcacccagcagccactgcccagccgcactccaggcaagggccagtgcgcctgctcctgaccactgcaatcccagcgcccaaggaaggccacttctcaactggcagaacttctgaagtttagaattggaattacttccttactagtgtcttttggcttaaattttgtcttttgaagttgaatgcttaatcccgggaaagaggaacaggagtgccagactcctggtctttccagtttagaaaaggctctgtgccaaggagggaccacaggagctgggacctgcctgcccctgtcttttccccttggttttgtgttacaagagttgttggagacagtttcagatgattatttaatttgtaaatattgtacaaattttaatagcttaaattgtatatacagccaaataaaaacttgcattaacaattggtggggtttgtgtcacagaatcgatcaaatcagtgtcgggctccttgctgtggctgtacacttgaaaatggaatggaatctccaggagtgagggtttccatggaagccagcactatccttggggacaccactgaccattaacagattaggaagatgtgcccattttacacacagagaagcagcccagagttcagtgccctgcttcagggcagagaccaagttggggagtcaggaactgaaagctgtcttagccagtttgggggcagggtggggtctcaggcctttg

SEQ ID NO: 349230 - DNA, 2668 bp, Homo sapiens
tggttcttggcctttgacacctgccaattcaggctgcctatctacaggcccaccaagggtctccaggagttcttggtaactcctggtgcctttatttcccactccagaaagcatgtctggatctaagtaggagtgatgtttattcgagagctgactttagatcttattcctttatatttttctaaagtcaaattattcagaatttgcagtgctttagttcatcacatgatattcttctgagatgtggtgacacttagattggcaattgctgcccccaaactgagggagcgaataataggaagtcacttggagccatcctggctcaagttcaagcgctggtcccatcactcatttttgacctctcattatttgaataaaggggtcttaattcatattcataagtgatgtgtactgccagatacacacctataatcagcactttggaaggctgaggcaggaggattgtttgagcctaggaatttgagggtgcagtgagctatgattgtgccactaaattccagctttggtgacagagccgagacgctgtcttttaaaaaagtgacatgtacataatgcctggcatctagcagtgacagcacaggcttggagaggaacttgagtccaaggctcgagcactgtggcttattgagtgagtcccctataaggtgcctgactccccagggtggagactgcagggtaagagtgaacaggtcaacagtccctgcccgcaagcaccttacagctaagggatagaatcatttggcccttgagtccagtcaccctgtctgagttcattcagcatgttcacttgtgtttgccaggcactggggccacaagggcacatcattctatactctgttctgcaaggctcaccaagggcaggagaatctgcccaaccttggatgccaaggccaggcccgcctctcgtcccttctcttcccaggcccccccggcctgccacttcagtcaactccactgaggagactgccactacagttgttgctgctgcctcctccaccagcatccctagctcagaggccacgaccccaaccccaggagcctccccaccagcccctgaaatggaaaggcctccaggtaggtgtgattggcctccagccgggggagcagggaacttctctaggttccacttccagtctctctgtccccagctcctgagtcagtgggcacagaggagatgcctgaggatggagagcccgatgcagcagagctccgccggcgccgcctgcagaagctggagtctcctgttgcccactgacactgccccagcccagccccagcctctgctcttttgagcagccctcgctggaacatgtcctgccaccaagtgccagctccctctctgtctgcaccagggagtagtacccccagctctgagaaagaggcggcatcccctaggccaagtggaaagaggctggggttcccatttgactccagtcccaggcagccatggggatctcgggtcagttccagccttcctctccaactcttcagccctgtgttctgctggggccatgaaggcagaaggtttagcctctgagaagccctcttcttcccccacccctttccaggagaaggggctgcccctccaagccctacttgtatgtgcggagtcacactgcagtgccgaacagtattagctcccgttcccaagtgtggactccagaggggctggaggcaagctatgaacttgctcgctggcccacccctaagactggtacccatttccttttcttaccctgatctccccagaagcctcttgtggtggtggctgtgccccctatgccctgtggcatttctgcgtcttactggcaaccacacaactcagggaaaggaatgcctgggagtgggggtgcaggcgggcagcactgagggaccctgccccgcccctccccccaggcccctttcccctgcagcttctcaagtgagactgacctgtctcacccagcagccactgcccagccgcactccaggcaagggccagtgcgcctgctcctgaccactgcaatcccagcgcccaaggaaggccacttctcaactggcagaacttctgaagtttagaattggaattacttccttactagtgtcttttggcttaaattttgtcttttgaagttgaatgcttaatcccgggaaagaggaacaggagtgccagactcctggtctttccagtttagaaaaggctctgtgccaaggagggaccacaggagctgggacctgcctgcccctgtcttttccccttggttttgtgttacaagagttgttggagacagtttcagatgattatttaatttgtaaatattgtacaaattttaatagcttaaattgtatatacagccaaataaaaacttgcattaacaattggtggggtttgtgtcacagaatcgatcaaatcagtgtcgggctccttgctgtggctgtacacttgaaaatggaatggaatctccaggagtgagggtttccatggaagccagcactatccttggggacaccactgaccattaacagattaggaagatgtgcccattttacacacagagaagcagcccagagttcagtgccctgcttcagggcagagaccaagttggggagtcaggaactgaaagctgtcttagccagtttgggggcagggtggggtctcaggcctttg

SEQ ID NO: 349231 - DNA, 3060 bp, Homo sapiens
aggtgtctgacccccgaagttcacggttcgcagggggtgggggagttgttaaccggaggggcagccgcagtcgcgcggattgagcgggctcgcggcgctgggttcctggtctccgggccagggcaatgttccgcacggcagtgatgatggcggccagcctggcgctgaccggggctgtggtggctcacgcctactacctcaaacaccagttctaccccactgtggtgtacctgaccaagtccagccccagcatggcagtcctgtacatccaggcctttgtccttgtcttccttctgggcaaggtgatgggcaaggtgttctttgggcaactgagggcagcagagatggagcaccttctggaacgttcctggtacgccgtcacagagacttgtctggccttcaccgtttttcgggatgacttcagcccccgctttgttgcactcttcactcttcttctcttcctcaaatgtttccactggctggctgaggaccgtgtggactttatggaacgcagccccaacatctcctggctctttcactgccgcattgtctctcttatgttcctcctgggcatcctggacttcctcttcgtcagccacgcctatcacagcatcctgacccgtggggcctctgtgcagctggtgtttggctttgagtatgccatcctgatgacgatggtgctcaccatcttcatcaagtatgtgctgcactccgtggacctccagagtgagaacccctgggacaacaaggctgtgtacatgctctacacagagctgtttacaggcttcatcaaggttctgctgtacatggccttcatgaccatcatgatcaaggtgcacaccttcccactctttgccatccggcccatgtacctggccatgagacagttcaagaaagctgtgacagatgccatcatgtctcgccgagccatccgcaacatgaacaccctgtatccagatgccaccccagaggagctccaggcaatggacaatgtctgcatcatctgccgagaagagatggtgactggtgccaagagactgccctgcaaccacattttccataccagcggcagcagacctgccccacctgccgtatggatgtccttcgtgcatcgctgccagcgcagtcaccaccacccccggagcctgcggatcaggggccaccccctgccccccaccccccaccactcttgcctcagccccccaacttcccccagggcctcctgcctccttttcctccaggcatgttcccactgtggccccccatgggcccctttccacctgtcccgcctccccccagctcaggagaggctgtggctcctccatccaccagtgcagccctttctcggcccagtggagcagctacaaccacagctgctggcaccagtgctactgctgcttctgccacagcatctggcccaggctctggctctgccccagaggctggccctgcccctggtttccccttccctcctccctggatgggtatgcccctgcctccaccctttgccttccccccaatgcctgtgccccctgcgggctttgctgggctgaccccagaggagctacgagctctggagggccatgagcggcagcacctggaggcccggctgcagagcctgcgtaacatccacacactgctggacgccgccatgctgcagatcaaccagtacctcaccgtgctggcctccttggggcccccccggcctgccacttcagtcaactccactgaggagactgccactacagttgttgctgctgcctcctccaccagcatccctagctcagaggccacgaccccaaccccaggagcctccccaccagcccctgaaatggaaaggcctccagctcctgagtcagtgggcacagaggagatgcctgaggatggagagcccgatgcagcagagctccgccggcgccgcctgcagaagctggagtctcctgttgcccactgacactgccccagcccagccccagcctctgctcttttgagcagccctcgctggaacatgtcctgccaccaagtgccagctccctctctgtctgcaccagggagtagtacccccagctctgagaaagaggcggcatcccctaggccaagtggaaagaggctggggttcccatttgactccagtcccaggcagccatggggatctcgggtcagttccagccttcctctccaactcttcagccctgtgttctgctggggccatgaaggcagaaggtttagcctctgagaagccctcttcttcccccacccctttccaggagaaggggctgcccctccaagccctacttgtatgtgcggagtcacactgcagtgccgaacagtattagctcccgttcccaagtgtggactccagaggggctggaggcaagctatgaacttgctcgctggcccacccctaagactggtacccatttccttttcttaccctgatctccccagaagcctcttgtggtggtggctgtgccccctatgccctgtggcatttctgcgtcttactggcaaccacacaactcagggaaaggaatgcctgggagtgggggtgcaggcgggcagcactgagggaccctgccccgcccctccccccaggcccctttcccctgcagcttctcaagtgagactgacctgtctcacccagcagccactgcccagccgcactccaggcaagggccagtgcgcctgctcctgaccactgcaatcccagcgcccaaggaaggccacttctcaactggcagaacttctgaagtttagaattggaattacttccttactagtgtcttttggcttaaattttgtcttttgaagttgaatgcttaatcccgggaaagaggaacaggagtgccagactcctggtctttccagtttagaaaaggctctggccggggggacacggtactggacctctgcccggttttccccggattggttaccaatgttgacacgttgatatttctatggtatttcacattacgccagtgataggccaatcgcctccacatacacactggggcggccaagcataggttccgggcgcacacgcggcgcgcacgacct

SEQ ID NO: 349232 - DNA, 1168 bp, Homo sapiens
  misc_feature (1154)..(1154): n is a, c, g, or t
aggtgtctgacccccgaagttcacggttcgcagggggtgggggagttgttaaccggaggggcagccgcagtcgcgcggattgagcgggctcgcggcgctgggttcctggtctccgggccagggcaatgttccgcacggcagtgatgatggcggccagcctggcgctgaccggggctgtggtggctcacgcctactacctcaaacaccagttctaccccactgtggtgtacctgaccaagtccagccccagcatggcagtcctgtacatccaggcctttgtccttgtcttccttctgggcaaggtgatgggcaaggtgttctttgggcaactgagggcagcagagatggagcaccttctggaacgttcctggtacgccgtcacagagacttgtctggccttcaccgtttttcgggatgacttcagcccccgctttgttgcactcttcactcttcttctcttcctcaaatgtttccactggctggctgaggaccgtgtggactttatggaacgcagccccaacatctcctggctctttcactgccgcattgtctctcttatgttcctcctgggcatcctggacttcctcttcgtcagccacgcctatcacagcatcctgacccgtggggcctctgtgcagctggtgtttggctttgagtatgccatcctgatgacgatggtgctcaccatcttcatcaagtatgtgctgcactccgtggacctccagagtgagaacccctgggacaacaaggctgtgtacatgctctacacagagctgtttacaggcttcatcaaggttctgctgtacatggccttcatgaccatcatgatcaaggtgcacaccttcccactctttgccatccggcccatgtacctggccatgagacagttcaagaaagctgtgacagatgccatcatgtctcgccgagccatccgcaacatgaacaccctgtatccagatgccaccccagaggagctccaggcaatggacaatgtctgcatcatctgccgagaagagatggtgactggtgccaagagactgccctgcaaccacattttccataccagctgcctgcgctcctggttccagcggcagcagacctgccccgagtccagaattgccccgagtccagaatgccccgagtccagaatgccnagatcctctagagt

SEQ ID NO: 349233 - DNA, 1076 bp, Homo sapiens
aggtgtctgacccccgaagttcacggttcgcagggggtgggggagttgttaaccggaggggcagccgcagtcgcgcggattgagcgggctcgcggcgctgggttcctggtctccgggccagggcaatgttccgcacggcagtgatgatggcggccagcctggcgctgaccggggctgtggtggctcacgcctactacctcaaacaccagttctaccccactgtggtgtacctgaccaagtccagccccagcatggcagtcctgtacatccaggcctttgtccttgtcttccttctgggcaaggtgatgggcaaggtgttctttgggcaactgagggcagcagagatggagcaccttctggaacgttcctggtacgccgtcacagagacttgtctggccttcaccgtttttcgggatgacttcagcccccgctttgttgcactcttcactcttcttctcttcctcaaatgtttccactggctggctgaggaccgtgtggactttatggaacgcagccccaacatctcctggctctttcactgccgcattgtctctcttatgttcctcctgggcatcctggacttcctcttcgtcagccacgcctatcacagcatcctgacccgtggggcctctgtgcagctggtgtttggctttgagtatgccatcctgatgacgatggtgctcaccatcttcatcaagtatgtgctgcactccgtggacctccagagtgagaacccctgggacaacaaggctgtgtacatgctctacacagagctgtttacaggcttcatcaaggttctgctgtacatggccttcatgaccatcatgatcaaggtgcacaccttcccactctttgccatccggcccatgtacctggccatgaggtgagcccggccctgtcccccgatcctcctgacctgatcccgtcccttctcctgctttcactgactgtcctttcagacagttcaagaaagctgtgacagatgccatcatgtctcgccgagccatccgcaacatgaacaccctgtataacaggaacccacatgatgggggatcctgtagatcgacaacaagcat

SEQ ID NO: 349234 - DNA, 1091 bp, Homo sapiens
aggtgtctgacccccgaagttcacggttcgcagggggtgggggagttgttaaccggaggggcagccgcagtcgcgcggattgagcgggctcgcggcgctgggttcctggtctccgggccagggcaatgttccgcacggcagtgatgatggcggccagcctggcgctgaccggggctgtggtggctcacgcctactacctcaaacaccagttctaccccactgtggtgtacctgaccaagtccagccccagcatggcagtcctgtacatccaggcctttgtccttgtcttccttctgggcaaggtgatgggcaaggtgttctttgggcaactgagggcagcagagatggagcaccttctggaacgttcctggtacgccgtcacagagacttgtctggccttcaccgtttttcgggatgacttcagcccccgctttgttgcactcttcactcttcttctcttcctcaaatgtttccactggctggctgaggaccgtgtggactttatggaacgcagccccaacatctcctggctctttcactgccgcattgtctctcttatgttcctcctgggcatcctggacttcctcttcgtcagccacgcctatcacagcatcctgacccgtggggcctctgtgcagctggtgtttggctttgagtatgccatcctgatgacgatggtgctcaccatcttcatcaagtatgtgctgcactccgtggacctccagagtgagaacccctgggacaacaaggctgtgtacatgctctacacagagctgtttacaggcttcatcaaggttctgctgtacatggccttcatgaccatcatgatcaaggtgcacaccttcccactctttgccatccggcccatgtacctggccatgagacagttcaagaaagctgtgacagatgccatcatgtctcgccgagccatccgcaacatgaacaccctgtatccagatgccaccccagaggagctccaggcaatggacaatgtctgcatcatctgccgagaagagatggtgactggtgccaagagactgccctgcaaccacattttccataccaggtgggaggggccctggggagcctgc

SEQ ID NO: 349235 - DNA, 676 bp, Homo sapiens
tgcatgatgagtcccaaggagaggaaagcagaaagtgacctcaaaccacagcctctccccactcctaggtcctgtacatccaggcctttgtccttgtcttccttctgggcaaggtgatgggcaaggtgttctttgggcaactgagggcagcagagatggaggtaagatgtcggctgccccaaaggtgagggcagggtgctgggaaagaatgtttggtatccacattattccctgcctggcccccagcaccttctggaacgttcctggtacgccgtcacagagacttgtctggccttcaccgtttttcgggatgacttcagcccccgctttgttgcactcttcactcttcttctcttcctcaaatgtttccactggctggctgaggaccgtgtggactttatggaacgcagccccaacatctcctggctctttcactgccgcattgtctgtgagtgagattcaggggaggggaagggaggactggaacgtgaaccgtggacctgtactccagagcacaggctaccccccacagctgtacaggacagataatttaggaagttaatttgcatagtctctgtgctgttccactctagggcttctcaactgcctgggccctcagccctttgccttctcacctgcagcctgggcagccccaacaactccccctcccccagga

SEQ ID NO: 349236 - DNA, 3420 bp, Homo sapiens
aggtgtctgacccccgaagttcacggttcgcagggggtgggggagttgttaaccggaggggcagccgcagtcgcgcggattgagcgggctcgcggcgctgggttcctggtctccgggccagggcaatgttccgcacggcagtgatgatggcggccagcctggcgctgaccggggctgtggtggctcacgcctactacctcaaacaccagttctaccccactgtggtgtacctgaccaagtccagccccagcatggcagtcctgtacatccaggcctttgtccttgtcttccttctgggcaaggtgatgggcaaggtgttctttgggcaactgagggcagcagagatggagcaccttctggaacgttcctggtacgccgtcacagagacttgtctggccttcaccgtttttcgggatgacttcagcccccgctttgttgcactcttcactcttcttctcttcctcaaatgtttccactggctggctgaggaccgtgtggactttatggaacgcagccccaacatctcctggctctttcactgccgcattgtctctcttatgttcctcctgggcatcctggacttcctcttcgtcagccacgcctatcacagcatcctgacccgtggggcctctgtgcagctggtgtttggctttgagtatgccatcctgatgacgatggtgctcaccatcttcatcaagtatgtgctgcactccgtggacctccagagtgagaacccctgggacaacaaggctgtgtacatgctctacacagagctgtttacaggcttcatcaaggttctgctgtacatggccttcatgaccatcatgatcaaggtgcacaccttcccactctttgccatccggcccatgtacctggccatgagacagttcaagaaagctgtgacagatgccatcatgtctcgccgagccatccgcaacatgaacaccctgtatccagatgccaccccagaggagctccaggcaatggacaatgtctgcatcatctgccgagaagagatggtgactggtgccaagagactgccctgcaaccacattttccataccagcggcagcagacctgccccacctgccgtatggatgtccttcgtgcatcgctgccagcgcagtcaccaccacccccggagcctgcggatcaggggccaccccctgccccccaccccccaccactcttgcctcagccccccaacttcccccagggcctcctgcctccttttcctccaggcatgttcccactgtggccccccatgggcccctttccacctgtcccgcctccccccagctcaggagaggctgtggctcctccatccaccagtgcagccctttctcggcccagtggagcagctacaaccacagctgctggcaccagtgctactgctgcttctgccacagcatctggcccaggctctggctctgccccagaggctggccctgcccctggtttccccttccctcctccctggatgggtatgcccctgcctccaccctttgccttccccccaatgcctgtgccccctgcgggctttgctgggctgaccccagaggagctacgagctctggagggccatgagcggcagcacctggaggcccggctgcagagcctgcgtaacatccacacactgctggacgccgccatgctgcagatcaaccagtacctcaccgtgctggcctccttggggcccccccggcctgccacttcagtcaactccactgaggagactgccactacagttgttgctgctgcctcctccaccagcatccctagctcagaggccacgaccccaaccccaggagcctccccaccagcccctgaaatggaaaggcctccaggtaggtgtgattggcctccagccgggggagcagggaacttctctaggttccacttccagtctctctgtccccagctcctgagtcagtgggcacagaggagatgcctgaggatggagagcccgatgcagcagagctccgccggcgccgcctgcagaagctggagtctcctgttgcccactgacactgccccagcccagccccagcctctgctcttttgagcagccctcgctggaacatgtcctgccaccaagtgccagctccctctctgtctgcaccagggagtagtacccccagctctgagaaagaggcggcatcccctaggccaagtggaaagaggctggggttcccatttgactccagtcccaggcagccatggggatctcgggtcagttccagccttcctctccaactcttcagccctgtgttctgctggggccatgaaggcagaaggtttagcctctgagaagccctcttcttcccccacccctttccaggagaaggggctgcccctccaagccctacttgtatgtgcggagtcacactgcagtgccgaacagtattagctcccgttcccaagtgtggactccagaggggctggaggcaagctatgaacttgctcgctggcccacccctaagactggtacccatttccttttcttaccctgatctccccagaagcctcttgtggtggtggctgtgccccctatgccctgtggcatttctgcgtcttactggcaaccacacaactcagggaaaggaatgcctgggagtgggggtgcaggcgggcagcactgagggaccctgccccgcccctccccccaggcccctttcccctgcagcttctcaagtgagactgacctgtctcacccagcagccactgcccagccgcactccaggcaagggccagtgcgcctgctcctgaccactgcaatcccagcgcccaaggaaggccacttctcaactggcagaacttctgaagtttagaattggaattacttccttactagtgtcttttggcttaaattttgtcttttgaagttgaatgcttaatcccgggaaagaggaacaggagtgccagactcctggtctttccagtttagaaaaggctctgtgccaaggagggaccacaggagctgggacctgcctgcccctgtcttttccccttggttttgtgttacaagagttgttggagacagtttcagatgattatttaatttgtaaatattgtacaaattttaatagcttaaattgtatatacagccaaataaaaacttgcattaacaattggtggggtttgtgtcacagaatcgatcaaatcagtgtcgggctccttgctgtggctgtacacttgaaaatggaatggaatctccaggagtgagggtttccatggaagccagcactatccttggggacaccactgaccattaacagattaggaagatgtgcccattttacacacagagaagcagcccagagttcagtgccctgcttcagggcagagaccaagttggggagtcaggaactgaaagctgtcttagccagtttgggggcagggtggggtctcaggcctttg

SEQ ID NO: 349237 - DNA, 3243 bp, Homo sapiens
gcgttacagagcaccaggtctttgtctcattcttctgtgttccctgttttaaatttttttcccgaacggggctgtggtggctcacgcctactacctcaaacaccagttctaccccactgtggtgtacctgaccaagtccagccccagcatggcagtcctgtacatccaggcctttgtccttgtcttccttctgggcaaggtgatgggcaaggtgttctttgggcaactgagggcagcagagatggagcaccttctggaacgttcctggtacgccgtcacagagacttgtctggccttcaccgtttttcgggatgacttcagcccccgctttgttgcactcttcactcttcttctcttcctcaaatgtttccactggctggctgaggaccgtgtggactttatggaacgcagccccaacatctcctggctctttcactgccgcattgtctctcttatgttcctcctgggcatcctggacttcctcttcgtcagccacgcctatcacagcatcctgacccgtggggcctctgtgcagctggtgtttggctttgagtatgccatcctgatgacgatggtgctcaccatcttcatcaagtatgtgctgcactccgtggacctccagagtgagaacccctgggacaacaaggctgtgtacatgctctacacagagctgtttacaggcttcatcaaggttctgctgtacatggccttcatgaccatcatgatcaaggtgcacaccttcccactctttgccatccggcccatgtacctggccatgagacagttcaagaaagctgtgacagatgccatcatgtctcgccgagccatccgcaacatgaacaccctgtatccagatgccaccccagaggagctccaggcaatggacaatgtctgcatcatctgccgagaagagatggtgactggtgccaagagactgccctgcaaccacattttccataccagcggcagcagacctgccccacctgccgtatggatgtccttcgtgcatcgctgccagcgcagtcaccaccacccccggagcctgcggatcaggggccaccccctgccccccaccccccaccactcttgcctcagccccccaacttcccccagggcctcctgcctccttttcctccaggcatgttcccactgtggccccccatgggcccctttccacctgtcccgcctccccccagctcaggagaggctgtggctcctccatccaccagtgcagccctttctcggcccagtggagcagctacaaccacagctgctggcaccagtgctactgctgcttctgccacagcatctggcccaggctctggctctgccccagaggctggccctgcccctggtttccccttccctcctccctggatgggtatgcccctgcctccaccctttgccttccccccaatgcctgtgccccctgcgggctttgctgggctgaccccagaggagctacgagctctggagggccatgagcggcagcacctggaggcccggctgcagagcctgcgtaacatccacacactgctggacgccgccatgctgcagatcaaccagtacctcaccgtgctggcctccttggggcccccccggcctgccacttcagtcaactccactgaggagactgccactacagttgttgctgctgcctcctccaccagcatccctagctcagaggccacgaccccaaccccaggagcctccccaccagcccctgaaatggaaaggcctccagctcctgagtcagtgggcacagaggagatgcctgaggatggagagcccgatgcagcagagctccgccggcgccgcctgcagaagctggagtctcctgttgcccactgacactgccccagcccagccccagcctctgctcttttgagcagccctcgctggaacatgtcctgccaccaagtgccagctccctctctgtctgcaccagggagtagtacccccagctctgagaaagaggcggcatcccctaggccaagtggaaagaggctggggttcccatttgactccagtcccaggcagccatggggatctcgggtcagttccagccttcctctccaactcttcagccctgtgttctgctggggccatgaaggcagaaggtttagcctctgagaagccctcttcttcccccacccctttccaggagaaggggctgcccctccaagccctacttgtatgtgcggagtcacactgcagtgccgaacagtattagctcccgttcccaagtgtggactccagaggggctggaggcaagctatgaacttgctcgctggcccacccctaagactggtacccatttccttttcttaccctgatctccccagaagcctcttgtggtggtggctgtgccccctatgccctgtggcatttctgcgtcttactggcaaccacacaactcagggaaaggaatgcctgggagtgggggtgcaggcgggcagcactgagggaccctgccccgcccctccccccaggcccctttcccctgcagcttctcaagtgagactgacctgtctcacccagcagccactgcccagccgcactccaggcaagggccagtgcgcctgctcctgaccactgcaatcccagcgcccaaggaaggccacttctcaactggcagaacttctgaagtttagaattggaattacttccttactagtgtcttttggcttaaattttgtcttttgaagttgaatgcttaatcccgggaaagaggaacaggagtgccagactcctggtctttccagtttagaaaaggctctgtgccaaggagggaccacaggagctgggacctgcctgcccctgtcttttccccttggttttgtgttacaagagttgttggagacagtttcagatgattatttaatttgtaaatattgtacaaattttaatagcttaaattgtatatacagccaaataaaaacttgcattaacaattggtggggtttgtgtcacagaatcgatcaaatcagtgtcgggctccttgctgtggctgtacacttgaaaatggaatggaatctccaggagtgagggtttccatggaagccagcactatccttggggacaccactgaccattaacagattaggaagatgtgcccattttacacacagagaagcagcccagagttcagtgccctgcttcagggcagagaccaagttggggagtcaggaactgaaagctgtcttagccagtttgggggcagggtggggtctcaggcctttg

SEQ ID NO: 349238 - DNA, 3242 bp, Homo sapiens
aggtgtctgacccccgaagttcacggttcgcagggggtgggggagttgttaaccggaggggcagccgcagtcgcgcggattgagcgggctcgcggcgctgggttcctggtctccgggccagggcaatgttccgcacggcagtgatgatggcggccagcctggcgctgaccggggctgtggtggctcacgcctactacctcaaacaccagttctaccccactgtggtgtacctgaccaagtccagccccagcatggcagtcctgtacatccaggcctttgtccttgtcttccttctgggcaaggtgatgggcaaggtgttctttgggcaactgagggcagcagagatggagcaccttctggaacgttcctggtacgccgtcacagagacttgtctggccttcaccgtttttcgggatgacttcagcccccgctttgttgcactcttcactcttcttctcttcctcaaatgtttccactggctggctgaggaccgtgtggactttatggaacgcagccccaacatctcctggctctttcactgccgcattgtcttatgccatcctgatgacgatggtgctcaccatcttcatcaagtatgtgctgcactccgtggacctccagagtgagaacccctgggacaacaaggctgtgtacatgctctacacagagctgtttacaggcttcatcaaggttctgctgtacatggccttcatgaccatcatgatcaaggtgcacaccttcccactctttgccatccggcccatgtacctggccatgagacagttcaagaaagctgtgacagatgccatcatgtctcgccgagccatccgcaacatgaacaccctgtatccagatgccaccccagaggagctccaggcaatggacaatgtctgcatcatctgccgagaagagatggtgactggtgccaagagactgccctgcaaccacattttccataccagcggcagcagacctgccccacctgccgtatggatgtccttcgtgcatcgctgccagcgcagtcaccaccacccccggagcctgcggatcaggggccaccccctgccccccaccccccaccactcttgcctcagccccccaacttcccccagggcctcctgcctccttttcctccaggcatgttcccactgtggccccccatgggcccctttccacctgtcccgcctccccccagctcaggagaggctgtggctcctccatccaccagtgcagccctttctcggcccagtggagcagctacaaccacagctgctggcaccagtgctactgctgcttctgccacagcatctggcccaggctctggctctgccccagaggctggccctgcccctggtttccccttccctcctccctggatgggtatgcccctgcctccaccctttgccttccccccaatgcctgtgccccctgcgggctttgctgggctgaccccagaggagctacgagctctggagggccatgagcggcagcacctggaggcccggctgcagagcctgcgtaacatccacacactgctggacgccgccatgctgcagatcaaccagtacctcaccgtgctggcctccttggggcccccccggcctgccacttcagtcaactccactgaggagactgccactacagttgttgctgctgcctcctccaccagcatccctagctcagaggccacgaccccaaccccaggagcctccccaccagcccctgaaatggaaaggcctccagctcctgagtcagtgggcacagaggagatgcctgaggatggagagcccgatgcagcagagctccgccggcgccgcctgcagaagctggagtctcctgttgcccactgacactgccccagcccagccccagcctctgctcttttgagcagccctcgctggaacatgtcctgccaccaagtgccagctccctctctgtctgcaccagggagtagtacccccagctctgagaaagaggcggcatcccctaggccaagtggaaagaggctggggttcccatttgactccagtcccaggcagccatggggatctcgggtcagttccagccttcctctccaactcttcagccctgtgttctgctggggccatgaaggcagaaggtttagcctctgagaagccctcttcttcccccacccctttccaggagaaggggctgcccctccaagccctacttgtatgtgcggagtcacactgcagtgccgaacagtattagctcccgttcccaagtgtggactccagaggggctggaggcaagctatgaacttgctcgctggcccacccctaagactggtacccatttccttttcttaccctgatctccccagaagcctcttgtggtggtggctgtgccccctatgccctgtggcatttctgcgtcttactggcaaccacacaactcagggaaaggaatgcctgggagtgggggtgcaggcgggcagcactgagggaccctgccccgcccctccccccaggcccctttcccctgcagcttctcaagtgagactgacctgtctcacccagcagccactgcccagccgcactccaggcaagggccagtgcgcctgctcctgaccactgcaatcccagcgcccaaggaaggccacttctcaactggcagaacttctgaagtttagaattggaattacttccttactagtgtcttttggcttaaattttgtcttttgaagttgaatgcttaatcccgggaaagaggaacaggagtgccagactcctggtctttccagtttagaaaaggctctgtgccaaggagggaccacaggagctgggacctgcctgcccctgtcttttccccttggttttgtgttacaagagttgttggagacagtttcagatgattatttaatttgtaaatattgtacaaattttaatagcttaaattgtatatacagccaaataaaaacttgcattaacaattggtggggtttgtgtcacagaatcgatcaaatcagtgtcgggctccttgctgtggctgtacacttgaaaatggaatggaatctccaggagtgagggtttccatggaagccagcactatccttggggacaccactgaccattaacagattaggaagatgtgcccattttacacacagagaagcagcccagagttcagtgccctgcttcagggcagagaccaagttggggagtcaggaactgaaagctgtcttagccagtttgggggcagggtggggtctcaggcctttg

SEQ ID NO: 349239 - DNA, 3303 bp, Homo sapiens
aggtgtctgacccccgaagttcacggttcgcagggggtgggggagttgttaaccggaggggcagccgcagtcgcgcggattgagcgggctcgcggcgctgggttcctggtctccgggccagggcaatgttccgcacggcagtgatgatggcggccagcctggcgctgaccggggctgtggtggctcacgcctactacctcaaacaccagttctaccccactgtggtgtacctgaccaagtccagccccagcatggcagtcctgtacatccaggcctttgtccttgtcttccttctgggcaaggtgatgggcaaggtgttctttgggcaactgagggcagcagagatggagcaccttctggaacgttcctggtacgccgtcacagagacttgtctggccttcaccgtttttcgggatgacttcagcccccgctttgttgcactcttcactcttcttctcttcctcaaatgtttccactggctggctgaggaccgtgtggactttatggaacgcagccccaacatctcctggctctttcactgccgcattgtctccacgcctatcacagcatcctgacccgtggggcctctgtgcagctggtgtttggctttgagtatgccatcctgatgacgatggtgctcaccatcttcatcaagtatgtgctgcactccgtggacctccagagtgagaacccctgggacaacaaggctgtgtacatgctctacacagagctgtttacaggcttcatcaaggttctgctgtacatggccttcatgaccatcatgatcaaggtgcacaccttcccactctttgccatccggcccatgtacctggccatgagacagttcaagaaagctgtgacagatgccatcatgtctcgccgagccatccgcaacatgaacaccctgtatccagatgccaccccagaggagctccaggcaatggacaatgtctgcatcatctgccgagaagagatggtgactggtgccaagagactgccctgcaaccacattttccataccagcggcagcagacctgccccacctgccgtatggatgtccttcgtgcatcgctgccagcgcagtcaccaccacccccggagcctgcggatcaggggccaccccctgccccccaccccccaccactcttgcctcagccccccaacttcccccagggcctcctgcctccttttcctccaggcatgttcccactgtggccccccatgggcccctttccacctgtcccgcctccccccagctcaggagaggctgtggctcctccatccaccagtgcagccctttctcggcccagtggagcagctacaaccacagctgctggcaccagtgctactgctgcttctgccacagcatctggcccaggctctggctctgccccagaggctggccctgcccctggtttccccttccctcctccctggatgggtatgcccctgcctccaccctttgccttccccccaatgcctgtgccccctgcgggctttgctgggctgaccccagaggagctacgagctctggagggccatgagcggcagcacctggaggcccggctgcagagcctgcgtaacatccacacactgctggacgccgccatgctgcagatcaaccagtacctcaccgtgctggcctccttggggcccccccggcctgccacttcagtcaactccactgaggagactgccactacagttgttgctgctgcctcctccaccagcatccctagctcagaggccacgaccccaaccccaggagcctccccaccagcccctgaaatggaaaggcctccagctcctgagtcagtgggcacagaggagatgcctgaggatggagagcccgatgcagcagagctccgccggcgccgcctgcagaagctggagtctcctgttgcccactgacactgccccagcccagccccagcctctgctcttttgagcagccctcgctggaacatgtcctgccaccaagtgccagctccctctctgtctgcaccagggagtagtacccccagctctgagaaagaggcggcatcccctaggccaagtggaaagaggctggggttcccatttgactccagtcccaggcagccatggggatctcgggtcagttccagccttcctctccaactcttcagccctgtgttctgctggggccatgaaggcagaaggtttagcctctgagaagccctcttcttcccccacccctttccaggagaaggggctgcccctccaagccctacttgtatgtgcggagtcacactgcagtgccgaacagtattagctcccgttcccaagtgtggactccagaggggctggaggcaagctatgaacttgctcgctggcccacccctaagactggtacccatttccttttcttaccctgatctccccagaagcctcttgtggtggtggctgtgccccctatgccctgtggcatttctgcgtcttactggcaaccacacaactcagggaaaggaatgcctgggagtgggggtgcaggcgggcagcactgagggaccctgccccgcccctccccccaggcccctttcccctgcagcttctcaagtgagactgacctgtctcacccagcagccactgcccagccgcactccaggcaagggccagtgcgcctgctcctgaccactgcaatcccagcgcccaaggaaggccacttctcaactggcagaacttctgaagtttagaattggaattacttccttactagtgtcttttggcttaaattttgtcttttgaagttgaatgcttaatcccgggaaagaggaacaggagtgccagactcctggtctttccagtttagaaaaggctctgtgccaaggagggaccacaggagctgggacctgcctgcccctgtcttttccccttggttttgtgttacaagagttgttggagacagtttcagatgattatttaatttgtaaatattgtacaaattttaatagcttaaattgtatatacagccaaataaaaacttgcattaacaattggtggggtttgtgtcacagaatcgatcaaatcagtgtcgggctccttgctgtggctgtacacttgaaaatggaatggaatctccaggagtgagggtttccatggaagccagcactatccttggggacaccactgaccattaacagattaggaagatgtgcccattttacacacagagaagcagcccagagttcagtgccctgcttcagggcagagaccaagttggggagtcaggaactgaaagctgtcttagccagtttgggggcagggtggggtctcaggcctttg

SEQ ID NO: 349240 - DNA, 2404 bp, Homo sapiens
gtctggccacccggcataccactggatacttgccctgggctggatgtggaagatgctgggaaattggagagtccctgccctccagaatctcagtctgggccagggagggattaaaagatgagaaatagatgcttgcagtcagtgtgaccagtgctgggctgagggcctgtgggaataggacagagctctcaatagccaggccccctgcctgggagttgggtctgtgtccatttggccctttccttacctccgtcttctctctgcagtcccccagggcctcctgcctccttttcctccaggcatgttcccactgtggccccccatgggcccctttccacctgtcccgcctccccccagctcaggagaggctgtggctcctccatccaccagtgcagccctttctcggcccagtggagcagctacaaccacagctgctggcaccagtgctactgctgcttctgccacagcatctggcccaggctctggctctgccccagaggctggccctgcccctggtttccccttccctcctccctggatgggtatgcccctgcctccaccctttgccttccccccaatgcctgtgccccctgcgggctttgctgggctgaccccagaggagctacgagctctggagggccatgagcggcagcacctggaggcccggctgcagagcctgcgtaacatccacacactgctggacgccgccatgctgcagatcaaccagtacctcaccgtgctggcctccttggggcccccccggcctgccacttcagtcaactccactgaggagactgccactacagttgttgctgctgcctcctccaccagcatccctagctcagaggccacgaccccaaccccaggagcctccccaccagcccctgaaatggaaaggcctccagctcctgagtcagtgggcacagaggagatgcctgaggatggagagcccgatgcagcagagctccgccggcgccgcctgcagaagctggagtctcctgttgcccactgacactgccccagcccagccccagcctctgctcttttgagcagccctcgctggaacatgtcctgccaccaagtgccagctccctctctgtctgcaccagggagtagtacccccagctctgagaaagaggcggcatcccctaggccaagtggaaagaggctggggttcccatttgactccagtcccaggcagccatggggatctcgggtcagttccagccttcctctccaactcttcagccctgtgttctgctggggccatgaaggcagaaggtttagcctctgagaagccctcttcttcccccacccctttccaggagaaggggctgcccctccaagccctacttgtatgtgcggagtcacactgcagtgccgaacagtattagctcccgttcccaagtgtggactccagaggggctggaggcaagctatgaacttgctcgctggcccacccctaagactggtacccatttccttttcttaccctgatctccccagaagcctcttgtggtggtggctgtgccccctatgccctgtggcatttctgcgtcttactggcaaccacacaactcagggaaaggaatgcctgggagtgggggtgcaggcgggcagcactgagggaccctgccccgcccctccccccaggcccctttcccctgcagcttctcaagtgagactgacctgtctcacccagcagccactgcccagccgcactccaggcaagggccagtgcgcctgctcctgaccactgcaatcccagcgcccaaggaaggccacttctcaactggcagaacttctgaagtttagaattggaattacttccttactagtgtcttttggcttaaattttgtcttttgaagttgaatgcttaatcccgggaaagaggaacaggagtgccagactcctggtctttccagtttagaaaaggctctgtgccaaggagggaccacaggagctgggacctgcctgcccctgtcttttccccttggttttgtgttacaagagttgttggagacagtttcagatgattatttaatttgtaaatattgtacaaattttaatagcttaaattgtatatacagccaaataaaaacttgcattaacaattggtggggtttgtgtcacagaatcgatcaaatcagtgtcgggctccttgctgtggctgtacacttgaaaatggaatggaatctccaggagtgagggtttccatggaagccagcactatccttggggacaccactgaccattaacagattaggaagatgtgcccattttacacacagagaagcagcccagagttcagtgccctgcttcagggcagagaccaagttggggagtcaggaactgaaagctgtcttagccagtttgggggcagggtggggtctcaggcctttg

SEQ ID NO: 349241 - DNA, 2648 bp, Homo sapiens
catggccttcatgaagcctgtaaacaggctctgtgtagagcatgtacacagccttgtttacaggcttcatcaaggttctgctgtacatggccttcatgaccatcatgatcaaggtgcacaccttcccactctttgccatccggcccatgtacctggccatgagacagttcaagaaagctgtgacagatgccatcatgtctcgccgagccatccgcaacatgaacaccctgtatccagatgccaccccagaggagctccaggcaatggacaatgtctgcatcatctgccgagaagagatggtgactggtgccaagagactgccctgcaaccacattttccataccagctgcctgcgctcctggttccagcggcagcagacctgccccacctgccgtatggatgtccttcgtgcatcgctgccagcgcagtcaccaccacccccggagcctgcggatcaggggccaccccctgccccccaccccccaccactcttgcctcagccccccaacttcccccagggcctcctgcctccttttcctccaggcatgttcccactgtggccccccatgggcccctttccacctgtcccgcctccccccagctcaggagaggctgtggctcctccatccaccagtgcagccctttctcggcccagtggagcagctacaaccacagctgctggcaccagtgctactgctgcttctgccacagcatctggcccaggctctggctctgccccagaggctggccctgcccctggtttccccttccctcctccctggatgggtatgcccctgcctccaccctttgccttccccccaatgcctgtgccccctgcgggctttgctgggctgaccccagaggagctacgagctctggagggccatgagcggcagcacctggaggcccggctgcagagcctgcgtaacatccacacactgctggacgccgccatgctgcagatcaaccagtacctcaccgtgctggcctccttggggcccccccggcctgccacttcagtcaactccactgaggagactgccactacagttgttgctgctgcctcctccaccagcatccctagctcagaggccacgaccccaaccccaggagcctccccaccagcccctgaaatggaaaggcctccagctcctgagtcagtgggcacagaggagatgcctgaggatggagagcccgatgcagcagagctccgccggcgccgcctgcagaagctggagtctcctgttgcccactgacactgccccagcccagccccagcctctgctcttttgagcagccctcgctggaacatgtcctgccaccaagtgccagctccctctctgtctgcaccagggagtagtacccccagctctgagaaagaggcggcatcccctaggccaagtggaaagaggctggggttcccatttgactccagtcccaggcagccatggggatctcgggtcagttccagccttcctctccaactcttcagccctgtgttctgctggggccatgaaggcagaaggtttagcctctgagaagccctcttcttcccccacccctttccaggagaaggggctgcccctccaagccctacttgtatgtgcggagtcacactgcagtgccgaacagtattagctcccgttcccaagtgtggactccagaggggctggaggcaagctatgaacttgctcgctggcccacccctaagactggtacccatttccttttcttaccctgatctccccagaagcctcttgtggtggtggctgtgccccctatgccctgtggcatttctgcgtcttactggcaaccacacaactcagggaaaggaatgcctgggagtgggggtgcaggcgggcagcactgagggaccctgccccgcccctccccccaggcccctttcccctgcagcttctcaagtgagactgacctgtctcacccagcagccactgcccagccgcactccaggcaagggccagtgcgcctgctcctgaccactgcaatcccagcgcccaaggaaggccacttctcaactggcagaacttctgaagtttagaattggaattacttccttactagtgtcttttggcttaaattttgtcttttgaagttgaatgcttaatcccgggaaagaggaacaggagtgccagactcctggtctttccagtttagaaaaggctctgtgccaaggagggaccacaggagctgggacctgcctgcccctgtcttttccccttggttttgtgttacaagagttgttggagacagtttcagatgattatttaatttgtaaatattgtacaaattttaatagcttaaattgtatatacagccaaataaaaacttgcattaacaattggtggggtttgtgtcacagaatcgatcaaatcagtgtcgggctccttgctgtggctgtacacttgaaaatggaatggaatctccaggagtgagggtttccatggaagccagcactatccttggggacaccactgaccattaacagattaggaagatgtgcccattttacacacagagaagcagcccagagttcagtgccctgcttcagggcagagaccaagttggggagtcaggaactgaaagctgtcttagccagtttgggggcagggtggggtctcaggcctttg

SEQ ID NO: 349242 - DNA, 3053 bp, Homo sapiens
aggtgtctgacccccgaagttcacggttcgcagggggtgggggagttgttaaccggaggggcagccgcagtcgcgcggattgagcgggctcgcggcgctgggttcctggtctccgggccagggcaatgttccgcacggcagtgatgatggcggccagcctggcgctgaccggggctgtggtggctcacgcctactacctcaaacaccagttctaccccactgtggtgtacctgaccaagtccagccccagcatggcagtcctgtacatccaggcctttgtccttgtcttccttctgggcaaggtgatgggcaaggtgttctttgggcaactgagggcagcagagatggagcaccttctggaacgttcctggtacgccgtcacagagacttgtctggccttcaccgtttttcgggatgacttcagcccccgctttgttgcactcttcactcttcttctcttcctcaaatgtttccactggctggctgaggaccgtgtggactttatggaacgcagccccaacatctcctggctctttcactgccgcattgtctctcttatgttcctcctgggcatcctggacttcctcttcgtcagccacgcctatcacagcatcctgacccgtggggcctctgtgcagctggtgtttggctttgagtatgccatcctgatgacgatggtgctcaccatcttcatcaagtatgtgctgcactccgtggacctccagagtgagaacccctgggacaacaaggctgtgtacatgctctacacagagctgtttacaggcttcatcaaggttctgctgtacatggccttcatgaccatcatgatcaaggtgcacaccttcccactctttgccatccggcccatgtacctggccatgagacagttcaagaaagctgtgacagatgccatcatgtctcgccgagccatccgcaacatgaacaccctgtatccagatgccaccccagaggagctccaggcaatggacaatgtctgcatcatctgccgagaagagatggtgactggtgccaagagactgccctgcaaccacattttccataccagcggcagcagacctgccccacctgccgtatggatgtccttcgtgcatcgctgccagcgcagtcaccaccacccccggagcctgcggatcaggggccaccccctgccccccaccccccaccactcttgcctcagccccccaacttcccccagggcctcctgcctccttttcctccaggcatgttcccactgtggccccccatgggcccctttccacctgtcccgcctccccccagctcaggagaggctgtggctcctccatccaccagtgcagccctttctcggcccagtggagcagctacaaccacagctgctggcaccagtgctactgctgcttctgccacagcatctggcccaggctctggctctgccccagaggctggccctgcccctggtttccccttccctcctccctggatgggtatgcccctgcctccaccctttgccttccccccaatgcctgtgccccctgcgggctttgctgggctgaccccagaggagctacgagctctggagggccatgagcggcagcacctggaggcccggctgcagagcctgcgtaacatccacacactgctggacgccgccatgctgcagatcaaccagtacctcaccgtgctggcctccttggggcccccccggcctgccacttcagtcaactccactgaggagactgccactacagttgttgctgctgcctcctccaccagcatccctagctcagaggccacgaccccaaccccaggagcctccccaccagcccctgaaatggaaaggcctccagctcctgagtcagtgggcacagaggagatgcctgaggatggagagcccgatgcagcagagctccgccggcgccgcctgcagaagctggagtctcctgttgcccactgacactgccccagcccagccccagcctctgctcttttgagcagccctcgctggaacatgtcctgccaccaagtgccagctccctctctgtctgcaccagggagtagtacccccagctctgagaaagaggcggcatcccctaggccaagtggaaagaggctggggttcccatttgactccagtcccaggcagccatggggatctcgggtcagttccagccttcctctccaactcttcagccctgtgttctgctggggccatgaaggcagaaggtttagcctctgagaagccctcttcttcccccacccctttccaggagaaggggctgcccctccaagccctacttgtatgtgcggagtcacactgcagtgccgaacagtattagctcccgttcccaagtgtggactccagaggggctggaggcaagctatgaacttgctcgctggcccacccctaagactggtacccatttccttttcttaccctgatctccccagaagcctcttgtggtggtggctgtgccccctatgccctgtggcatttctgcgtcttactggcaaccacacaactcagggaaaggaatgcctgggagtgggggtgcaggcgggcagcactgagggaccctgccccgcccctccccccaggcccctttcccctgcagcttctcaagtgagactgacctgtctcacccagcagccactgcccagccgcactccaggcaagggccagtgcgcctgctcctgaccactgcaatcccagcgcccaaggaaggccacttctcaactggcagaacttctgaagtttagaattggaattacttccttactagtgtcttttggcttaaattttgtcttttgaagttgaatgcttaatcccgggaaagaggaacaggagtgccagactcctggtctttccagtttagaaaaggctctgtgccaaggagggaccacaggagctgggacctgcctgcccctgtcttttccccttggttttgtgttacaagagttgttggagacagtttcagatgattatttaatttgtaaatattgtacaaattttaatagcttaaattgtatatacagccaaataaaaacttgcatta

SEQ ID NO: 349243 - DNA, 2203 bp, Homo sapiens
aggtgtctgacccccgaagttcacggttcgcagggggtgggggagttgttaaccggaggggcagccgcagtcgcgcggattgagcgggctcgcggcgctgggttcctggtctccgggccagggcaatgttccgcacggcagtgatgatggcggccagcctggcgctgaccggggctgtggtggctcacgcctactacctcaaacaccagttctaccccactgtggtgtacctgaccaagtccagccccagcatggcagtcctgtacatccaggcctttgtccttgtcttccttctgggcaaggtgatgggcaaggtgttctttgggcaactgagggcagcagagatggagcaccttctggaacgttcctggtacgccgtcacagagacttgtctggccttcaccgtttttcgggatgacttcagcccccgctttgttgcactcttcactcttcttctcttcctcaaatgtttccactggctggctgaggaccgtgtggactttatggaacgcagccccaacatctcctggctctttcactgccgcattgtctctcttatgttcctcctgggcatcctggacttcctcttcgtcagccacgcctatcacagcatcctgacccgtggggcctctgtgcagctggtgtttggctttgagtatgccatcctgatgacgatggtgctcaccatcttcatcaagtatgtgctgcactccgtggacctccagagtgagaacccctgggacaacaaggctgtgtacatgctctacacagagctgtttacaggcttcatcaaggttctgctgtacatggccttcatgaccatcatgatcaaggtgcacaccttcccactctttgccatccggcccatgtacctggccatgagacagttcaagaaagctgtgacagatgccatcatgtctcgccgagccatccgcaacatgaacaccctgtatccagatgccaccccagaggagctccaggcaatggacaatgtctgcatcatctgccgagaagagatggtgactggtgccaagagactgccctgcaaccacattttccataccagcggcagcagacctgccccacctgccgtatggatgtccttcgtgcatcgctgccagcgcagtcaccaccacccccggagcctgcggatcaggggccaccccctgccccccaccccccaccactcttgcctcagccccccaacttcccccagggcctcctgcctccttttcctccaggcatgttcccactgtggccccccatgggcccctttccacctgtcccgcctccccccagctcaggagaggctgtggctcctccatccaccagtgcagccctttctcggcccagtggagcagctacaaccacagctgctggcaccagtgctactgctgcttctgccacagcatctggcccaggctctggctctgccccagaggctggccctgcccctggtttccccttccctcctccctggatgggtatgcccctgcctccaccctttgccttccccccaatgcctgtgccccctgcgggctttgctgggctgaccccagaggagctacgagctctggagggccatgagcggcagcacctggaggcccggctgcagagcctgcgtaacatccacacactgctggacgccgccatgctgcagatcaaccagtacctcaccgtgctggcctccttggggcccccccggcctgccacttcagtcaactccactgaggagactgccactacagttgttgctgctgcctcctccaccagcatccctagctcagaggccacgaccccaaccccaggagcctccccaccagcccctgaaatggaaaggcctccagctcctgagtcagtgggcacagaggagatgcctgaggatggagagcccgatgcagcagagctccgccggcgccgcctgcagaagctggagtctcctgttgcccactgactattatcattcagaaattccaaacacaagaccacatgaaattctggaaaaaccttcccctccacagccaccacctcctcctcggtaccacaaactgtgattccaaagaagactggctcacctgaaattaaactaaaaataaccaaaactatccagaatggcagggaattgtttgagtcttccctttgtggagaccttttaaatgaagtacaggcaagtgagcacacgaaatcaaagcatgaaagcaga

SEQ ID NO: 349244 - DNA, 506 bp, Homo sapiens
cttttttggtttctttgactgatttttggatgatatatgttgctttatttctcccattttctttgattactgtggacaaaggaaaacactgaggcaaaagtaggtcgtcaatcacattactttgacccagttgtgcagaacccctttcctacctgcaggtgttaattccaattcaatgcaaatatccttttcaatccggtccattcttggagaagaaacccattgtaagagctgtcttctgtggttgggatattactttgtaaagtattaaagcactaaaccagtttttgcaatatgtagtaaatcttgctttcattttggaaaacttccagtaatgactactgcactttttatagaagaattgtatttaatttctttcttttatgaaagattatttcaagtaaaaatagctctgtaatctgtgtgacatggcttctccattacctgacacagagagaagctttgatgcctactcaataaaattaacatgtttgtaaagtaaaaaa

SEQ ID NO: 349245 - DNA, 377 bp, Homo sapiens
cttttttggtttctttgactgatttttggatgatatatgttgctttatttctcccattttctttgattactgtggacaaaggaaaacactgaggcaaaagtaggtcgtcaatcacattactttgacccagttgtgcagaacccctttcctacctgcaggtgttaattccaattcaatgcaaatatccttttcaatccggtccattcttggagaagaaacccattgtaagagctgtcttctgtggttgggatattactttgtaaagtattaaagcactaaaccagtttttgcaatatgtagtaaatcttgctttcattttggaaaacttccagtaatgactactgcacactgtcgagagggatcctctagacgcccca

SEQ ID NO: 349246 - DNA, 529 bp, Homo sapiens
agggtcttgctgtgttgctcgggctgctcttgaactcctgggctcaaacagtcctcttgcctcagcctcccaacgtgctgggattacgggagcaagccaccccactgtgtgcagcccagaagttgagcctgagaggcactgtgagcagctgttgctatcacacgggcggatcagaacatgaagaatggagctaaatagagctgtctgcatgctgttctgatgggctcaggctcagcctcagagaataggtggattggagcctgtgatgggggctctttcccccaccagagtgggtgaaagcagggaggaacaggcgggaagatactttaggagttgggagggtattaattccacctcttctctccttcctctgtaccccaacattccctgtgagttgtcaagggctggagagataacaaagatctttctttccaccatcaggcagtaaggcaatgcagccctcgctgaattttcagctccactgacattgtgatgcaaatattaaataaagcttattttctgacctgag

SEQ ID NO: 349247 - DNA, 499 bp, Homo sapiens
gagtttctgattcagcaagtctgggttgggacatgagaatttctcacaaattcaccagtgatgctgatgttactggtccaggaactgcactttgagagccactgtaattcaggtattgtaattatgcatggattatgttttctttttcttttcttcttcttcttcttcttttttttttttttttgagacagaatcttgctctgtcacccagggtggagtgcagtggtgtgatctcagctcactgcaatgtccatctcctgggttcaagcaattctcctgccttagtagctggtattacaggcacctgccaccatgcctggctaattttatatttttagtaaagacagggtttcaccaagttgcccaggctggtctcgaactcctgacctcaaatggtccgcccgcctcggtctccccatagtgctgggattacaggcgtgagccactgcacctggcctgttttctctattttcaaaactgtctctatgatcatgtttta

SEQ ID NO: 349248 - DNA, 1520 bp, Homo sapiens
cgccccgggcgcgggcggagggaggaggaggcggcgcgcgcggcgccagcccgcagaagccggtggccgcgcaggaggacggagccctaaccgcaacccgcgccgcgccgcgccgatttgatttgtatccactgtcaccagcactgctcacttaggactttctggatccggacccaggcagcgcacactggactcttgaggaagaaggagactctaattttggattccttggtggaggaaaataaaacactctggtcttgccgccaacgatgcaagtgtgactgctggcgtcttcatgagctccagaggtcacagcacgctaccaaggactctcatggcccctcggatgatttccgagggagacataggaggcattgctcaaatcacctcctctctattcctgggcagaggcagtgtggcctccaatcggcacctcctccaggctcgtggcatcacctgcattgttaatgctaccattgagatccctaatttcaactggccccaatttgagtatgttaaagtgcctctggctgacatgccgcatgcccccattggactgtactttgacaccgtggctgacaagatccacagtgtgagcaggaagcacggggccaccttggtgcactgtgctgcaggggtgagccgctcagccacgctgtgtatcgcgtacctgatgaaattccacaacgtgtgcctgctggaggcgtacaactgggtgaaagcccggcgacctgtcatcaggcccaacgtaggcttctggaggcaactgatagactacgagcgccagctctttgggaagtcgacagttaaaatggtacagacaccttatggcatagttcccgacgtctatgagaaggagtcccgacacctgatgccttactgggggatttagtgccactgaagcctgcgtcagcagcccgagcggggccggcatctgctccccgccgtctgctccctctccactctcttctcaaatggctgacttctggttctccctcaagtgttttttacactgggtgttcaaatttattttaagagatagggagggaggggacataaagggaatgcatacattgctagtcacatttttaaaattaacattttggaatagtgtttatggaaatctttagcttttaatcatttttaccaatttgaacagtttaataaactggttctgctctcttctgaatctcatgcctttggcaccttggtaggtgcaggaggagctcagtgcaaaaatcactttggggcctcattaaccctttagagacaagctttgccccaggctgcggaccagacagatgcttagggaaggttgataccagcttcagtctctactggattagccctactctttcctttcccctccattatttagtgactctgtaagtaagttaaatacacccttattatttagctgttaagtaactataatgaaatctgctgcaaaatctctcttggaatccatgtgcccaggattatattagcattatttttaataaatctatatgcttaacata

SEQ ID NO: 349249 - DNA, 530 bp, Homo sapiens
actaaagaagccccttccaggcagagtgcacactttggatctgcttcatggcagaacagagtaatggttaagagctgggttctggagggagcaagatgtgattgtgtgtctgtgtcccagctctgccacctgctagagttgtatcgtgaccttctgaacctcagttgtcttgcctgtaaaatggaaatgaaggggatggttagcactcccactggatcaaataagctgcacctcatacataatgaggaaacagagacccggagagatacagtccttggccagtcagccaagttggagcatagcttggactttgaacccagtctcccagctcccagtctgcctgcagccctgtccctctccacccccaagccctgaccagaattctcttctgtacatccagaagggctttcccattcctcagactctctgaggcaattacagtccctaccactcatgtggcccttaatcatttactgcccttgcaaacagcctgtggtcaaaagcaataaagttcggacttggacagatca

SEQ ID NO: 349250 - DNA, 2016 bp, Homo sapiens
cgccccgggcgcgggcggagggaggaggaggcggcgcgcgcggcgccagcccgcagaagccggtggccgcgcaggaggacggagccctaaccgcaacccgcgccgcgccgcgccgatttgatttgtatccactgtcaccagcactgctcacttaggactttctggatccggacccaggcagcgcacactggactcttgaggaagaaggagactctaattttggattccttggtggaggaaaataaaacactctggtcttgccgccaacgatgcaagtgtgactgctggcgtcttcatgagctccagaggtcacagcacgctaccaaggactctcatggcccctcggatgatttccgagggagacataggaggcattgctcaaatcacctcctctctattcctgggcagaggcagtgtggcctccaatcggcacctcctccaggctcgtggcatcacctgcattgttaatgctaccattgagatccctaatttcaactggccccaatttgagtatgttaaagtgcctctggctgacatgccgcatgcccccattggactgtactttgacaccgtggctgacaagatccacagtgtgagcaggaagcacggggccaccttggtgcactgtgctgcaggggtgagccgctcagccacgctgtgtatcgcgtacctgatgaaattccacaacgtgtgcctgctggaggcgtacaactgggtgaaagcccggcgacctgtcatcaggcccaacgtaggcttctggaggcaactgatagactacgagcgccagctctttgggaagtcgacagttaaaatggtacagacaccttatggcatagttcccgacgtctatgagaaggagtcccgacacctgatgccttactgggggatttagtgccactgaagcctgcgtcagcagcccgagcggggccggcatctgctccccgccgtctgctccctctccactctcttctcaaatggctgacttctggttctccctcaagtgttttttacactgggtgttcaaatttattttaagagatagggagggaggggacataaagggaatgcatacattgctagtcacatttttaaaattaacattttggaatagtgtttatggaaatctttagcttttaatcatttttaccaatttgaacagtttaataaactggttctgctctcttctgaatctcatgcctttggcaccttggtaggtgcaggaggagctcagtgcaaaaatcactttggggcctcattaaccctttagagacaagctttgccccaggctgcggaccagacagatgcttagggaaggttgataccagcttcagtctctactggattagccctactctttcctttcccctccattatttagtgactctgtaagtaagttaaatacacccttattatttagctgttaagtaactataatgaaatctgctgcaaaatctctcttggaatccatgtgcccaggattatattagcattatttttaataaatctatatgcttaacataaaaaaaaaaaaaaaaaaaaaaaaaaaataaaaaaaaaaaaaaaaaaaaaaaaaagggggggcccactccaaaaatatatctccccgtgggggcacccacatgattgagcggctatcccgccgtcttttgtgtgtgtcaaaaggggggcccccattatatgtaggggggtcagtatttatgacaggcaggcgcaactaggcagccgcagtcgtttaataaaaagagtctatgctgcgggagaaaacagcgtgtacagcatggtggagagatacttctttgtgagagaagaaaacacatcactatttaagcaggagggagggtagcagccaaaatatttggggcagaacacacccctcatcagcaaagcagatatttaaagaggtcctataagggaggaaaatattatagaaattttacaagagggatagataatagtggtttgtaaacaccaaatgagggtagaattgtgctcagtcgaggggaaaaaaaataatgg

SEQ ID NO: 349251 - DNA, 1447 bp, Homo sapiens
cgccccgggcgcgggcggagggaggaggaggcggcgcgcgcggcgccagcccgcagaagccggtggccgcgcaggaggacggagccctaaccgcaacccgcgccgcgccgcgccgatttgatttgtatccactgtcaccagcactgctcacttaggactttctggatccggacccaggcagcgcacactggactcttgaggaagaaggagactctaattttggattccttggtggaggaaaataaaacactctggtcttgccgccaacgatgcaagtgtgactgctggcgtcttcatgagctccagaggtcacagcacgctaccaaggactctcatggcccctcggatgatttccgagggagacataggaggcattgctcaaatcacctcctctctattcctgggcagaggcagtgtggcctccaatcggcacctcctccaggctcgtggcatcacctgcattgttaatgctaccattgagatccctaatttcaactggccccaatttgagtatgttaaagtgcctctggctgacatgccgcatgcccccattggactgtactttgacaccgtggctgacaagatccacagtgtgagcaggaagcacggggccaccttggtgcactgtgctgcaggggtgagccgctcagccacgctgtgtatcgcgtacctgatgaaattccacaacgtgtgcctgctggaggcgtacaactgggtgaaagcccggcgacctgtcatcaggcccaacgtaggcttctggaggcaactgatagactacgagcgccagctctttgggaagtcgacagttaaaatggtacagacaccttatggcatagttcccgacgtctatgagaaggagtcccgacacctgatgccttactgggggatttagtgccactgaagcctgcgtcagcagcccgagcggggccggcatctgctccccgccgtctgctccctctccactctcttctcaaatggctgacttctggttctccctcaagtgttttttacactgggtgttcaaatttattttaagagatagggagggaggggacataaagggaatgcatacattgctagtcacatttttaaaattaacattttggaatagtgtttatggaaatctttagcttttaatcatttttaccaatttgaacagtttaataaactggttctgctctcttctgaatctcatgcctttggcaccttggtaggtgcaggaggagctcagtgcaaaaatcactttggggcctcattaaccctttagagacaagctttgccccaggctgcggaccagacagatgcttagggaaggttgataccagcttcagtctctactggattagccctactctttcctttcccctccattatttagtgactctgtaagtaagttaaatacacccttattatttagctgttaagtaactataatgaaatctgctgc

SEQ ID NO: 349252 - DNA, 1497 bp, Homo sapiens
gaccgcgtttagaggatcagtggcggcggcacccgcggccccgcgcggcgcggacggcgggcagcaccgtgcctgggccccctcctgctccgatttgatttgtatccactgtcaccagcactgctcacttaggactttctggatccggacccaggcagcgcacactggactcttgaggaagaaggagactctaattttggattccttggtggaggaaaataaaacactctggtcttgccgccaacgatgcaagtgtgactgctggcgtcttcatgagctccagaggtcacagcacgctaccaaggactctcatggcccctcggatgatttccgagggagacataggaggcattgctcaaatcacctcctctctattcctgggcagaggcagtgtggcctccaatcggcacctcctccaggctcgtggcatcacctgcattgttaatgctaccattgagatccctaatttcaactggccccaatttgagtatgttaaagtgcctctggctgacatgccgcatgcccccattggactgtactttgacaccgtggctgacaagatccacagtgtgagcaggaagcacggggccaccttggtgcactgtgctgcaggggtgagccgctcagccacgctgtgtatcgcgtacctgatgaaattccacaacgtgtgcctgctggaggcgtacaactgggtgaaagcccggcgacctgtcatcaggcccaacgtaggcttctggaggcaactgatagactacgagcgccagctctttgggaagtcgacagttaaaatggtacagacaccttatggcatagttcccgacgtctatgagaaggagtcccgacacctgatgccttactgggggatttagtgccactgaagcctgcgtcagcagcccgagcggggccggcatctgctccccgccgtctgctccctctccactctcttctcaaatggctgacttctggttctccctcaagtgttttttacactgggtgttcaaatttattttaagagatagggagggaggggacataaagggaatgcatacattgctagtcacatttttaaaattaacattttggaatagtgtttatggaaatctttagcttttaatcatttttaccaatttgaacagtttaataaactggttctgctctcttctgaatctcatgcctttggcaccttggtaggtgcaggaggagctcagtgcaaaaatcactttggggcctcattaaccctttagagacaagctttgccccaggctgcggaccagacagatgcttagggaaggttgataccagcttcagtctctactggattagccctactctttcctttcccctccattatttagtgactctgtaagtaagttaaatacacccttattatttagctgttaagtaactataatgaaatctgctgcaaaatctctcttggaatccatgtgcccaggattatattagcattatttttaataaatctatatgcttaacata

SEQ ID NO: 349253 - DNA, 1472 bp, Homo sapiens
cgccccgggcgcgggcggagggaggaggaggcggcgcgcgcggcgccagcccgcagaagccggtggccgcgcaggaggacggagccctaaccgcaacccgcgccgcgccgcgccgatttgatttgtatccactgtcaccagcactgctcacttaggactttctggatccggacccaggcagcgcacactggactcttgaggaagaaggagactctaattttggattccttggtggaggaaaataaaaatgagctccagaggtcacagcacgctaccaaggactctcatggcccctcggatgatttccgagggagacataggaggcattgctcaaatcacctcctctctattcctgggcagaggcagtgtggcctccaatcggcacctcctccaggctcgtggcatcacctgcattgttaatgctaccattgagatccctaatttcaactggccccaatttgagtatgttaaagtgcctctggctgacatgccgcatgcccccattggactgtactttgacaccgtggctgacaagatccacagtgtgagcaggaagcacggggccaccttggtgcactgtgctgcaggggtgagccgctcagccacgctgtgtatcgcgtacctgatgaaattccacaacgtgtgcctgctggaggcgtacaactgggtgaaagcccggcgacctgtcatcaggcccaacgtaggcttctggaggcaactgatagactacgagcgccagctctttgggaagtcgacagttaaaatggtacagacaccttatggcatagttcccgacgtctatgagaaggagtcccgacacctgatgccttactgggggatttagtgccactgaagcctgcgtcagcagcccgagcggggccggcatctgctccccgccgtctgctccctctccactctcttctcaaatggctgacttctggttctccctcaagtgttttttacactgggtgttcaaatttattttaagagatagggagggaggggacataaagggaatgcatacattgctagtcacatttttaaaattaacattttggaatagtgtttatggaaatctttagcttttaatcatttttaccaatttgaacagtttaataaactggttctgctctcttctgaatctcatgcctttggcaccttggtaggtgcaggaggagctcagtgcaaaaatcactttggggcctcattaaccctttagagacaagctttgccccaggctgcggaccagacagatgcttagggaaggttgataccagcttcagtctctactggattagccctactctttcctttcccctccattatttagtgactctgtaagtaagttaaatacacccttattatttagctgttaagtaactataatgaaatctgctgcaaaatctctcttggaatccatgtgcccaggattatattagcattatttttaataaatctatatgcttaacata

SEQ ID NO: 349254 - DNA, 1500 bp, Homo sapiens
cgccccgggcgcgggcggagggaggaggaggcggcgcgcgcggcgccagcccgcagaagccggtggccgcgcaggaggacggagccctaaccgcaacccgcgccgcgccgcgccgatttgatttgtatccactgtcaccagcactgctcacttaggactttctggatccggacccaggcagcgcacactggactcttgaggaagaaggagactctaattttggattccttggtggaggaaaataaaacactctggtcttgccgccaacgatgcaagtgtgactgctggcgtcttcatgagctccagaggtcacagcacgctaccaaggactctcatggcccctcggatgatttccgagggagacataggaggcattgctcaaatcacctcctctctattcctgggcagaggcagtgtggcctccaatcggcacctcctccaggctcgtggcatcacctgcattgttaatgctaccattgagatccctaatttcaactggccccaatttgagtatgttaaagtgcctctggctgacatgccgcatgcccccattggactgtactttgacaccgtggctgacaagatccacagtgtgagcaggaagcacggggccaccttggtgcactgtgctgcaggggtgagccgctcagccacgctgtgtatcgcgtacctgatgaaattccacaacgtgtgcctgctggaggcgtacaactgggtgaaagcccaacgtaggcttctggaggcaactgatagactacgagcgccagctctttgggaagtcgacagttaaaatggtacagacaccttatggcatagttcccgacgtctatgagaaggagtcccgacacctgatgccttactgggggatttagtgccactgaagcctgcgtcagcagcccgagcggggccggcatctgctccccgccgtctgctccctctccactctcttctcaaatggctgacttctggttctccctcaagtgttttttacactgggtgttcaaatttattttaagagatagggagggaggggacataaagggaatgcatacattgctagtcacatttttaaaattaacattttggaatagtgtttatggaaatctttagcttttaatcatttttaccaatttgaacagtttaataaactggttctgctctcttctgaatctcatgcctttggcaccttggtaggtgcaggaggagctcagtgcaaaaatcactttggggcctcattaaccctttagagacaagctttgccccaggctgcggaccagacagatgcttagggaaggttgataccagcttcagtctctactggattagccctactctttcctttcccctccattatttagtgactctgtaagtaagttaaatacacccttattatttagctgttaagtaactataatgaaatctgctgcaaaatctctcttggaatccatgtgcccaggattatattagcattatttttaataaatctatatgcttaacata

SEQ ID NO: 349255 - DNA, 840 bp, Homo sapiens
cgccccgggcgcgggcggagggaggaggaggcggcgcgcgcggcgccagcccgcagaagccggtggccgcgcaggaggacggagccctaaccgcaacccgcgccgcgccgcgccgatttgatttgtatccactgtcaccagcactgctcacttaggactttctggatccggacccaggcagcgcacactggactcttgaggaagaaggagactctaattttggattccttggtggaggaaaataaaacactctggtcttgccgccaacgatgcaagtgtgactgctggcgtcttcatgagctccagaggtcacagcacgctaccaaggactctcatggcccctcggatgatttccgagggagacataggaggcattgctcaaatcacctcctctctattcctgggcagaggcagtgtggcctccaatcggcacctcctccaggctcgtggcatcacctgcattgttaatgctaccattgagatccctaatttcaactggccccaatttgagtatgttaaagtgcctctggctgacatgccgcatgcccccattggactgtactttgacaccgtggctgacaagatccacagtgtgagcaggaagcacggggccaccttggtgcactgtgctgcaggggtgagccgctcagccacgctgtgtatcgcgtacctgatgaaattccacaacgtgtgcctgctggaggcgtacaactgggtgaaagcccggcgacctgtcatcaggcccaacgtaggcttctggaggcaactgaatatactgaatgcaaagtattcgggcaccaggctataagccagcatgggtcaagatctctaaatgcaaat

SEQ ID NO: 349256 - DNA, 1263 bp, Homo sapiens
atatgtcaagaacacctcaacagagctgtaaaaaaaacacgacaggtctgacagttacctgggaaaggtgggggaacaggtggtagaagaacacattttttatgatgttcatggtacttacataacataaatgaataaaatagggccaacatggaaaagaaaacaaaatgaaggaaaatgtcaaattgccatcctgaacaccagcaccgcctgtaattagcgttcctggctgcagccacatctgcggtcctgctcctcatgaagccgtcctccgtgccatgtcccggccatgcctgtccttagcttcctggtgcacactgtcctccaccttgtgttcaggcacagggctgcttggctcacccttgctgcacctggcctgtccgtcctcccaccgcggtgccgcccaggccttcccactgcagggctggctaacggtgcatggaagagactcgagtccgtgttgtgtcctcatagcccaccgaggaggcagcagtgccggacatttcgcggataggttgtggtctctgagtctcctcctctcaagaggatgagatttgtctgtgttattgtcaaaactcttatttgtcacgccgcgggttatgtgtcagtaacaaaaagctgagatttaggccggtgtttcttactggtgcagcctttaaatgcacacctgcgaatgttcagtgcaccttccgcttcctggctctatttcagtcaaacctgaggtcgtagtgaaagtcggtgaggaattctttggaacttcctgattggctgtgtccttgcctccttgtcttcccgcagatttgatttgtatccactgtcaccagcactgctcacttaggactttctggatccggacccaggcagcgcacactggactcttgaggaagaaggagactctaattttggattccttggtggaggaaaataaaaaatctcatgcctttggcaccttggtaggtgcaggaggagctcagtgcaaaaatcactttggggcctcattaaccctttagagacaagctttgccccaggctgcggaccagacagatgcttagggaaggttgataccagcttcagtctctactggattagccctactctttcctttcccctccattatttagtgactctgtaagtaagttaaatacacccttattatttagctgttaagtaactataatgaaatctgctgcaaaatctctcttggaatccatgtgcccaggattatattagcattatttttaataaatctatatgcttaacata

SEQ ID NO: 349257 - DNA, 443 bp, Homo sapiens
ggacaatcaccagagagctgaattttacattgatttcacatgtttgtgtcttaggtgacttttcccaactgttaattgatagaaaatgatttgtctgtatccttgaaagattgtactgtattatttaaaaaaaaaccctctaatcttcccatttgacaaatgtgacagaaggctgtgatgaatcagtagcatttaaagtactgacacatacctgtattttgcaggaaggagactctaattttggattccttggtggaggaaaataaaacactctggtcttgccgccaacgatgcaagtgtgactgctggcgtcttcatgagctccagaggtcacagcacgctaccaaggactctcatggcccctcggatgatttccgagggagacataggaggcattgctcaaatcacctcctctctattcctgggcagaggcagtgtggcct

SEQ ID NO: 349258 - DNA, 477 bp, Homo sapiens
atagggagggaggggacataaagggaatgcatacattgctagtcacatttttaaaattaacattttggaatagtgtttatggaaatctttagcttttaatcatttttaccaatttgaacagtttaataaactggttctgctctcttctgaatctcatgcctttggcaccttggtaggtgcaggaggagctcagtgcaaaaatcactttggggcctcattaaccctttagagacaagctttgccccaggctgcggaccagacagatgcttagggaaggttgataccagcttcagtctctactggattagccctactctttcctttcccctccattatttagtgactctgtaagtaagttaaatacacccttattatttagctgttaagtaactataatgaaatctgctgcaaaatctctcttggaatccatgtgcccaggattatattagcattatttttaataaatctatatgctta

SEQ ID NO: 349259 - DNA, 2203 bp, Homo sapiens
atatgtcaagaacacctcaacagagctgtaaaaaaaacacgacaggtctgacagttacctgggaaaggtgggggaacaggtggtagaagaacacattttttatgatgttcatggtacttacataacataaatgaataaaatagggccaacatggaaaagaaaacaaaatgaaggaaaatgtcaaattgccatcctgaacaccagcaccgcctgtaattagcgttcctggctgcagccacatctgcggtcctgctcctcatgaagccgtcctccgtgccatgtcccggccatgcctgtccttagcttcctggtgcacactgtcctccaccttgtgttcaggcacagggctgcttggctcacccttgctgcacctggcctgtccgtcctcccaccgcggtgccgcccaggccttcccactgcagggctggctaacggtgcatggaagagactcgagtccgtgttgtgtcctcatagcccaccgaggaggcagcagtgccggacatttcgcggataggttgtggtctctgagtctcctcctctcaagaggatgagatttgtctgtgttattgtcaaaactcttatttgtcacgccgcgggttatgtgtcagtaacaaaaagctgagatttaggccggtgtttcttactggtgcagcctttaaatgcacacctgcgaatgttcagtgcaccttccgcttcctggctctatttcagtcaaacctgaggtcgtagtgaaagtcggtgaggaattctttggaacttcctgattggctgtgtccttgcctccttgtcttcccgcagatttgatttgtatccactgtcaccagcactgctcacttaggactttctggatccggacccaggcagcgcacactggactcttgaggaagaaggagactctaattttggattccttggtggaggaaaataaaacactctggtcttgccgccaacgatgcaagtgtgactgctggcgtcttcatgagctccagaggtcacagcacgctaccaaggactctcatggcccctcggatgatttccgagggagacataggaggcattgctcaaatcacctcctctctattcctgggcagaggcagtgtggcctccaatcggcacctcctccaggctcgtggcatcacctgcattgttaatgctaccattgagatccctaatttcaactggccccaatttgagtatgttaaagtgcctctggctgacatgccgcatgcccccattggactgtactttgacaccgtggctgacaagatccacagtgtgagcaggaagcacggggccaccttggtgcactgtgctgcaggggtgagccgctcagccacgctgtgtatcgcgtacctgatgaaattccacaacgtgtgcctgctggaggcgtacaactgggtgaaagcccggcgacctgtcatcaggcccaacgtaggcttctggaggcaactgatagactacgagcgccagctctttgggaagtcgacagttaaaatggtacagacaccttatggcatagttcccgacgtctatgagaaggagtcccgacacctgatgccttactgggggatttagtgccactgaagcctgcgtcagcagcccgagcggggccggcatctgctccccgccgtctgctccctctccactctcttctcaaatggctgacttctggttctccctcaagtgttttttacactgggtgttcaaatttattttaagagatagggagggaggggacataaagggaatgcatacattgctagtcacatttttaaaattaacattttggaatagtgtttatggaaatctttagcttttaatcatttttaccaatttgaacagtttaataaactggttctgctctcttctgaatctcatgcctttggcaccttggtaggtgcaggaggagctcagtgcaaaaatcactttggggcctcattaaccctttagagacaagctttgccccaggctgcggaccagacagatgcttagggaaggttgataccagcttcagtctctactggattagccctactctttcctttcccctccattatttagtgactctgtaagtaagttaaatacacccttattatttagctgttaagtaactataatgaaatctgctgcaaaatctctcttggaatccatgtgcccaggattatattagcattatttttaataaatctatatgcttaacata

SEQ ID NO: 349260 - DNA, 484 bp, Homo sapiens
gaccgcgtttagaggatcagtggcggcggcacccgcggccccgcgcggcgcggacggcgggcagcaccgtgcctgggccccctcctgctccgttgtatcgtgaccttctgaacctcagttgtcttgcctgtaaaatggaaatgaaggggatggttagcactcccactggatcaaataagctgcacctcatacataatgaggaaacagagacccggagagatacagtccttggccagtcagccaagttggagcatagcttggactttgaacccagtctcccagctcccagtctgcctgcagccctgtccctctccacccccaagccctgaccagaattctcttctgtacatccagaagggctttcccattcctcagactctctgaggcaattacagtccctaccactcatgtggcccttaatcatttactgcccttgcaaacagcctgtggtcaaaagcaataaagttcggacttggacagatca

SEQ ID NO: 349261 - DNA, 1561 bp, Homo sapiens
ctgacgcttgggggaggagaggtagttgcttggtatttttggctttccaccataaaactggagacagtttccttcattccaagtcgttttaatgtcactgttgaacgtgtgtgtcctgagttctcatctgaaagctttcatatcggttgactgcagatttgatttgtatccactgtcaccagcactgctcacttaggactttctggatccggacccaggcagcgcacactggactcttgaggaagaaggagactctaattttggattccttggtggaggaaaataaaacactctggtcttgccgccaacgatgcaagtgtgactgctggcgtcttcatgagctccagaggtcacagcacgctaccaaggactctcatggcccctcggatgatttccgagggagacataggaggcattgctcaaatcacctcctctctattcctgggcagaggcagtgtggcctccaatcggcacctcctccaggctcgtggcatcacctgcattgttaatgctaccattgagatccctaatttcaactggccccaatttgagtatgttaaagtgcctctggctgacatgccgcatgcccccattggactgtactttgacaccgtggctgacaagatccacagtgtgagcaggaagcacggggccaccttggtgcactgtgctgcaggggtgagccgctcagccacgctgtgtatcgcgtacctgatgaaattccacaacgtgtgcctgctggaggcgtacaactgggtgaaagcccggcgacctgtcatcaggcccaacgtaggcttctggaggcaactgatagactacgagcgccagctctttgggaagtcgacagttaaaatggtacagacaccttatggcatagttcccgacgtctatgagaaggagtcccgacacctgatgccttactgggggatttagtgccactgaagcctgcgtcagcagcccgagcggggccggcatctgctccccgccgtctgctccctctccactctcttctcaaatggctgacttctggttctccctcaagtgttttttacactgggtgttcaaatttattttaagagatagggagggaggggacataaagggaatgcatacattgctagtcacatttttaaaattaacattttggaatagtgtttatggaaatctttagcttttaatcatttttaccaatttgaacagtttaataaactggttctgctctcttctgaatctcatgcctttggcaccttggtaggtgcaggaggagctcagtgcaaaaatcactttggggcctcattaaccctttagagacaagctttgccccaggctgcggaccagacagatgcttagggaaggttgataccagcttcagtctctactggattagccctactctttcctttcccctccattatttagtgactctgtaagtaagttaaatacacccttattatttagctgttaagtaactataatgaaatctgctgcaaaatctctcttggaatccatgtgcccaggattatattagcattatttttaataaatctatatgcttaacata

SEQ ID NO: 349262 - DNA, 1805 bp, Homo sapiens
atttgaactcagtggtttcctgaatctagcaaagtatgctgctttgttttctcttagattaattttgcctaattttaaagctttgattctctttttacgaagacgaaaataaatctctctagtctgggcctttttcgtttcccaggattatgattaaaattatcactaacttttagatagtccagcacgcaccggatgactctgaagccggttgggcagtggagatcgggaagaacatgaaaaagcttcaaagcttttggttgaggacatcgggagatgtaaaccccaaacgcgggttttacttctcccctccacccctccccgcaaacccatgcctactcgttttgactgctcagcaattctgaggccaaccatttgcaacggcgaggagcaggggctgatttgatttgtatccactgtcaccagcactgctcacttaggactttctggatccggacccaggcagcgcacactggactcttgaggaagaaggagactctaattttggattccttggtggaggaaaataaaacactctggtcttgccgccaacgatgcaagtgtgactgctggcgtcttcatgagctccagaggtcacagcacgctaccaaggactctcatggcccctcggatgatttccgagggagacataggaggcattgctcaaatcacctcctctctattcctgggcagaggcagtgtggcctccaatcggcacctcctccaggctcgtggcatcacctgcattgttaatgctaccattgagatccctaatttcaactggccccaatttgagtatgttaaagtgcctctggctgacatgccgcatgcccccattggactgtactttgacaccgtggctgacaagatccacagtgtgagcaggaagcacggggccaccttggtgcactgtgctgcaggggtgagccgctcagccacgctgtgtatcgcgtacctgatgaaattccacaacgtgtgcctgctggaggcgtacaactgggtgaaagcccggcgacctgtcatcaggcccaacgtaggcttctggaggcaactgatagactacgagcgccagctctttgggaagtcgacagttaaaatggtacagacaccttatggcatagttcccgacgtctatgagaaggagtcccgacacctgatgccttactgggggatttagtgccactgaagcctgcgtcagcagcccgagcggggccggcatctgctccccgccgtctgctccctctccactctcttctcaaatggctgacttctggttctccctcaagtgttttttacactgggtgttcaaatttattttaagagatagggagggaggggacataaagggaatgcatacattgctagtcacatttttaaaattaacattttggaatagtgtttatggaaatctttagcttttaatcatttttaccaatttgaacagtttaataaactggttctgctctcttctgaatctcatgcctttggcaccttggtaggtgcaggaggagctcagtgcaaaaatcactttggggcctcattaaccctttagagacaagctttgccccaggctgcggaccagacagatgcttagggaaggttgataccagcttcagtctctactggattagccctactctttcctttcccctccattatttagtgactctgtaagtaagttaaatacacccttattatttagctgttaagtaactataatgaaatctgctgcaaaatctctcttggaatccatgtgcccaggattatattagcattatttttaataaatctatatgcttaacata

SEQ ID NO: 349263 - DNA, 292 bp, Homo sapiens
ttatccaggaatggattaactgatgaccaggttctgacctcactcactgcccaattgccttctaaaccactgataatggagcttaagctttgaggcaggagatgatggcagttggagaaagaagaaattaagttgctgtatatgtcttgtgggtatctcaaattgcttttaaaagtcaaatataaaaattgtagggctaaatataatttttgtgtaatcaattgtattggtgctctccattctgatatagataatagcagagttaagtgcttgtttatttaaataactttcc

SEQ ID NO: 349264 - DNA, 3586 bp, Homo sapiens
taagagacaacgtctcactgtgttgcccaggctggtgtcaaactcctgggctcaagggatcttcctgccttggcctcccgaagtgctggaattagaggcatgagccactgcacccagccagcaaacattctcttaatcttttaaagtaaccagtaaatctacaaatagtaaagtactattttcatcagggatttttttttttcttattttctagattttacagaaacaatgtgaaattattttggaaagataaggtaggattcttgaataaatctgaagggtctcacaattaagtgagaaacacctttaaaagcatagtaaagctacacctaaataactaaagcctaaatcattgtaatgttttgttggacttactttaacttgacctgttgtagccacaaataacaaatttcttggtaactgatgctattacagtaggtaatcaaaaatgaaaaattctagtcttatatactgcaggtttggggtgattgttaaggcactatcccctctggagaaatgtcatatggcatcagtgtaaacatgcacaagaaagaatttgtaaaaaaaaatgacaggttaatcaatgaaattagttgtatttactgtttggattttatttagtgtttccttgatgtctgtttcctcatctcttatttgttggaagattacttttctacctcttttttttcttttaaaattcctttcttacatttctgttgtttctttttctagtccttctctatctggataataaaatgaatgacaggaaagtcacccacatagaggtttgggatgaaccttttgcagattgctttttgtttcatacaagtataagatcatattttctttttcaacttagtaataggcaggcttcttggaacaataagtagattgatacactcctccccaaatcaaattatattgtatatcttttatattagatgtttgcagaaattctgtggcctttaagatcagttattcagcctttgtaattatgttatctagctatgttgaaaagataagtgcttactatataagcactcttagaaaaataattaactgattactctttcagaaaatagcaggtgtctcaatgctttttttccataattataaagaccattgtcaaaatctttggtttactaaatatttcactgagcatatatagagatacgttgcttgtggcataaaaagtcttgtagataacttactcacatttggcttttttttaattggtgcattttttaatttgcttttttgaaaattatgaagttaaaatttaattctaaggtagtatttttcatgtataaaactaataatgtagttaagcatactgtttgaataaaattataataaatggcacaattccttaaaccctgaaaataccaagttatattggaaaatagtggaaagaaaaaactagtggagaacatcttagaaaattctattgtggaaattacgatgattattttcagtgagaatgaatttatatatacaacaaaaatatacaaaagctaaccttctcatcctaaaaagatttttccctttgcttctgttttatttagccctgccatgcaccacattaattttatgaacataaatgatatttaacttttcttttttttttttttttgagacagagtctcactccgtcaccaggctggagtgcggtggcgcgatctcagctcactgcaacctccatttcccaggttcaagcaattctcctgcctcagcctcccaagtagctgggattacaggcacgcgccaccacgcccacctaatttttgtatttttagtagagacggggtttcaccatgttggtcaggctggcctcgatctcgtgacctcgtgatctgtccgcctcggccttccaaagtgctaggattacaggcgtgagccaccgcacctggccaacttttcatcttaagttgtttaaatttatgcacttttagatatcagaatatatgcttgaacaaaggaaatagtaaattagctatatgtctgctggtttcacttcgatgtggatatggatatgtggataaagacagtaaatgaaattaaaaccctgctgttttaaatatcattaccagatataattgagggaatattatatcaacaaacatattgaaacttggctttatttgtaacgtaaactatatataatccatacgtagccaaattagatttaaaatatacaattaatgaatagtactcaaagtgtttttgttgcactgttactctgaatatggactctctatatctggtatggcgtgactgggcataacttctgtaatgtatttcagttatatgtttttccttttattgccagcttctgataatgaaattttccaaagggatgagatataagaatcatcttttataaaaaccagtggggagtggggtattataatctagttctaaactgtccatttgctttatataaaggctttgatttcaataactgaccatttgatgaatatttaaattacacagaataatgtctacatagaataaacttaagtattcaagagccttaaagtgaaaaaatgaaccttttgactgccttaaaatactacttgctctgtaattcaggcatactagttactttccttggggtctgtttaaataatgccttaatagtgttctaatgtttctgaaatacagaactcaaagggtcttttagagcttttaattttacatagtgaatggaaatttaagtattacattttaaaacctgattgtacattggtaatttaaacatccaataacaggaaaatctagatacagtgatgtgttatacatacatgactgttaacatcagtaatattttatgatagtttaaggttttttattgttttctataacaagttatccaacaggttggactttgtaacatgatatccaaggaccaagttgcatatttaacatcgaatgaaaatgtagttgtacagttccaaaaataattaattttttaagggaatttttcaagacaaaaggcaaatattttgtttcaaacctacaagcaaattcattccaagaagtgaatatagtagtaaaacataaagactattgcaataaaaagtttccaggccagtgacttgtttaattacattcacatttttacattcactttgcctttcaaagcaggagtattttataaaactgaaataaaactttaaattgtcaagctggtgcttaaagttatgtaaaatctgatttaagtttatttcatttccaaggaaaggaccctgaaaggaggggacagggagcttcctaggtctgttgataaactaactgatgctttgtcaagtcttccaagttttcactgtaaataatacaactaacaatgtaattttgctgttttctaatagagaatgaatgaatatattaatgtattacatttgtttcatgataaaacagttttcactgatactgtgaaatcctttctctcctttctagccttgcaaaataccctactaaataaatcattttagacatggagtgcaggtggacactgtgtgaactgtttttggtcagttattgtagaaattgatagatgtaccaaataaactctatgcacattaaa

SEQ ID NO: 349265 - DNA, 3897 bp, Homo sapiens
gggagagcagtagtgagtagtcgctgagtaagagagagtcagcggatcgacgagacgtggagcgaatgagcagatgagaggagtcgcagaggagaacgtgcggagcgcttgatatatagagagcgcgacggagtaggcaagagtgaagagagaggagagttgagagtagcggatatgcgcggcgaggagagatgtgaagacgagagaggtctgaagagacgggtcgagtggttgtccgagtatatagtgagcagcgggttggcacgcggttgtaaacgcgcgagatattgaccgcctagtggcgagtaccaaagggccacgccgagaaaaactgaaagtagagagagtggaaagcgcccaaagtttgtgtagggtggtgtattaagagaccgtcagagtgtttcacagggtgtggcaaatcgtgggacgaaggattctcgcgcgtggccgaccgaagggtggaattagaggccttaacccttgcacagagcgagaacaattctgaatcctttccgaagtttctagattttacagaaacaatgtgaaattattttggaaagataaggtaggattcttgaataaatctgaagggtctcacaattaagtgagaaacacctttaaaagcatagtaaagctacacctaaataactaaagcctaaatcattgtaatgttttgttggacttactttaacttgacctgttgtagccacaaataacaaatttcttggtaactgatgctattacagtaggtaatcaaaaatgaaaaattctagtcttatatactgcaggtttggggtgattgttaaggcactatcccctctggagaaatgtcatatggcatcagtgtaaacatgcacaagaaagaatttgtaaaaaaaaatgacaggttaatcaatgaaattagttgtatttactgtttggattttatttagtgtttccttgatgtctgtttcctcatctcttatttgttggaagattacttttctacctcttttttttcttttaaaattcctttcttacatttctgttgtttctttttctagtccttctctatctggataataaaatgaatgacaggaaagtcacccacatagaggtttgggatgaaccttttgcagattgctttttgtttcatacaagtataagatcatattttctttttcaacttagtaataggcaggcttcttggaacaataagtagattgatacactcctccccaaatcaaattatattgtatatcttttatattagatgtttgcagaaattctgtggcctttaagatcagttattcagcctttgtaattatgttatctagctatgttgaaaagataagtgcttactatataagcactcttagaaaaataattaactgattactctttcagaaaatagcaggtgtctcaatgctttttttccataattataaagaccattgtcaaaatctttggtttactaaatatttcactgagcatatatagagatacgttgcttgtggcataaaaagtcttgtagataacttactcacatttggcttttttttaattggtgcattttttaatttgcttttttgaaaattatgaagttaaaatttaattctaaggtagtatttttcatgtataaaactaataatgtagttaagcatactgtttgaataaaattataataaatggcacaattccttaaaccctgaaaataccaagttatattggaaaatagtggaaagaaaaaactagtggagaacatcttagaaaattctattgtggaaattacgatgattattttcagtgagaatgaatttatatatacaacaaaaatatacaaaagctaaccttctcatcctaaaaagatttttccctttgcttctgttttatttagccctgccatgcaccacattaattttatgaacataaatgatatttaacttttcttttttttttttttttgagacagagtctcactccgtcaccaggctggagtgcggtggcgcgatctcagctcactgcaacctccatttcccaggttcaagcaattctcctgcctcagcctcccaagtagctgggattacaggcacgcgccaccacgcccacctaatttttgtatttttagtagagacggggtttcaccatgttggtcaggctggcctcgatctcgtgacctcgtgatctgtccgcctcggccttccaaagtgctaggattacaggcgtgagccaccgcacctggccaacttttcatcttaagttgtttaaatttatgcacttttagatatcagaatatatgcttgaacaaaggaaatagtaaattagctatatgtctgctggtttcacttcgatgtggatatggatatgtggataaagacagtaaatgaaattaaaaccctgctgttttaaatatcattaccagatataattgagggaatattatatcaacaaacatattgaaacttggctttatttgtaacgtaaactatatataatccatacgtagccaaattagatttaaaatatacaattaatgaatagtactcaaagtgtttttgttgcactgttactctgaatatggactctctatatctggtatggcgtgactgggcataacttctgtaatgtatttcagttatatgtttttccttttattgccagcttctgataatgaaattttccaaagggatgagatataagaatcatcttttataaaaaccagtggggagtggggtattataatctagttctaaactgtccatttgctttatataaaggctttgatttcaataactgaccatttgatgaatatttaaattacacagaataatgtctacatagaataaacttaagtattcaagagccttaaagtgaaaaaatgaaccttttgactgccttaaaatactacttgctctgtaattcaggcatactagttactttccttggggtctgtttaaataatgccttaatagtgttctaatgtttctgaaatacagaactcaaagggtcttttagagcttttaattttacatagtgaatggaaatttaagtattacattttaaaacctgattgtacattggtaatttaaacatccaataacaggaaaatctagatacagtgatgtgttatacatacatgactgttaacatcagtaatattttatgatagtttaaggttttttattgttttctataacaagttatccaacaggttggactttgtaacatgatatccaaggaccaagttgcatatttaacatcgaatgaaaatgtagttgtacagttccaaaaataattaattttttaagggaatttttcaagacaaaaggcaaatattttgtttcaaacctacaagcaaattcattccaagaagtgaatatagtagtaaaacataaagactattgcaataaaaagtttccaggccagtgacttgtttaattacattcacatttttacattcactttgcctttcaaagcaggagtattttataaaactgaaataaaactttaaattgtcaagctggtgcttaaagttatgtaaaatctgatttaagtttatttcatttccaaggaaaggaccctgaaaggaggggacagggagcttcctaggtctgttgataaactaactgatgctttgtcaagtcttccaagttttcactgtaaataatacaactaacaatgtaattttgctgttttctaatagagaatgaatgaatatattaatgtattacatttgtttcatgataaaacagttttcactgatactgtgaaatcctttctctcctttctagccttgcaaaataccctactaaataaatcattttagacatggagtgcaggtggacactgtgtgaactgtttttggtcagttattgtagaaattgatagatgtaccaaataaactctatgcacattaaa

SEQ ID NO: 349266 - DNA, 4895 bp, Homo sapiens
tgaagaaaaggaagtccctgaggactcactggaggagtgtgccatcacttgttcaaatagccatggcccttatgactccaaccagccacataggaaaaccaaaatcacatttgaggaagacaaagtcgactcaactctcattggctcatcctctcatgttgaatgggaggatgctgtacacattatcccagaaaatgaaagtgatgatgaggaagaggaagaaaaagggccagtgtctcccaggaatctgcaggagtctgaagaggaggaagtcccccaggagtcctgggatgaaggttattcgactctctcaattcctcctgaaaggacatcggtgggatcaagtgaaaaaggaggaccaagaggcaacaggtcccaggctcagcagggagctgctggctgagaaagagcctgaagtcttgcaggactcactggatagatgttattcaactccttcagtttatcttggactgactgactcatgccagccctacagaagtgccttttacgtattggagcaacagcgtgttggcttggctgttgacatggatgaaaccccggcggcagtggggctgttgctgttgctgtggctgtcgctgcccgtcaggctgccttcttttgtcgtttcccagcgctgcgcaggacttctcctggcggcgctgcggatccagggggtcggctgccaggtacaggtgaggacattgcgggaggccggctgggagccttttgtgcggccccagggacgcgcaaattctgaccagtcctccatgtctctcacccgcatcccaggggttgaggctgggcaaacgccgcgaaactatcgctcttccccgtcccgcttccgcgcctgtccaccctgggtaacggaaccagcatcgcggtagggacatcctcgctaggcccggccggaccattcctcagggtgggccctttccgaagccgggaccgctcctgcttgtcggcatcgctccccacaggccgacgtcgagagggcctgctttactcctcctctttctcctccttctcccgcggcttctgcgcggagaggcgtcgcccgggatctgggttttggaagaaggatctttgtgggaagacagggtgaatttatcacagaggaataacgagggagaggagaaaggtttcctaaagacaaaaaaaaatggaggaatctgtaaaccaaatgcagccactgaatgagaagcagatagccaattctcaggatggatatgtatggcaagtcactgacatgaatcgactacaccggttcttatgtttcggttctgaaggtgggacttattatatcaaagaacagaagttgggccttgaaaatgctgaagctttaattagattgattgaagatggcagaggatgtgaagtgatacaagaaataaagtcatttagtcaagaaggcagaaccacaaagcaagagcctatgctctttgcacttgccatttgttcccagtgctccgacataagcacaaaacaagcagcatttaaagctgtttctgaagtttgtcgcattcctacccatctctttacttttatccagtttaagaaagatctgaaggaaagcatgaaatgtggcatgtggggtcgtgccctccggaaggctatagcggactggtacaatgagaaaggtggcatggcccttgctctggcagttacaaaatataaacagagaaatggctggtctcacaaagatctattaagattgtcacatcttaaaccttccagtgaaggacttgcaattgtgaccaaatatattacaaagggctggaaagaagttcatgaattgtataaagaaaaagcactctctgtggagactgaaaaattattaaagtatctggaggctgtagagaaagtgaagcgcacaagagatgagctagaagtcattcatctaatagaagaacatagattagttagagaacatcttttaacaaatcacttaaagtctaaagaggtatggaaggctttgttacaagaaatgccgcttactgcattactaaggaatctaggaaagatgactgctaattcagtacttgaaccaggaaattcagaagtatctttagtatgtgaaaaactgtgtaatgaaaaactattaaaaaaggctcgtatacatccatttcatattttgatcgcattagaaacttacaagacaggtcatggtctcagagggaaactgaagtggcgccctgatgaagaaattttgaaagcattggatgctgctttttataaaacatttaagacagttgaaccaactggaaaacgtttcttactagctgttgatgtcagtgcttctatgaaccaaagagttttgggtagtatactcaacgctagtacagttgctgcagcaatgtgcatggttgtcacacgaacagaaaaagattcttatgtagttgctttttccgatgaaatggtaccatgtccagtgactacagatatgaccttacaacaggttttaatggctatgagtcagatcccagcaggtggaactgattgctctcttccaatgatctgggctcagaagacaaacacacctgctgatgtcttcattgtattcactgataatgagacctttgctggaggtgtccatcctgctattgctctgagggagtatcgaaagaaaatggatattccagctaaattgattgtttgtggaatgacatcaaatggtttcaccattgcagacccagatgatagaggcatgttggatatgtgcggctttgatactggagctctggatgtaattcgaaatttcacattagatatgatttaaccataagcagcagcacgatccagagatccattgccatcagtgatctcactaaaaatatacagctacttcccagctaatctccacccaatgaatgatgatggtatagtatgtgcataatggaaagttaccttactgaaaaaaaaaaaagaaggaaaaataagatgggcccaaaggtctatctactaaactagctcttggggaaatagcttcaggatactgtagtttcctctatctaatagagaactttttgttaacagacactgtaaaatagttttgctttgttgaataatacatgtgtacctaaaagaggtaagagcaaaaagtgtaattccacatcatgttacttgagaagtgcttaacgttttcttaaatgttttcattgggaaaggacagctttgataatgtccaaatactctgaaatgcactagaccatataactgtgatgaaatatgaaactcatctgtaaacttttataccaagggggtaaaaaaaaaaactaaggcatttgattaaattatgaatgagttttacaaattcctttcagagttttactaagatcacacaaataacagctttcttattcagtgaaaaagatattttatttctgatgttttatttgcactcgtggaatatgttaccattaatcagaaacatcatggcaacccctaagaatagactaagtttgtgttggctgagggattctatttggtttgcttttttttttttgctttgttatattttattgctacaaggggtgtgacttgataatgatttcctctgaattataataacatagccagatgtagtctcacactgtttttcatactcttaagtgtaaataatataaaatgtttcaagcgcttaactccccctcattcacaaagtataacaattaaaatctcaactataaccagtttagctttttccttacttttaaaataaaattttttacttttaactatttttttagttaatatttttaaaagtatacatgtcaatggcctctttgtccattattcattttgtggcaaaatattcttctttgatagtgtaaacaaataataaagcaatctaggtcctttaggtttgaaaggcaatttttgagtagcatattaccagctagccagtcactaggaatttttttcagtattatttgtatgtattaaacttttcattacactaaagtgcattattttattgagcaagtatccttcattgtgaggtttaacattaaagcaatctgttgaaatgccattatctttgctcataattttattatggccgtctaaggtagcttacacataaaacctgtttgcgtatctgttgttctctaaatattaattgaagatttactgaggatttgtaaggtccttctcgctgttatgtgaaaagtcaaactgtagttaatgtaaattatagccttttaggtgcttgggggttagagggtttatgttttttgggaaagggggactttagtagtctgaggatttctgtacatattttcttctgttttatgtgaaatttgggctctgggaataagaaaatattcctttcaaatttatttgacatattaatgctggttttgatatgtacccattccttcaaggcaactggtatcagtttttaagtgtgatttacctgagatatttttgttcagcaaagctcatagcaccctcacccccactccagacatgcattgcttctgatgttgttcacgtttttaaccctgtcaagcattgaactgaatatattagctacttttgacacattaaaatattacgttcagattgaatttaaagtttaaagaaactaatagaattacgtaatagttattgaattgtttaagtaaacccaagatcttaaaaattataacatgatcattttattcctaatagaaatgttaaatagaatatagtacaaaagtgcattaccttcagttgtgtactatttccataatacttttagacaaatatatctataagttaatattaaatccatcaaggatacaagattggatggatatgacctttctgaagtatttaggtaggtctaattaaatggactagggtaacatttaagaaagaaaggataagtaggagaagctaccacagaaggtaac

SEQ ID NO: 349267 - DNA, 3948 bp, Homo sapiens
tcattttctgcctttcctgatttttcttcaggacatttatattgattttgtactaagggaaaaactatggaacttaaaagatgtttttaaattaaaagagttaataacatttcagtaaacctacattttgttttccttttgtaattttattgtgcccatctagttgtaataacattttgcctttttgttaggtttcctaaagacaaaaaaaaatggaggaatctgtaaaccaaatgcagccactgaatgagaagcagatagccaattctcaggatggatatgtatggcaagtcactgacatgaatcgactacaccggttcttatgtttcggttctgaaggtgggacttattatatcaaagaacagaagttgggccttgaaaatgctgaagctttaattagattgattgaagatggcagaggatgtgaagtgatacaagaaataaagtcatttagtcaagaaggcagaaccacaaagcaagagcctatgctctttgcacttgccatttgttcccagtgctccgacataagcacaaaacaagcagcatttaaagctgtttctgaagtttgtcgcattcctacccatctctttacttttatccagtttaagaaagatctgaaggaaagcatgaaatgtggcatgtggggtcgtgccctccggaaggctatagcggactggtacaatgagaaaggtggcatggcccttgctctggcagttacaaaatataaacagagaaatggctggtctcacaaagatctattaagattgtcacatcttaaaccttccagtgaaggacttgcaattgtgaccaaatatattacaaagggctggaaagaagttcatgaattgtataaagaaaaagcactctctgtggagactgaaaaattattaaagtatctggaggctgtagagaaagtgaagcgcacaagagatgagctagaagtcattcatctaatagaagaacatagattagttagagaacatcttttaacaaatcacttaaagtctaaagaggtatggaaggctttgttacaagaaatgccgcttactgcattactaaggaatctaggaaagatgactgctaattcagtacttgaaccaggaaattcagaagtatctttagtatgtgaaaaactgtgtaatgaaaaactattaaaaaaggctcgtatacatccatttcatattttgatcgcattagaaacttacaagacaggtcatggtctcagagggaaactgaagtggcgccctgatgaagaaattttgaaagcattggatgctgctttttataaaacatttaagacagttgaaccaactggaaaacgtttcttactagctgttgatgtcagtgcttctatgaaccaaagagttttgggtagtatactcaacgctagtacagttgctgcagcaatgtgcatggttgtcacacgaacagaaaaagattcttatgtagttgctttttccgatgaaatggtaccatgtccagtgactacagatatgaccttacaacaggttttaatggctatgagtcagatcccagcaggtggaactgattgctctcttccaatgatctgggctcagaagacaaacacacctgctgatgtcttcattgtattcactgataatgagacctttgctggaggtgtccatcctgctattgctctgagggagtatcgaaagaaaatggatattccagctaaattgattgtttgtggaatgacatcaaatggtttcaccattgcagacccagatgatagaggcatgttggatatgtgcggctttgatactggagctctggatgtaattcgaaatttcacattagatatgatttaaccataagcagcagcacgatccagagatccattgccatcagtgatctcactaaaaatatacagctacttcccagctaatctccacccaatgaatgatgatggtatagtatgtgcataatggaaagttaccttactgaaaaaaaaaaaagaaggaaaaataagatgggcccaaaggtctatctactaaactagctcttggggaaatagcttcaggatactgtagtttcctctatctaatagagaactttttgttaacagacactgtaaaatagttttgctttgttgaataatacatgtgtacctaaaagaggtaagagcaaaaagtgtaattccacatcatgttacttgagaagtgcttaacgttttcttaaatgttttcattgggaaaggacagctttgataatgtccaaatactctgaaatgcactagaccatataactgtgatgaaatatgaaactcatctgtaaacttttataccaagggggtaaaaaaaaaaactaaggcatttgattaaattatgaatgagttttacaaattcctttcagagttttactaagatcacacaaataacagctttcttattcagtgaaaaagatattttatttctgatgttttatttgcactcgtggaatatgttaccattaatcagaaacatcatggcaacccctaagaatagactaagtttgtgttggctgagggattctatttggtttgcttttttttttttgctttgttatattttattgctacaaggggtgtgacttgataatgatttcctctgaattataataacatagccagatgtagtctcacactgtttttcatactcttaagtgtaaataatataaaatgtttcaagcgcttaactccccctcattcacaaagtataacaattaaaatctcaactataaccagtttagctttttccttacttttaaaataaaattttttacttttaactatttttttagttaatatttttaaaagtatacatgtcaatggcctctttgtccattattcattttgtggcaaaatattcttctttgatagtgtaaacaaataataaagcaatctaggtcctttaggtttgaaaggcaatttttgagtagcatattaccagctagccagtcactaggaatttttttcagtattatttgtatgtattaaacttttcattacactaaagtgcattattttattgagcaagtatccttcattgtgaggtttaacattaaagcaatctgttgaaatgccattatctttgctcataattttattatggccgtctaaggtagcttacacataaaacctgtttgcgtatctgttgttctctaaatattaattgaagatttactgaggatttgtaaggtccttctcgctgttatgtgaaaagtcaaactgtagttaatgtaaattatagccttttaggtgcttgggggttagagggtttatgttttttgggaaagggggactttagtagtctgaggatttctgtacatattttcttctgttttatgtgaaatttgggctctgggaataagaaaatattcctttcaaatttatttgacatattaatgctggttttgatatgtacccattccttcaaggcaactggtatcagtttttaagtgtgatttacctgagatatttttgttcagcaaagctcatagcaccctcacccccactccagacatgcattgcttctgatgttgttcacgtttttaaccctgtcaagcattgaactgaatatattagctacttttgacacattaaaatattacgttcagattgaatttaaagtttaaagaaactaatagaattacgtaatagttattgaattgtttaagtaaacccaagatcttaaaaattataacatgatcattttattcctaatagaaatgttaaatagaatatagtacaaaagtgcattaccttcagttgtgtactatttccataatacttttagacaaatatatctataagttaatattaaatccatcaaggatacaagattggatggatatgacctttctgaagtatttaggtaggtctaattaaatggactagggtaacatttaagaaagaaaggataagtaggagaagctaccacagaaggtaac

SEQ ID NO: 349268 - DNA, 3727 bp, Homo sapiens
aaactgctttaaggaatttttattttcactggaaaaacaaaatagaagatatactcacaggaaacatttactcatttaagatgattttgcaccaaaatctggaagatagcaagagtcacaatacttgagaagttcctgcatgttagtgttaacttttgatcaagttatttagcattcaaaaataacataataggctcagttggcatagagatgtgtttcatgtggcctatacaatatttttgggtaaaaatgaattctttgtcattatctttaaaaatcgacataaaaacccatattctggcttctcttgaaagtaagttttttttcttttggcagcactaagtcaatacgtgtctacaccacttgtcagggcacactctgttcagtcaccacaccctaacaactctctattacatcactgtgtttgtttgtttgtttgtttgtttgagacagagtctcactctgttggccaggctggagcacagtggcacgatcttggcccactgtaacctctgcctcctcagttcaagtgattctcctgcctcagcctcctgagtagctggtattacaggacttgcaattgtgaccaaatatattacaaagggctggaaagaagttcatgaattgtataaagaaaaagcactctctgtggagactgaaaaattattaaagtatctggaggctgtagagaaagtgaagcgcacaagagatgagctagaagtcattcatctaatagaagaacatagattagttagagaacatcttttaacaaatcacttaaagtctaaagaggtatggaaggctttgttacaagaaatgccgcttactgcattactaaggaatctaggaaagatgactgctaattcagtacttgaaccaggaaattcagaagtatctttagtatgtgaaaaactgtgtaatgaaaaactattaaaaaaggctcgtatacatccatttcatattttgatcgcattagaaacttacaagacaggtcatggtctcagagggaaactgaagtggcgccctgatgaagaaattttgaaagcattggatgctgctttttataaaacatttaagacagttgaaccaactggaaaacgtttcttactagctgttgatgtcagtgcttctatgaaccaaagagttttgggtagtatactcaacgctagtacagttgctgcagcaatgtgcatggttgtcacacgaacagaaaaagattcttatgtagttgctttttccgatgaaatggtaccatgtccagtgactacagatatgaccttacaacaggttttaatggctatgagtcagatcccagcaggtggaactgattgctctcttccaatgatctgggctcagaagacaaacacacctgctgatgtcttcattgtattcactgataatgagacctttgctggaggtgtccatcctgctattgctctgagggagtatcgaaagaaaatggatattccagctaaattgattgtttgtggaatgacatcaaatggtttcaccattgcagacccagatgatagaggcatgttggatatgtgcggctttgatactggagctctggatgtaattcgaaatttcacattagatatgatttaaccataagcagcagcacgatccagagatccattgccatcagtgatctcactaaaaatatacagctacttcccagctaatctccacccaatgaatgatgatggtatagtatgtgcataatggaaagttaccttactgaaaaaaaaaaaagaaggaaaaataagatgggcccaaaggtctatctactaaactagctcttggggaaatagcttcaggatactgtagtttcctctatctaatagagaactttttgttaacagacactgtaaaatagttttgctttgttgaataatacatgtgtacctaaaagaggtaagagcaaaaagtgtaattccacatcatgttacttgagaagtgcttaacgttttcttaaatgttttcattgggaaaggacagctttgataatgtccaaatactctgaaatgcactagaccatataactgtgatgaaatatgaaactcatctgtaaacttttataccaagggggtaaaaaaaaaaactaaggcatttgattaaattatgaatgagttttacaaattcctttcagagttttactaagatcacacaaataacagctttcttattcagtgaaaaagatattttatttctgatgttttatttgcactcgtggaatatgttaccattaatcagaaacatcatggcaacccctaagaatagactaagtttgtgttggctgagggattctatttggtttgcttttttttttttgctttgttatattttattgctacaaggggtgtgacttgataatgatttcctctgaattataataacatagccagatgtagtctcacactgtttttcatactcttaagtgtaaataatataaaatgtttcaagcgcttaactccccctcattcacaaagtataacaattaaaatctcaactataaccagtttagctttttccttacttttaaaataaaattttttacttttaactatttttttagttaatatttttaaaagtatacatgtcaatggcctctttgtccattattcattttgtggcaaaatattcttctttgatagtgtaaacaaataataaagcaatctaggtcctttaggtttgaaaggcaatttttgagtagcatattaccagctagccagtcactaggaatttttttcagtattatttgtatgtattaaacttttcattacactaaagtgcattattttattgagcaagtatccttcattgtgaggtttaacattaaagcaatctgttgaaatgccattatctttgctcataattttattatggccgtctaaggtagcttacacataaaacctgtttgcgtatctgttgttctctaaatattaattgaagatttactgaggatttgtaaggtccttctcgctgttatgtgaaaagtcaaactgtagttaatgtaaattatagccttttaggtgcttgggggttagagggtttatgttttttgggaaagggggactttagtagtctgaggatttctgtacatattttcttctgttttatgtgaaatttgggctctgggaataagaaaatattcctttcaaatttatttgacatattaatgctggttttgatatgtacccattccttcaaggcaactggtatcagtttttaagtgtgatttacctgagatatttttgttcagcaaagctcatagcaccctcacccccactccagacatgcattgcttctgatgttgttcacgtttttaaccctgtcaagcattgaactgaatatattagctacttttgacacattaaaatattacgttcagattgaatttaaagtttaaagaaactaatagaattacgtaatagttattgaattgtttaagtaaacccaagatcttaaaaattataacatgatcattttattcctaatagaaatgttaaatagaatatagtacaaaagtgcattaccttcagttgtgtactatttccataatacttttagacaaatatatctataagttaatattaaatccatcaaggatacaagattggatggatatgacctttctgaagtatttaggtaggtctaattaaatggactagggtaacatttaagaaagaaaggataagtaggagaagctaccacagaaggtaac

SEQ ID NO: 349269 - DNA, 3521 bp, Homo sapiens
taagagacaacgtctcactgtgttgcccaggctggtgtcaaactcctgggctcaagggatcttcctgccttggcctcccgaagtgctggaattagaggcatgagccactgcacccagccagcaaacattctcttaatcttttaaagtaaccagtaaatctacaaatagtaaagtactattttcatcagggatttttttttttcttattttctagattttacagaaacaatgtgaaattattttggaaagataaggtaggattcttgaataaatctgaagggtctcacaattaagtgagaaacacctttaaaagcatagtaaagctacacctaaataactaaagcctaaatcattgtaatgttttgttggacttactttaacttgacctgttgtagccacaaataacaaatttcttggtaactgatgctattacagtaggtaatcaaaaatgaaaaattctagtcttatatactgcaggtttggggtgattgttaaggcactatcccctctggagaaatgtcatatggcatcagtgtaaacatgcacaagaaagaatttgtaaaaaaaaatgacaggttaatcaatgaaattagttgtatttactgtttggattttatttagtgtttccttgatgtctgtttcctcatctcttatttgttggaagattacttttctacctcttttttttcttttaaaattcctttcttacatttctgttgtttctttttctagtccttctctatctggataataaaatgaatgacaggaaagtcacccacatagaggtttgggatgaaccttttgcagattgctttttgtttcatacaagtataagatcatattttctttttcaacttagtaataggcaggcttcttggaacaataagtagattgatacactcctccccaaatcaaattatattgtatatcttttatattagatgtttgcagaaattctgtggcctttaagatcagttattcagcctttgtaattatgttatctagctatgttgaaaagataagtgcttactatataagcactcttagaaaaataattaactgattactctttcagaaaatagcaggtgtctcaatgctttttttccataattataaagaccattgtcaaaatctttggtttactaaatatttcactgagcatatatagagatacgttgcttgtggcataaaaagtcttgtagataacttactcacatttggcttttttttaattggtgcattttttaatttgcttttttgaaaattatgaagttaaaatttaattctaaggtagtatttttcatgtataaaactaataatgtagttaagcatactgtttgaataaaattataataaatggcacaattccttaaaccctgaaaataccaagttatattggaaaatagtggaaagaaaaaactagtggagaacatcttagaaaattctattgtggaaattacgatgattattttcagtgagaatgaatttatatatacaacaaaaatatacaaaagctaaccttctcatcctaaaaagatttttccctttgcttctgttttatttagccctgccatgcaccacattaattttatgaacataaatgatatttaacttttcttttttttttttttttgagacagagtctcactccgtcaccaggctggagtgcggtggcgcgatctcagctcactgcaacctccatttcccaggttcaagcaattctcctgcctcagcctcccaagtagctgggattacaggcacgcgccaccacgcccacctaatttttgtatttttagtagagacggggtttcaccatgttggtcaggctggcctcgatctcgtgacctcgtgatctgtccgcctcggccttccaaagtgctaggattacaggcgtgagccaccgcacctggccaacttttcatcttaagttgtttaaatttatgcacttttagatatcagaatatatgcttgaacaaaggaaatagtaaattagctatatgtctgctggtttcacttcgatgtggatatggatatgtggataaagacagtaaatgaaattaaaaccctgctgttttaaatatcattaccagatataattgagggaatattatatcaacaaacatattgaaacttggctttatttgtaacgtaaactatatataatccatacgtagccaaattagatttaaaatatacaattaatgaatagtactcaaagtgtttttgttgcactgttactctgaatatggactctctatatctggtatggcgtgactgggcataacttctgtaatgtatttcagttatatgtttttccttttattgccagcttctgataatgaaattttccaaagggatgagatataagaatcatcttttataaaaaccagtggggagtggggtattataatctagttctaaactgtccatttgctttatataaaggctttgatttcaataactgaccatttgatgaatatttaaattacacagaataatgtctacatagaataaacttaagtattcaagagccttaaagtgaaaaaatgaaccttttgactgccttaaaatactacttgctctgtaattcaggcatactagttactttccttggggtctgtttaaataatgccttaatagtgttctaatgtttctgaaatacagaactcaaagggtcttttagagcttttaattttacatagtgaatggaaatttaagtattacattttaaaacctgattgtacattggtaatttaaacatccaataacaggaaaatctagatacagtgatgtgttatacatacatgactgttaacatcagtaatatttatgatatccaaggaccaagttgcatatttaacatcgaatgaaaatgtagttgtacagttccaaaaataattaattttttaagggaatttttcaagacaaaaggcaaatattttgtttcaaacctacaagcaaattcattccaagaagtgaatatagtagtaaaacataaagactattgcaataaaaagtttccaggccagtgacttgtttaattacattcacatttttacattcactttgcctttcaaagcaggagtattttataaaactgaaataaaactttaaattgtcaagctggtgcttaaagttatgtaaaatctgatttaagtttatttcatttccaaggaaaggaccctgaaaggaggggacagggagcttcctaggtctgttgataaactaactgatgctttgtcaagtcttccaagttttcactgtaaataatacaactaacaatgtaattttgctgttttctaatagagaatgaatgaatatattaatgtattacatttgtttcatgataaaacagttttcactgatactgtgaaatcctttctctcctttctagccttgcaaaataccctactaaataaatcattttagacatggagtgcaggtggacactgtgtgaactgtttttggtcagttattgtagaaattgatagatgtaccaaataaactctatgcacattaaa

SEQ ID NO: 349270 - DNA, 2860 bp, Homo sapiens
ccctcctcagaaaatcaagagaagcagaatccatggcaacccaccaccttccatgaaaaactattaaaaaaggctcgtatacatccatttcatattttgatcgcattagaaacttacaagacaggtcatggtctcagagggaaactgaagtggcgccctgatgaagaaattttgaaagcattggatgctgctttttataaaacatttaagacagttgaaccaactggaaaacgtttcttactagctgttgatgtcagtgcttctatgaaccaaagagttttgggtagtatactcaacgctagtacagttgctgcagcaatgtgcatggttgtcacacgaacagaaaaagattcttatgtagttgctttttccgatgaaatggtaccatgtccagtgactacagatatgaccttacaacaggttttaatggctatgagtcagatcccagcaggtggaactgattgctctcttccaatgatctgggctcagaagacaaacacacctgctgatgtcttcattgtattcactgataatgagacctttgctggaggtgtccatcctgctattgctctgagggagtatcgaaagaaaatggatattccagctaaattgattgtttgtggaatgacatcaaatggtttcaccattgcagacccagatgatagaggcatgttggatatgtgcggctttgatactggagctctggatgtaattcgaaatttcacattagatatgatttaaccataagcagcagcacgatccagagatccattgccatcagtgatctcactaaaaatatacagctacttcccagctaatctccacccaatgaatgatgatggtatagtatgtgcataatggaaagttaccttactgaaaaaaaaaaaagaaggaaaaataagatgggcccaaaggtctatctactaaactagctcttggggaaatagcttcaggatactgtagtttcctctatctaatagagaactttttgttaacagacactgtaaaatagttttgctttgttgaataatacatgtgtacctaaaagaggtaagagcaaaaagtgtaattccacatcatgttacttgagaagtgcttaacgttttcttaaatgttttcattgggaaaggacagctttgataatgtccaaatactctgaaatgcactagaccatataactgtgatgaaatatgaaactcatctgtaaacttttataccaagggggtaaaaaaaaaaactaaggcatttgattaaattatgaatgagttttacaaattcctttcagagttttactaagatcacacaaataacagctttcttattcagtgaaaaagatattttatttctgatgttttatttgcactcgtggaatatgttaccattaatcagaaacatcatggcaacccctaagaatagactaagtttgtgttggctgagggattctatttggtttgcttttttttttttgctttgttatattttattgctacaaggggtgtgacttgataatgatttcctctgaattataataacatagccagatgtagtctcacactgtttttcatactcttaagtgtaaataatataaaatgtttcaagcgcttaactccccctcattcacaaagtataacaattaaaatctcaactataaccagtttagctttttccttacttttaaaataaaattttttacttttaactatttttttagttaatatttttaaaagtatacatgtcaatggcctctttgtccattattcattttgtggcaaaatattcttctttgatagtgtaaacaaataataaagcaatctaggtcctttaggtttgaaaggcaatttttgagtagcatattaccagctagccagtcactaggaatttttttcagtattatttgtatgtattaaacttttcattacactaaagtgcattattttattgagcaagtatccttcattgtgaggtttaacattaaagcaatctgttgaaatgccattatctttgctcataattttattatggccgtctaaggtagcttacacataaaacctgtttgcgtatctgttgttctctaaatattaattgaagatttactgaggatttgtaaggtccttctcgctgttatgtgaaaagtcaaactgtagttaatgtaaattatagccttttaggtgcttgggggttagagggtttatgttttttgggaaagggggactttagtagtctgaggatttctgtacatattttcttctgttttatgtgaaatttgggctctgggaataagaaaatattcctttcaaatttatttgacatattaatgctggttttgatatgtacccattccttcaaggcaactggtatcagtttttaagtgtgatttacctgagatatttttgttcagcaaagctcatagcaccctcacccccactccagacatgcattgcttctgatgttgttcacgtttttaaccctgtcaagcattgaactgaatatattagctacttttgacacattaaaatattacgttcagattgaatttaaagtttaaagaaactaatagaattacgtaatagttattgaattgtttaagtaaacccaagatcttaaaaattataacatgatcattttattcctaatagaaatgttaaatagaatatagtacaaaagtgcattaccttcagttgtgtactatttccataatacttttagacaaatatatctataagttaatattaaatccatcaaggatacaagattggatggatatgacctttctgaagtatttaggtaggtctaattaaatggactagggtaacatttaagaaagaaaggataagtaggagaagctaccacagaaggtaac

SEQ ID NO: 349271 - DNA, 4628 bp, Homo sapiens
taagagacaacgtctcactgtgttgcccaggctggtgtcaaactcctgggctcaagggatcttcctgccttggcctcccgaagtgctggaattagaggcatgagccactgcacccagccagcaaacattctcttaatcttttaaagtaaccagtaaatctacaaatagtaaagtactattttcatcagggatttttttttttcttattttctagattttacagaaacaatgtgaaattattttggaaagataaggtaggattcttgaataaatctgaagggtctcacaattaagtgagaaacacctttaaaagcatagtaaagctacacctaaataactaaagcctaaatcattgtaatgttttgttggacttactttaacttgacctgttgtagccacaaataacaaatttcttggtaactgatgctattacagtaggtaatcaaaaatgaaaaattctagtcttatatactgcaggtttggggtgattgttaaggcactatcccctctggagaaatgtcatatggcatcagtgtaaacatgcacaagaaagaatttgtaaaaaaaaatgacaggttaatcaatgaaattagttgtatttactgtttggattttatttagtgtttccttgatgtctgtttcctcatctcttatttgttggaagattacttttctacctcttttttttcttttaaaattcctttcttacatttctgttgtttctttttctagtccttctctatctggataataaaatgaatgacaggaaagtcacccacatagaggtttgggatgaaccttttgcagattgctttttgtttcatacaagtataagatcatattttctttttcaacttagtaataggcaggcttcttggaacaataagtagattgatacactcctccccaaatcaaattatattgtatatcttttatattagatgtttgcagaaattctgtggcctttaagatcagttattcagcctttgtaattatgttatctagctatgttgaaaagataagtgcttactatataagcactcttagaaaaataattaactgattactctttcagaaaatagcaggtgtctcaatgctttttttccataattataaagaccattgtcaaaatctttggtttactaaatatttcactgagcatatatagagatacgttgcttgtggcataaaaagtcttgtagataacttactcacatttggcttttttttaattggtgcattttttaatttgcttttttgaaaattatgaagttaaaatttaattctaaggtagtatttttcatgtataaaactaataatgtagttaagcatactgtttgaataaaattataataaatggcacaattccttaaaccctgaaaataccaagttatattggaaaatagtggaaagaaaaaactagtggagaacatcttagaaaattctattgtggaaattacgatgattattttcagtgagaatgaatttatatatacaacaaaaatatacaaaagctaaccttctcatcctaaaaagatttttccctttgcttctgttttatttagccctgccatgcaccacattaattttatgaacataaatgatatttaacttttcttttttttttttttttgagacagagtctcactccgtcaccaggctggagtgcggtggcgcgatctcagctcactgcaacctccatttcccaggttcaagcaattctcctgcctcagcctcccaagtagctgggattacaggcacgcgccaccacgcccacctaatttttgtatttttagtagagacggggtttcaccatgttggtcaggctggcctcgatctcgtgacctcgtgatctgtccgcctcggccttccaaagtgctaggattacaggcgtgagccaccgcacctggccaacttttcatcttaagttgtttaaatttatgcacttttagatatcagaatatatgcttgaacaaaggaaatagtaaattagctatatgtctgctggtttcacttcgatgtggatatggatatgtggataaagacagtaaatgaaattaaaaccctgctgttttaaatatcattaccagatataattgagggaatattatatcaacaaacatattgaaacttggctttatttgtaacgtaaactatatataatccatacgtagccaaattagatttaaaatatacaattaatgaatagtactcaaagtgtttttgttgcactgttactctgaatatggactctctatatctggtatggcgtgactgggcataacttctgtaatgtatttcagttatatgtttttccttttattgccagcttctgataatgaaattttccaaagggatgagatataagaatcatcttttataaaaaccagtggggagtggggtattataatctagttctaaactgtccatttgctttatataaaggctttgatttcaataactgaccatttgatgaatatttaaattacacagaataatgtctacatagaataaacttaagtattcaagagccttaaagtgaaaaaatgaaccttttgactgccttaaaatactacttgctctgtaattcaggcatactagttactttccttggggtctgtttaaataatgccttaatagtgttctaatgtttctgaaatacagaactcaaagggtcttttagagcttttaattttacatagtgaatggaaatttaagtattacattttaaaacctgattgtacattggtaatttaaacatccaataacaggaaaatctagatacagtgatgtgttatacatacatgactgttaacatcagtaatattttatgatagtttaaggttttttattgttttctataacaagttatccaacaggttggactttgtaacatgatatccaaggaccaagttgcatatttaacatcgaatgaaaatgtagttgtacagttccaaaaataattaattttttaagggaatttttcaagacaaaaggcaaatattttgtttcaaacctacaagcaaattcattccaagaagtgaatatagtagtaaaacataaagactattgcaataaaaagtttccaggccagtgacttgtttaattacattcacatttttacattcactttgcctttcaaagcaggagtattttataaaactgaaataaaactttaaattgtcaagctggtgcttaaagttatgtaaaatctgatttaagtttatttcatttccaaggaaaggaccctgaaaggaggggacagggagcttcctaggtctgttgataaactaactgatgctttgtcaagtcttccaagttttcactgtaaataatacaactaacaatgtaattttgctgttttctaatagagaatgaatgaatatattaatgtattacatttgtttcatgataaaacagttttcactgatactgtgaaatcctttctctcctttctagccttgcaaaataccctactaaataaatcattttagacatggagtgcaggtggacactgtgtgaactgtttttggtcagttattgtagaaattgatagatgtaccaaataaactctatgcacattaaacaagtgtctgtctatctctttcaagaaatacgaatgttaaggttataatatgccttaaaaaatctaaagcctttagtaatcttgtatttgaacaaggtaaaatttaagttttgataattaatattgaccttttaatgtatctagttttatgtaagtattaaaagtatatgaagttaaagattctttacccatggaattcaattataacaaaatgattagatttaatgaaaacaaattatttaaagttttaaaataggattcttttgtgaaaagatctactcaaaattgcctttggcaaaagttatcatccaaacacaaaaagtcaactatgcaaataaaaacactgtttcagtgccaatttgcagacatttttctcctcaattcccataaaaattttctgaaaagttctaagatctgaactgtgggtaactgaaagcaagttacatcagaatatattcaccaaaacttcaaaacatttggttgattttacagcactcatttcaacacttgtacaagaaggatcacaaattatacatactagatttaataaattttaacaatattaaaccttatgaagaaaacctgactttaaaagatgttgttcaaatggtaattttttatcagtaaacagtaaaatccaggtacagaagatccctttttttcttcaacagcttttcaattacagatattttggcaattaaaatgtaaattgattatctaatgataaagtgaaaaatggcctagttttttatattaatgaactccagtaaacagctcgtatttcagatcttaaaataaagggccgggcattgtggcttacacctgtaatcatagcacttcaggaggccaaaggaggaggactgcttgagcctaggagttcaaaactaaaaagttgtaactatggggatcttgctgggcaacacagtaagacccccatatttacaaaaaactaaaaagaattagttgagcatggtggcatgtgcctgtagccctagctattcagaaggctacggtaggaggatcacttcagcccaggagtttg

SEQ ID NO: 349272 - DNA, 1234 bp, Homo sapiens
cggggcaaaagaagaggggcaggactcgttcccgggaaccgaacctggaatccccggcggcagtggggctgttgctgttgctgtggctgtcgctgcccgtcaggctgccttcttttgtcgtttcccagcgctgcgcaggacttctcctggcggcgctgcggatccagggggtcggctgccaggtacaggtttcctaaagacaaaaaaaaatggaggaatctgtaaaccaaatgcagccactgaatgagaagcagatagccaattctcaggatggatatgtatggcaagtcactgacatgaatcgactacaccggttcttatgtttcggttctgaaggtgggacttattatatcaaagaacagaagttgggccttgaaaatgctgaagctttaattagattgattgaagatggcagaggatgtgaagtgatacaagaaataaagtcatttagtcaagaaggcagaaccacaaagcaagagcctatgctctttgcacttgccatttgttcccagtgctccgacataagcacaaaacaagcagcatttaaagctgtttctgaagtttgtcgcattcctacccatctctttacttttatccagtttaagaaagatctgaaggaaagcatgaaatgtggcatgtggggtcgtgccctccggaaggctatagcggactggtacaatgagaaaggtggcatggcccttgctctggcagttacaaaatataaacagagaaatggctggtctcacaaagatctattaagattgtcacatcttaaaccttccagtgaaggacttgcaattgtgaccaaatatattacaaagggctggaaagaagttcatgaattgtataaagaaaaagcactctctgtggagactgaaaaattattaaagtatctggaggctgtagagaaagtgaagcgcacaagagatgagctagaagtcattcatctaatagaagaacatagattagttagagaacatcttttaacaaatcacttaaagtctaaagaggtgagtgaattatatgttacagcatgtgattaaacatgagtaatttagtgtaggtgctaaaaggataaacttggggtagctatatatttatacttttaaaaagaaattatttaaaatatatcttgaaattgatgtctgtttaaaacacctaccatgatgtccaacatgatgtaggtggcatttgtgttagtttcactccagaaaatctactgccttgctaatta

SEQ ID NO: 349273 - DNA, 1813 bp, Homo sapiens
tgaagaaaaggaagtccctgaggactcactggaggagtgtgccatcacttgttcaaatagccatggcccttatgactccaaccagccacataggaaaaccaaaatcacatttgaggaagacaaagtcgactcaactctcattggctcatcctctcatgttgaatgggaggatgctgtacacattatcccagaaaatgaaagtgatgatgaggaagaggaagaaaaagggccagtgtctcccaggaatctgcaggagtctgaagaggaggaagtcccccaggagtcctgggatgaaggttattcgactctctcaattcctcctgaaaggacatcggtgggatcaagtgaaaaaggaggaccaagaggcaacaggtcccaggctcagcagggagctgctggctgagaaagagcctgaagtcttgcaggactcactggatagatgttattcaactccttcagtttatcttggactgactgactcatgccagccctacagaagtgccttttacgtattggagcaacagcgtgttggcttggctgttgacatggatgaaaccccggcggcagtggggctgttgctgttgctgtggctgtcgctgcccgtcaggctgccttcttttgtcgtttcccagcgctgcgcaggacttctcctggcggcgctgcggatccagggggtcggctgccaggtacaggtgaggacattgcgggaggccggctgggagccttttgtgcggccccagggacgcgcaaattctgaccagtcctccatgtctctcacccgcatcccaggggttgaggctgggcaaacgccgcgaaactatcgctcttccccgtcccgcttccgcgcctgtccaccctgggtaacggaaccagcatcgcggtagggacatcctcgctaggcccggccggaccattcctcagggtgggccctttccgaagccgggaccgctcctgcttgtcggcatcgctccccacaggccgacgtcgagagggcctgctttactcctcctctttctcctccttctcccgcggcttctgcgcggagaggcgtcgcccgggatctgggttttggaagaaggatctttgtgggaagacagggtgaatttatcacagaggaataacgagggagaggagaaaggtttcctaaagacaaaaaaaaatggaggaatctgtaaaccaaatgcagccactgaatgagaagcagatagccaattctcaggatggatatgtatggcaagtcactgacatgaatcgactacaccggttcttatgtttcggttctgaaggtgggacttattatatcaaagaacagaagttgggccttgaaaatgctgaagctttaattagattgattgaagatggcagaggatgtgaagtgatacaagaaataaagtcatttagtcaagaaggcagaaccacaaagcaagagcctatgctctttgcacttgccatttgttcccagtgctccgacataagcacaaaacaagcagcatttaaagctgtttctgaagtttgtcgcattcctacccatctctttacttttatccagtttaagaaagatctgaaggaaagcatgaaatgtggcatgtggggtcgtgccctccggaaggctatagcggactggtacaatgagaaaggtggcatggcccttgctctggcagttacaaaatataaacagagaaatggctggtctcacaaagatctattaagattgtcacatcttaaaccttccagtgaaggtaagcataagatcttcattgggaagaagggtgggtaagggatattcaataaatagcaaatttttatttaacat

SEQ ID NO: 349274 - DNA, 3945 bp, Homo sapiens
cggggcaaaagaagaggggcaggactcgttcccgggaaccgaacctggaatccccggcggcagtggggctgttgctgttgctgtggctgtcgctgcccgtcaggctgccttcttttgtcgtttcccagcgctgcgcaggacttctcctggcggcgctgcggatccagggggtcggctgccaggtacaggtttcctaaagacaaaaaaaaatggaggaatctgtaaaccaaatgcagccactgaatgagaagcagatagccaattctcaggatggatatgtatggcaagtcactgacatgaatcgactacaccggttcttatgtttcggttctgaaggtgggacttattatatcaaagaacagaagttgggccttgaaaatgctgaagctttaattagattgattgaagatggcagaggatgtgaagtgatacaagaaataaagtcatttagtcaagaaggcagaaccacaaagcaagagcctatgctctttgcacttgccatttgttcccagtgctccgacataagcacaaaacaagcagcatttaaagctgtttctgaagtttgtcgcattcctacccatctctttacttttatccagtttaagaaagatctgaaggaaagcatgaaatgtggcatgtggggtcgtgccctccggaaggctatagcggactggtacaatgagaaaggtggcatggcccttgctctggcagttacaaaatataaacagagaaatggctggtctcacaaagatctattaagattgtcacatcttaaaccttccagtgaaggacttgcaattgtgaccaaatatattacaaagggctggaaagaagttcatgaattgtataaagaaaaagcactctctgtggagactgaaaaattattaaagtatctggaggctgtagagaaagtgaagcgcacaagagatgagctagaagtcattcatctaatagaagaacatagattagttagagaacatcttttaacaaatcacttaaagtctaaagaggtatggaaggctttgttacaagaaatgccgcttactgcattactaaggaatctaggaaagatgactgctaattcagtacttgaaccaggaaattcagaagtatctttagtatgtgaaaaactgtgtaatgaaaaactattaaaaaaggctcgtatacatccatttcatattttgatcgcattagaaacttacaagacaggtcatggtctcagagggaaactgaagtggcgccctgatgaagaaattttgaaagcattggatgctgctttttataaaacatttaagacagttgaaccaactggaaaacgtttcttactagctgttgatgtcagtgcttctatgaaccaaagagttttgggtagtatactcaacgctagtacagttgctgcagcaatgtgcatggttgtcacacgaacagaaaaagattcttatgtagttgctttttccgatgaaatggtaccatgtccagtgactacagatatgaccttacaacaggttttaatggctatgagtcagatcccagcaggtggaactgattgctctcttccaatgatctgggctcagaagacaaacacacctgctgatgtcttcattgtattcactgataatgagacctttgctggaggtgtccatcctgctattgctctgagggagtatcgaaagaaaatggatattccagctaaattgattgtttgtggaatgacatcaaatggtttcaccattgcagacccagatgatagaggcatgttggatatgtgcggctttgatactggagctctggatgtaattcgaaatttcacattagatatgatttaaccataagcagcagcacgatccagagatccattgccatcagtgatctcactaaaaatatacagctacttcccagctaatctccacccaatgaatgatgatggtatagtatgtgcataatggaaagttaccttactgaaaaaaaaaaaagaaggaaaaataagatgggcccaaaggtctatctactaaactagctcttggggaaatagcttcaggatactgtagtttcctctatctaatagagaactttttgttaacagacactgtaaaatagttttgctttgttgaataatacatgtgtacctaaaagaggtaagagcaaaaagtgtaattccacatcatgttacttgagaagtgcttaacgttttcttaaatgttttcattgggaaaggacagctttgataatgtccaaatactctgaaatgcactagaccatataactgtgatgaaatatgaaactcatctgtaaacttttataccaagggggtaaaaaaaaaaactaaggcatttgattaaattatgaatgagttttacaaattcctttcagagttttactaagatcacacaaataacagctttcttattcagtgaaaaagatattttatttctgatgttttatttgcactcgtggaatatgttaccattaatcagaaacatcatggcaacccctaagaatagactaagtttgtgttggctgagggattctatttggtttgcttttttttttttgctttgttatattttattgctacaaggggtgtgacttgataatgatttcctctgaattataataacatagccagatgtagtctcacactgtttttcatactcttaagtgtaaataatataaaatgtttcaagcgcttaactccccctcattcacaaagtataacaattaaaatctcaactataaccagtttagctttttccttacttttaaaataaaattttttacttttaactatttttttagttaatatttttaaaagtatacatgtcaatggcctctttgtccattattcattttgtggcaaaatattcttctttgatagtgtaaacaaataataaagcaatctaggtcctttaggtttgaaaggcaatttttgagtagcatattaccagctagccagtcactaggaatttttttcagtattatttgtatgtattaaacttttcattacactaaagtgcattattttattgagcaagtatccttcattgtgaggtttaacattaaagcaatctgttgaaatgccattatctttgctcataattttattatggccgtctaaggtagcttacacataaaacctgtttgcgtatctgttgttctctaaatattaattgaagatttactgaggatttgtaaggtccttctcgctgttatgtgaaaagtcaaactgtagttaatgtaaattatagccttttaggtgcttgggggttagagggtttatgttttttgggaaagggggactttagtagtctgaggatttctgtacatattttcttctgttttatgtgaaatttgggctctgggaataagaaaatattcctttcaaatttatttgacatattaatgctggttttgatatgtacccattccttcaaggcaactggtatcagtttttaagtgtgatttacctgagatatttttgttcagcaaagctcatagcaccctcacccccactccagacatgcattgcttctgatgttgttcacgtttttaaccctgtcaagcattgaactgaatatattagctacttttgacacattaaaatattacgttcagattgaatttaaagtttaaagaaactaatagaattacgtaatagttattgaattgtttaagtaaacccaagatcttaaaaattataacatgatcattttattcctaatagaaatgttaaatagaatatagtacaaaagtgcattaccttcagttgtgtactatttccataatacttttagacaaatatatctataagttaatattaaatccatcaaggatacaagattggatggatatgacctttctgaagtatttaggtaggtctaattaaatggactagggtaacatttaagaaagaaaggataagtaggagaagctaccacagaaggtaac

SEQ ID NO: 349275 - DNA, 3848 bp, Homo sapiens
tgaagaaaaggaagtccctgaggactcactggaggagtgtgccatcacttgttcaaatagccatggcccttatgactccaaccagccacataggaaaaccaaaatcacatttgaggaagacaaagtcgactcaactctcattggctcatcctctcatgttgaatgggaggatgctgtacacattatcccagaaaatgaaagtgatgatgaggaagaggaagaaaaagggccagtgtctcccaggaatctgcaggagtctgaagaggaggaagtcccccaggagtcctgggatgaaggttattcgactctctcaattcctcctgaaaggacatcggtgggatcaagtgaaaaaggaggaccaagaggcaacaggtcccaggctcagcagggagctgctggctgagaaagagcctgaagtcttgcaggactcactggatagatgttattcaactccttcagtttatcttggactgactgactcatgccagccctacagaagtgccttttacgtattggagcaacagcgtgttggcttggctgttgacatggatgaaaccccggcggcagtggggctgttgctgttgctgtggctgtcgctgcccgtcaggctgccttcttttgtcgtttcccagcgctgcgcaggacttctcctggcggcgctgcggatccagggggtcggctgccaggtacaggacttgcaattgtgaccaaatatattacaaagggctggaaagaagttcatgaattgtataaagaaaaagcactctctgtggagactgaaaaattattaaagtatctggaggctgtagagaaagtgaagcgcacaagagatgagctagaagtcattcatctaatagaagaacatagattagttagagaacatcttttaacaaatcacttaaagtctaaagaggtatggaaggctttgttacaagaaatgccgcttactgcattactaaggaatctaggaaagatgactgctaattcagtacttgaaccaggaaattcagaagtatctttagtatgtgaaaaactgtgtaatgaaaaactattaaaaaaggctcgtatacatccatttcatattttgatcgcattagaaacttacaagacaggtcatggtctcagagggaaactgaagtggcgccctgatgaagaaattttgaaagcattggatgctgctttttataaaacatttaagacagttgaaccaactggaaaacgtttcttactagctgttgatgtcagtgcttctatgaaccaaagagttttgggtagtatactcaacgctagtacagttgctgcagcaatgtgcatggttgtcacacgaacagaaaaagattcttatgtagttgctttttccgatgaaatggtaccatgtccagtgactacagatatgaccttacaacaggttttaatggctatgagtcagatcccagcaggtggaactgattgctctcttccaatgatctgggctcagaagacaaacacacctgctgatgtcttcattgtattcactgataatgagacctttgctggaggtgtccatcctgctattgctctgagggagtatcgaaagaaaatggatattccagctaaattgattgtttgtggaatgacatcaaatggtttcaccattgcagacccagatgatagaggcatgttggatatgtgcggctttgatactggagctctggatgtaattcgaaatttcacattagatatgatttaaccataagcagcagcacgatccagagatccattgccatcagtgatctcactaaaaatatacagctacttcccagctaatctccacccaatgaatgatgatggtatagtatgtgcataatggaaagttaccttactgaaaaaaaaaaaagaaggaaaaataagatgggcccaaaggtctatctactaaactagctcttggggaaatagcttcaggatactgtagtttcctctatctaatagagaactttttgttaacagacactgtaaaatagttttgctttgttgaataatacatgtgtacctaaaagaggtaagagcaaaaagtgtaattccacatcatgttacttgagaagtgcttaacgttttcttaaatgttttcattgggaaaggacagctttgataatgtccaaatactctgaaatgcactagaccatataactgtgatgaaatatgaaactcatctgtaaacttttataccaagggggtaaaaaaaaaaactaaggcatttgattaaattatgaatgagttttacaaattcctttcagagttttactaagatcacacaaataacagctttcttattcagtgaaaaagatattttatttctgatgttttatttgcactcgtggaatatgttaccattaatcagaaacatcatggcaacccctaagaatagactaagtttgtgttggctgagggattctatttggtttgcttttttttttttgctttgttatattttattgctacaaggggtgtgacttgataatgatttcctctgaattataataacatagccagatgtagtctcacactgtttttcatactcttaagtgtaaataatataaaatgtttcaagcgcttaactccccctcattcacaaagtataacaattaaaatctcaactataaccagtttagctttttccttacttttaaaataaaattttttacttttaactatttttttagttaatatttttaaaagtatacatgtcaatggcctctttgtccattattcattttgtggcaaaatattcttctttgatagtgtaaacaaataataaagcaatctaggtcctttaggtttgaaaggcaatttttgagtagcatattaccagctagccagtcactaggaatttttttcagtattatttgtatgtattaaacttttcattacactaaagtgcattattttattgagcaagtatccttcattgtgaggtttaacattaaagcaatctgttgaaatgccattatctttgctcataattttattatggccgtctaaggtagcttacacataaaacctgtttgcgtatctgttgttctctaaatattaattgaagatttactgaggatttgtaaggtccttctcgctgttatgtgaaaagtcaaactgtagttaatgtaaattatagccttttaggtgcttgggggttagagggtttatgttttttgggaaagggggactttagtagtctgaggatttctgtacatattttcttctgttttatgtgaaatttgggctctgggaataagaaaatattcctttcaaatttatttgacatattaatgctggttttgatatgtacccattccttcaaggcaactggtatcagtttttaagtgtgatttacctgagatatttttgttcagcaaagctcatagcaccctcacccccactccagacatgcattgcttctgatgttgttcacgtttttaaccctgtcaagcattgaactgaatatattagctacttttgacacattaaaatattacgttcagattgaatttaaagtttaaagaaactaatagaattacgtaatagttattgaattgtttaagtaaacccaagatcttaaaaattataacatgatcattttattcctaatagaaatgttaaatagaatatagtacaaaagtgcattaccttcagttgtgtactatttccataatacttttagacaaatatatctataagttaatattaaatccatcaaggatacaagattggatggatatgacctttctgaagtatttaggtaggtctaattaaatggactagggtaacatttaagaaagaaaggataagtaggagaagctaccacagaaggtaac

SEQ ID NO: 349276 - DNA, 3905 bp, Homo sapiens
ttatccaggaatggattaactgatgaccaggttctgacctcactcactgcccaattgccttctaaaccactgataatggagcttaagctttgaggcaggagatgatggcagttggagaaagaagaaattaagttgctgtatatgtcttgtttcctaaagacaaaaaaaaatggaggaatctgtaaaccaaatgcagccactgaatgagaagcagatagccaattctcaggatggatatgtatggcaagtcactgacatgaatcgactacaccggttcttatgtttcggttctgaaggtgggacttattatatcaaagaacagaagttgggccttgaaaatgctgaagctttaattagattgattgaagatggcagaggatgtgaagtgatacaagaaataaagtcatttagtcaagaaggcagaaccacaaagcaagagcctatgctctttgcacttgccatttgttcccagtgctccgacataagcacaaaacaagcagcatttaaagctgtttctgaagtttgtcgcattcctacccatctctttacttttatccagtttaagaaagatctgaaggaaagcatgaaatgtggcatgtggggtcgtgccctccggaaggctatagcggactggtacaatgagaaaggtggcatggcccttgctctggcagttacaaaatataaacagagaaatggctggtctcacaaagatctattaagattgtcacatcttaaaccttccagtgaaggacttgcaattgtgaccaaatatattacaaagggctggaaagaagttcatgaattgtataaagaaaaagcactctctgtggagactgaaaaattattaaagtatctggaggctgtagagaaagtgaagcgcacaagagatgagctagaagtcattcatctaatagaagaacatagattagttagagaacatcttttaacaaatcacttaaagtctaaagaggtatggaaggctttgttacaagaaatgccgcttactgcattactaaggaatctaggaaagatgactgctaattcagtacttgaaccaggaaattcagaagtatctttagtatgtgaaaaactgtgtaatgaaaaactattaaaaaaggctcgtatacatccatttcatattttgatcgcattagaaacttacaagacaggtcatggtctcagagggaaactgaagtggcgccctgatgaagaaattttgaaagcattggatgctgctttttataaaacatttaagacagttgaaccaactggaaaacgtttcttactagctgttgatgtcagtgcttctatgaaccaaagagttttgggtagtatactcaacgctagtacagttgctgcagcaatgtgcatggttgtcacacgaacagaaaaagattcttatgtagttgctttttccgatgaaatggtaccatgtccagtgactacagatatgaccttacaacaggttttaatggctatgagtcagatcccagcaggtggaactgattgctctcttccaatgatctgggctcagaagacaaacacacctgctgatgtcttcattgtattcactgataatgagacctttgctggaggtgtccatcctgctattgctctgagggagtatcgaaagaaaatggatattccagctaaattgattgtttgtggaatgacatcaaatggtttcaccattgcagacccagatgatagaggcatgttggatatgtgcggctttgatactggagctctggatgtaattcgaaatttcacattagatatgatttaaccataagcagcagcacgatccagagatccattgccatcagtgatctcactaaaaatatacagctacttcccagctaatctccacccaatgaatgatgatggtatagtatgtgcataatggaaagttaccttactgaaaaaaaaaaaagaaggaaaaataagatgggcccaaaggtctatctactaaactagctcttggggaaatagcttcaggatactgtagtttcctctatctaatagagaactttttgttaacagacactgtaaaatagttttgctttgttgaataatacatgtgtacctaaaagaggtaagagcaaaaagtgtaattccacatcatgttacttgagaagtgcttaacgttttcttaaatgttttcattgggaaaggacagctttgataatgtccaaatactctgaaatgcactagaccatataactgtgatgaaatatgaaactcatctgtaaacttttataccaagggggtaaaaaaaaaaactaaggcatttgattaaattatgaatgagttttacaaattcctttcagagttttactaagatcacacaaataacagctttcttattcagtgaaaaagatattttatttctgatgttttatttgcactcgtggaatatgttaccattaatcagaaacatcatggcaacccctaagaatagactaagtttgtgttggctgagggattctatttggtttgcttttttttttttgctttgttatattttattgctacaaggggtgtgacttgataatgatttcctctgaattataataacatagccagatgtagtctcacactgtttttcatactcttaagtgtaaataatataaaatgtttcaagcgcttaactccccctcattcacaaagtataacaattaaaatctcaactataaccagtttagctttttccttacttttaaaataaaattttttacttttaactatttttttagttaatatttttaaaagtatacatgtcaatggcctctttgtccattattcattttgtggcaaaatattcttctttgatagtgtaaacaaataataaagcaatctaggtcctttaggtttgaaaggcaatttttgagtagcatattaccagctagccagtcactaggaatttttttcagtattatttgtatgtattaaacttttcattacactaaagtgcattattttattgagcaagtatccttcattgtgaggtttaacattaaagcaatctgttgaaatgccattatctttgctcataattttattatggccgtctaaggtagcttacacataaaacctgtttgcgtatctgttgttctctaaatattaattgaagatttactgaggatttgtaaggtccttctcgctgttatgtgaaaagtcaaactgtagttaatgtaaattatagccttttaggtgcttgggggttagagggtttatgttttttgggaaagggggactttagtagtctgaggatttctgtacatattttcttctgttttatgtgaaatttgggctctgggaataagaaaatattcctttcaaatttatttgacatattaatgctggttttgatatgtacccattccttcaaggcaactggtatcagtttttaagtgtgatttacctgagatatttttgttcagcaaagctcatagcaccctcacccccactccagacatgcattgcttctgatgttgttcacgtttttaaccctgtcaagcattgaactgaatatattagctacttttgacacattaaaatattacgttcagattgaatttaaagtttaaagaaactaatagaattacgtaatagttattgaattgtttaagtaaacccaagatcttaaaaattataacatgatcattttattcctaatagaaatgttaaatagaatatagtacaaaagtgcattaccttcagttgtgtactatttccataatacttttagacaaatatatctataagttaatattaaatccatcaaggatacaagattggatggatatgacctttctgaagtatttaggtaggtctaattaaatggactagggtaacatttaagaaagaaaggataagtaggagaagctaccacagaaggtaac

SEQ ID NO: 349277 - DNA, 3280 bp, Homo sapiens
tccagctcagccatgtgagatgtctgttcctactttgcctaccaccatgagtaaaagcttcctgaggcctcccaagaagccgagcagatgccagcaccaggcttcctataaagcctgcagaactgacttgcaattgtgaccaaatatattacaaagggctggaaagaagttcatgaattgtataaagaaaaagcactctctgtggagactgaaaaattattaaagtatctggaggctgtagagaaagtgaagcgcacaagagatgagctagaagtcattcatctaatagaagaacatagattagttagagaacatcttttaacaaatcacttaaagtctaaagaggtatggaaggctttgttacaagaaatgccgcttactgcattactaaggaatctaggaaagatgactgctaattcagtacttgaaccaggaaattcagaagtatctttagtatgtgaaaaactgtgtaatgaaaaactattaaaaaaggctcgtatacatccatttcatattttgatcgcattagaaacttacaagacaggtcatggtctcagagggaaactgaagtggcgccctgatgaagaaattttgaaagcattggatgctgctttttataaaacatttaagacagttgaaccaactggaaaacgtttcttactagctgttgatgtcagtgcttctatgaaccaaagagttttgggtagtatactcaacgctagtacagttgctgcagcaatgtgcatggttgtcacacgaacagaaaaagattcttatgtagttgctttttccgatgaaatggtaccatgtccagtgactacagatatgaccttacaacaggttttaatggctatgagtcagatcccagcaggtggaactgattgctctcttccaatgatctgggctcagaagacaaacacacctgctgatgtcttcattgtattcactgataatgagacctttgctggaggtgtccatcctgctattgctctgagggagtatcgaaagaaaatggatattccagctaaattgattgtttgtggaatgacatcaaatggtttcaccattgcagacccagatgatagaggcatgttggatatgtgcggctttgatactggagctctggatgtaattcgaaatttcacattagatatgatttaaccataagcagcagcacgatccagagatccattgccatcagtgatctcactaaaaatatacagctacttcccagctaatctccacccaatgaatgatgatggtatagtatgtgcataatggaaagttaccttactgaaaaaaaaaaaagaaggaaaaataagatgggcccaaaggtctatctactaaactagctcttggggaaatagcttcaggatactgtagtttcctctatctaatagagaactttttgttaacagacactgtaaaatagttttgctttgttgaataatacatgtgtacctaaaagaggtaagagcaaaaagtgtaattccacatcatgttacttgagaagtgcttaacgttttcttaaatgttttcattgggaaaggacagctttgataatgtccaaatactctgaaatgcactagaccatataactgtgatgaaatatgaaactcatctgtaaacttttataccaagggggtaaaaaaaaaaactaaggcatttgattaaattatgaatgagttttacaaattcctttcagagttttactaagatcacacaaataacagctttcttattcagtgaaaaagatattttatttctgatgttttatttgcactcgtggaatatgttaccattaatcagaaacatcatggcaacccctaagaatagactaagtttgtgttggctgagggattctatttggtttgcttttttttttttgctttgttatattttattgctacaaggggtgtgacttgataatgatttcctctgaattataataacatagccagatgtagtctcacactgtttttcatactcttaagtgtaaataatataaaatgtttcaagcgcttaactccccctcattcacaaagtataacaattaaaatctcaactataaccagtttagctttttccttacttttaaaataaaattttttacttttaactatttttttagttaatatttttaaaagtatacatgtcaatggcctctttgtccattattcattttgtggcaaaatattcttctttgatagtgtaaacaaataataaagcaatctaggtcctttaggtttgaaaggcaatttttgagtagcatattaccagctagccagtcactaggaatttttttcagtattatttgtatgtattaaacttttcattacactaaagtgcattattttattgagcaagtatccttcattgtgaggtttaacattaaagcaatctgttgaaatgccattatctttgctcataattttattatggccgtctaaggtagcttacacataaaacctgtttgcgtatctgttgttctctaaatattaattgaagatttactgaggatttgtaaggtccttctcgctgttatgtgaaaagtcaaactgtagttaatgtaaattatagccttttaggtgcttgggggttagagggtttatgttttttgggaaagggggactttagtagtctgaggatttctgtacatattttcttctgttttatgtgaaatttgggctctgggaataagaaaatattcctttcaaatttatttgacatattaatgctggttttgatatgtacccattccttcaaggcaactggtatcagtttttaagtgtgatttacctgagatatttttgttcagcaaagctcatagcaccctcacccccactccagacatgcattgcttctgatgttgttcacgtttttaaccctgtcaagcattgaactgaatatattagctacttttgacacattaaaatattacgttcagattgaatttaaagtttaaagaaactaatagaattacgtaatagttattgaattgtttaagtaaacccaagatcttaaaaattataacatgatcattttattcctaatagaaatgttaaatagaatatagtacaaaagtgcattaccttcagttgtgtactatttccataatacttttagacaaatatatctataagttaatattaaatccatcaaggatacaagattggatggatatgacctttctgaagtatttaggtaggtctaattaaatggactagggtaacatttaagaaagaaaggataagtaggagaagctaccacagaaggtaac

SEQ ID NO: 349278 - DNA, 2829 bp, Homo sapiens
tgaagaaaaggaagtccctgaggactcactggaggagtgtgccatcacttgttcaaatagccatggcccttatgactccaaccagccacataggaaaaccaaaatcacatttgaggaagacaaagtcgactcaactctcattggctcatcctctcatgttgaatgggaggatgctgtacacattatcccagaaaatgaaagtgatgatgaggaagaggaagaaaaagggccagtgtctcccaggaatctgcaggagtctgaagaggaggaagtcccccaggagtcctgggatgaaggttattcgactctctcaattcctcctgaaaggacatcggtgggatcaagtgaaaaaggaggaccaagaggcaacaggtcccaggctcagcagggagctgctggctgagaaagagcctgaagtcttgcaggactcactggatagatgttattcaactccttcagtttatcttggactgactgactcatgccagccctacagaagtgccttttacgtattggagcaacagcgtgttggcttggctgttgacatggatgaaaccccggcggcagtggggctgttgctgttgctgtggctgtcgctgcccgtcaggctgccttcttttgtcgtttcccagcgctgcgcaggacttctcctggcggcgctgcggatccagggggtcggctgccaggtacaggtgaggacattgcgggaggccggctgggagccttttgtgcggccccagggacgcgcaaattctgaccagtcctccatgtctctcacccgcatcccaggggttgaggctgggcaaacgccgcgaaactatcgctcttccccgtcccgcttccgcgcctgtccaccctgggtaacggaaccagcatcgcggtagggacatcctcgctaggcccggccggaccattcctcagggtgggccctttccgaagccgggaccgctcctgcttgtcggcatcgctccccacaggccgacgtcgagagggcctgctttactcctcctctttctcctccttctcccgcggcttctgcgcggagaggcgtcgcccgggatctgggttttggaagaaggatctttgtgggaagacagggtgaatttatcacagaggaataacgagggagaggagaaaggtttcctaaagacaaaaaaaaatggaggaatctgtaaaccaaatgcagccactgaatgagaagcagatagccaattctcaggatggatatgtatggcaagtcactgacatgaatcgactacaccggttcttatgtttcggttctgaaggtgggacttattatatcaaagaacagaagttgggccttgaaaatgctgaagctttaattagattgattgaagatggcagaggatgtgaagtgatacaagaaataaagtcatttagtcaagaaggcagaaccacaaagcaagagcctatgctctttgcacttgccatttgttcccagtgctccgacataagcacaaaacaagcagcatttaaagctgtttctgaagtttgtcgcattcctacccatctctttacttttatccagtttaagaaagatctgaaggaaagcatgaaatgtggcatgtggggtcgtgccctccggaaggctatagcggactggtacaatgagaaaggtggcatggcccttgctctggcagttacaaaatataaacagagaaatggctggtctcacaaagatctattaagattgtcacatcttaaaccttccagtgaaggacttgcaattgtgaccaaatatattacaaagggctggaaagaagttcatgaattgtataaagaaaaagcactctctgtggagactgaaaaattattaaagtatctggaggctgtagagaaagtgaagcgcacaagagatgagctagaagtcattcatctaatagaagaacatagattagttagagaacatcttttaacaaatcacttaaagtctaaagaggtatggaaggctttgttacaagaaatgccgcttactgcattactaaggaatctaggaaagatgactgctaattcagtacttgaaccaggaaattcagaagtatctttagtatgtgaaaaactgtgtaatgaaaaactattaaaaaaggctcgtatacatccatttcatattttgatcgcattagaaacttacaagacaggtcatggtctcagagggaaactgaagtggcgccctgatgaagaaattttgaaagcattggatgctgctttttataaaacatttaagacagttgaaccaactggaaaacgtttcttactagctgttgatgtcagtgcttctatgaaccaaagagttttgggtagtatactcaacgctagtacagttgctgcagcaatgtgcatggttgtcacacgaacagaaaaagattcttatgtagttgctttttccgatgaaatggtaccatgtccagtgactacagatatgaccttacaacaggttttaatggctatgagtcagatcccagcaggtggaactgattgctctcttccaatgatctgggctcagaagacaaacacacctgctgatgtcttcattgtattcactgataatgagacctttgctggaggtgtccatcctgctattgctctgagggagtatcgaaagaaaatggatattccagctaaattgattgtttgtggaatgacatcaaatggtttcaccattgcagacccagatgatagagccttgcaaaataccctactaaataaatcattttagacatggagtgcaggtggacactgtgtgaactgtttttggtcagttattgtagaaattgatagatgtaccaaataaactctatgcacattaaa

SEQ ID NO: 349279 - DNA, 2356 bp, Homo sapiens
tggtttcaccattgcagaccagatgatagaggcatgttggatatgtgcggctttgatactggagctctgggggagtatcgaaagaaaatggatattccagctaaattgattgtttgtggaatgacatcaaatggtttcaccattgcagacccagatgatagaggcatgttggatatgtgcggctttgatactggagctctggatgtaattcgaaatttcacattagatatgatttaaccataagcagcagcacgatccagagatccattgccatcagtgatctcactaaaaatatacagctacttcccagctaatctccacccaatgaatgatgatggtatagtatgtgcataatggaaagttaccttactgaaaaaaaaaaaagaaggaaaaataagatgggcccaaaggtctatctactaaactagctcttggggaaatagcttcaggatactgtagtttcctctatctaatagagaactttttgttaacagacactgtaaaatagttttgctttgttgaataatacatgtgtacctaaaagaggtaagagcaaaaagtgtaattccacatcatgttacttgagaagtgcttaacgttttcttaaatgttttcattgggaaaggacagctttgataatgtccaaatactctgaaatgcactagaccatataactgtgatgaaatatgaaactcatctgtaaacttttataccaagggggtaaaaaaaaaaactaaggcatttgattaaattatgaatgagttttacaaattcctttcagagttttactaagatcacacaaataacagctttcttattcagtgaaaaagatattttatttctgatgttttatttgcactcgtggaatatgttaccattaatcagaaacatcatggcaacccctaagaatagactaagtttgtgttggctgagggattctatttggtttgcttttttttttttgctttgttatattttattgctacaaggggtgtgacttgataatgatttcctctgaattataataacatagccagatgtagtctcacactgtttttcatactcttaagtgtaaataatataaaatgtttcaagcgcttaactccccctcattcacaaagtataacaattaaaatctcaactataaccagtttagctttttccttacttttaaaataaaattttttacttttaactatttttttagttaatatttttaaaagtatacatgtcaatggcctctttgtccattattcattttgtggcaaaatattcttctttgatagtgtaaacaaataataaagcaatctaggtcctttaggtttgaaaggcaatttttgagtagcatattaccagctagccagtcactaggaatttttttcagtattatttgtatgtattaaacttttcattacactaaagtgcattattttattgagcaagtatccttcattgtgaggtttaacattaaagcaatctgttgaaatgccattatctttgctcataattttattatggccgtctaaggtagcttacacataaaacctgtttgcgtatctgttgttctctaaatattaattgaagatttactgaggatttgtaaggtccttctcgctgttatgtgaaaagtcaaactgtagttaatgtaaattatagccttttaggtgcttgggggttagagggtttatgttttttgggaaagggggactttagtagtctgaggatttctgtacatattttcttctgttttatgtgaaatttgggctctgggaataagaaaatattcctttcaaatttatttgacatattaatgctggttttgatatgtacccattccttcaaggcaactggtatcagtttttaagtgtgatttacctgagatatttttgttcagcaaagctcatagcaccctcacccccactccagacatgcattgcttctgatgttgttcacgtttttaaccctgtcaagcattgaactgaatatattagctacttttgacacattaaaatattacgttcagattgaatttaaagtttaaagaaactaatagaattacgtaatagttattgaattgtttaagtaaacccaagatcttaaaaattataacatgatcattttattcctaatagaaatgttaaatagaatatagtacaaaagtgcattaccttcagttgtgtactatttccataatacttttagacaaatatatctataagttaatattaaatccatcaaggatacaagattggatggatatgacctttctgaagtatttaggtaggtctaattaaatggactagggtaacatttaagaaagaaaggataagtaggagaagctaccacagaaggtaac

SEQ ID NO: 349280 - DNA, 1260 bp, Homo sapiens
  misc_feature (1226)..(1226): n is a, c, g, or t
  misc_feature (1233)..(1233): n is a, c, g, or t
tgaagaaaaggaagtccctgaggactcactggaggagtgtgccatcacttgttcaaatagccatggcccttatgactccaaccagccacataggaaaaccaaaatcacatttgaggaagacaaagtcgactcaactctcattggctcatcctctcatgttgaatgggaggatgctgtacacattatcccagaaaatgaaagtgatgatgaggaagaggaagaaaaagggccagtgtctcccaggaatctgcaggagtctgaagaggaggaagtcccccaggagtcctgggatgaaggttattcgactctctcaattcctcctgaaaggacatcggtgggatcaagtgaaaaaggaggaccaagaggcaacaggtcccaggctcagcagggagctgctggctgagaaagagcctgaagtcttgcaggactcactggatagatgttattcaactccttcagtttatcttggactgactgactcatgccagccctacagaagtgccttttacgtattggagcaacagcgtgttggcttggctgttgacatggatgaaaccccggcggcagtggggctgttgctgttgctgtggctgtcgctgcccgtcaggctgccttcttttgtcgtttcccagcgctgcgcaggacttctcctggcggcgctgcggatccagggggtcggctgccaggtacaggacttgcaattgtgaccaaatatattacaaagggctggaaagaagttcatgaattgtataaagaaaaagcactctctgtggagactgaaaaattattaaagtatctggaggctgtagagaaagtgaagcgcacaagagatgagctagaagtcattcatctaatagaagaacatagattagttagagaacatcttttaacaaatcacttaaagtctaaagaggtatggaaggctttgttacaagaaatgccgcttactgcattactaaggaatctaggaaagatgactgctaattcagtacttgaaccaggaaattcagaagtatctttagtatgtgaaaaactgtgtaatgaaaaactattaaaaaaggctcgtatacatccatttcatattttgatcgcattagaaacttacaagacaggtcatggtctcagagggaaactgaagtggcgccctgatgaagaaattttgaaagcattggatgctgctttttataaaacatttaagacagtggaccactggcgttctactagcngttgagncagtgctctaggaccgagtttgggggt

SEQ ID NO: 349281 - DNA, 757 bp, Homo sapiens
tgaaagaaattaaagatctaaataactggaaaaatatcccatgttcatgtgtcagaggatttaacatcattatatgacaaaattctccaccttgatctacaaattcaatgtcatccctatccaaatccctatcagaataacttctttgtagatattgacaaacgggttctaaaattcatatggaactgaaggggacccagaatagccaagacaatcttgtaaaagatcaagtaggaggactcaccagttttaaaacttactacaaagcaatggcaatcaaaacagtgtcgtactggcacaaggacagacatacacatcaatgtaatacaactgagagtccagatataaatccatacatccacggtcaactcatttttagcaagggtgccaagactgtccaatgggaaagaatagtcttttcaacaaatggtgctgggaaaactggacagccacatacaaatgaatgaagctggaacttagctcacaccatatacaaaactgtctcatcccagcactttgggaggccaaggcagatggatcacaaggtcaggagatcgagaccatcctggccaacatagtgaaaccccatctctactaaaaatacaaaaattagctgggcatggtggtgcatgcctgtaatcccagctacttgggaggctgaggcaggagaatcacttgaaccaaggagtcggaggttgcagtgagccgagatcgcgccactgccctccagcctggcaacagagcaagatgccatcgc

SEQ ID NO: 349282 - DNA, 822 bp, Homo sapiens
gtgaaggacgggggaggaccgctgcttccggcgccgtaactgctgccatcttctccgcgctatggctgcgttcggccgtcaggtccttgattggcaccgcctgatccccctcacctgggcctgtatggctaggcagactcctcatcttggagaacagagaaggacgacagcttctttgttgcgcaaactgactacagcctccaatggaggggtcattgaggagttatcttgtgttagatccaataactatgtgcaggaaccagagtgcaggaggaatcttgttcagtgcctccttgagaagcaggggactcctgtggtacaagggtccttggagctagagagggtcatgagttccctcctggacatgggtttcagcaatgcccatattaatgaattgctcagtgtacggcgaggtgccagtcttcaacagttgctggacatcatttcagaatttattctcttgggtctgaatccagagcctgtgtgtgtggtcttgaagaaaagtccccagttattgaaactgcctattatgcaaatgaggaagcgctccagttacctgcaaaagcttgggcttggagaagggaaattaaagagggtgctttactgttgccctgaaattttcaccatgcgccagcaggacattaacgacactgtcaggcttctcaaggagaagtgccttttcacggtacagcaagtcaccaagattttgcacagttgcccctctgttcttcgagaggacctgggtcaactggaatacaagtttcaggtgagaatgactgatagcgtgattagcgtagtttcaggtgagaatgactggtaatg

SEQ ID NO: 349283 - DNA, 1098 bp, Homo sapiens
tactacccgacaaccttagcccaaccctttaccccaataaagtataggcgatagaaattgaaacctggcgccatagatatagtaccgcaagggaaagatgaaaaattatagcccagcataatatagccaggactaacccctataccttctgcataatgaattaactaaaaataaaaagcctaaaatatactctaactcttcaaaaaacatttttatgaaagaggaaaggaaggaggccctctttgtggctggaatgctggctctgagcagagtcagggtgacgcggcagggcgctggctttccagctgggtcagcggtcgtgaggctcaacacgagaggaggtggggtggctgctttggttgtaacattagcagggggaagacagctgcttagaagcatggtgggaagcagatgtggtgaagtgccgtactgttctgcttacaaagatggggatgtctaagatcgtgtttactacctgatagcctaaaacagtatcacttgagtcatggactaaaaggaaccttaaacattgtccagcccagcccaggtgtccatctctgttgcactgagacttgtaaggcgtccttgctgcttcgtggcagtgtgccttagctttccaagcaggggtctgaatagctttttccatgaaaattcaggggtctttctttgatacccttgtgacttgtcattcaggggatggcttccactgtttaaggctgaagcctaggtgatctcatagaacagggttcaccaaataaggcccatgggccaatttggccaccacctgttattgtaaataagtttttattggaacatagccgcagccattcaatgacatgcctgtggctgtgtctgcgctactgtagccacagggacctctggtctgcaaagctgaaaacgtttaccgtctgacccttgatagagaaaggctgccagtcgcgccgttgtctaaaaaagtctgaactccaccttagtgttaactagtccataggatggctcgtcgacctgcacgagcgtcataaacacgctggaggaccagagcaggggcggctgtgtctgcaacccggctttccttctgacatcacctggtctctgccc

SEQ ID NO: 349284 - DNA, 1259 bp, Homo sapiens
aggcttgagcccagttccacgggccgcgcccgctgaccccagcgactgccaggtgttcctggcggagggagcatctggacaggggaggctggagagcagccagagcttgggcttggcagggtggccccagggcgacaatcgatgacgctggagaaggggttgggaccgatgtgaaggttttagagcaggggttccccaacccccggtaccgtcccttgcctattaggaaccaggctgcacagcaggaggtgagcggcaagtgagccagccagactgtatttacagccgctcccttcgctggcattaccgcctgagctccgcctcctgtcagaccagccgccttagattctcactggagcgcgaaccctattgtgaactgcgcctttgaggggtccaggttgcgctccttatgagaatctgatgcccgatgatctgtcactgtttcccatcaaccccagatggcacctcctggttgtaggaaaacaagctcagggctcccagtgattctacattatggtccttgattggcaccgcctgatccccctcacctgggcctgtatggctaggcagactcctcatcttggagaacagagaaggacgacagcttctttgttgcgcaaactgactacagcctccaatggaggggtcattgaggagttatcttgtgttagatccaataactatgtgcaggaaccagagtgcaggaggaatcttgttcagtgcctccttgagaagcaggggactcctgtggtacaagggtccttggagctagagagggtcatgagttccctcctggacatgggtttcagcaatgcccatattaatgaattgctcagtgtacggcgaggtgccagtcttcaacagttgctggacatcatttcagaatttattctcttgggtctgaatccagagcctgtgtgtgtggtcttgaagaaaagtccccagttattgaaactgcctattatgcaaatgaggaagcgctccagttacctgcaaaagcttgggcttggagaaggggtggagaggaccttaaggggggtgcttactgtggcctgaatttcacctgcgccagggcttacgacctgtcaggtctcaagggaagggccttcaccggcagcagtcgccgattggcagtgccctgttcggaggaccggccgatacagtcgtgttctccggcgggaccccccagagaggttggtccacccatagaattggcggggccgaagagaaacactctggcaaatgggggttgtaacaca

SEQ ID NO: 349285 - DNA, 1001 bp, Homo sapiens
ggacttacaaagttagagtgaacacagggcagtattggcacagatgtatcaaattgacgccgccagaattctacttttatatgtggaattttgatactgacagtgggggaaaaagggactttttagcatgaagagatgaaaaatccagtttacccatatgcataaaaaatgaaattgtagcccaacttctcacacacacacagtctaacagattaatgacctacaggtcaaaagcaaaagatattttttaaagaaggctcccaacttgttaaccactaatgcttgataaatttgattatgaacttttctctattaggaagtaccaccaagaacagggaaggacaagccagaggctggaggaagatacctgcagaacacagacctgacaaaggatcagtatcaaaacatataagaattttgacaaatgaataaaaagagtacaaataacccaacataaagtcaaaaggcgtgatcaggcatttcacagaagcaaacacctttggtggatgcccatgaggagaggcgcagtcacatcagtgcccaggagatgcaaacccagatcccaggggtgtgcatcccacccgttctgcctgtaggatctgcaaacccggcaaaacctagttctagagagactggattcactgcatgtcttcatcactgctggagggagcgcagactgctatcgcctcttagaaaatgacttagttctcatgtaatttgggcattcacacatcctcatcctagatccagcttttccactcccgcacacgtactggaaaacctgtacaggaacatccactgcagcactgctcataccaaacacaacctacatgttctctgcacagagaggggagaagagccggtcagttcactcagtggactctgtgctcaatagtaggtgtgaataagccgcagccgcccagaccgcatgggccaacctcagtccgagaatgcggagtgaaaacacaggtctaacgatcacacatggcaagataattatc

SEQ ID NO: 349286 - DNA, 1060 bp, Homo sapiens
ggacttacaaagttagagtgaacacagggcagtattggcacagatgtatcaaattgacgccgccagaattctacttttatatgtggaattttgatactgacagtgggggaaaaagggactttttagcatgaagagatgaaaaatccagtttacccatatgcataaaaaatgaaattgtagcccaacttctcacacacacacagtctaacagattaatgacctacaggtcaaaagcaaaactttacatctttgtgaaaaaaatatacatgaataactttctaactttggtgtggggaaggatattttttaaagaaggctcccaacttgttaaccactaatgcttgataaatttgattatgaacttttctctattaggaagtaccaccaagaacagggaaggacaagccagaggctggaggaagatacctgcagaacacagacctgacaaaggatcagtatcaaaacatataagaattttgacaaatgaataaaaagagtacaaataacccaacataaagtcaaaaggcgtgatcaggcatttcacagaagcaaacacctttggtggatgcccatgaggagaggcgcagtcacatcagtgcccaggagatgcaaacccagatcccaggggtgtgcatcccacccgttctgcctgtaggatctgcaaacccggcaaaacctagttctagagagactggattcactgcatgtcttcatcactgctggagggagcgcagactgctatcgcctcttagaaaatgacttagttctcatgtaatttgggcattcacacatcctcatcctagatccagcttttccactcccgcacacgtactggaaaacctgtacaggaacatccactgcagcactgctcataccaaacacaacctacatgttctctgcacagagaggggagaagagccggtcagttcactcagtggactctgtgctcaatagtaggtgtgaataagccgcagccgcccagaccgcatgggccaacctcagtccgagaatgcggagtgaaaacacaggtctaacgatcacacatggcaagataattatc

SEQ ID NO: 349287 - DNA, 510 bp, Homo sapiens
ggacttacaaagttagagtgaacacagggcagtattggcacagatgtatcaaattgacgccgccagaattctacttttatatgtggaattttgatactgacagtgggggaaaaagggactttttagcatgaagagatgaaaaatccagtttacccatatgcataaaaaatgaaattgtagcccaacttctcacacacacacagtctaacagattaatgacctacaggtcaaaagcaaaactttacatctttgtgaaaaaaatatacatgaataactttctaactttggtgtggggaaggatattttttaaagaaggctcccaacttgttaaccactaatgcttgataaatttgattatgaacttttctctattaggaagtaccaccaagaacagggaaggacaagccagaggctggaggaagatacctgcagaacacagacctgacaaaggatcagtatcaaaacatataagaattttgacaaatgaataaaaagagtacaaataaccca

SEQ ID NO: 349288 - DNA, 5085 bp, Homo sapiens
  misc_feature (2146)..(2146): n is a, c, g, or t
  misc_feature (2240)..(2240): n is a, c, g, or t
  misc_feature (3226)..(3226): n is a, c, g, or t
gtgaaggacgggggaggaccgctgcttccggcgccgtaactgctgccatcttctccgcgctatggctgcgttcggccgtcaggtccttgattggcaccgcctgatccccctcacctgggcctgtatggctaggcagactcctcatcttggagaacagagaaggacgacagcttctttgttgcgcaaactgactacagcctccaatggaggggtcattgaggagttatcttgtgttagatccaataactatgtgcaggaaccagagtgcaggaggaatcttgttcagtgcctccttgagaagcaggggactcctgtggtacaagggtccttggagctagagagggtcatgagttccctcctggacatgggtttcagcaatgcccatattaatgaattgctcagtgtacggcgaggtgccagtcttcaacagttgctggacatcatttcagaatttattctcttgggtctgaatccagagcctgtgtgtgtggtcttgaagaaaagtccccagttattgaaactgcctattatgcaaatgaggaagcgctccagttacctgcaaaagcttgggcttggagaagggaaattaaagagggtgctttactgttgccctgaaattttcaccatgcgccagcaggacattaacgacactgtcaggcttctcaaggagaagtgccttttcacggtacagcaagtcaccaagattttgcacagttgcccctctgttcttcgagaggacctgggtcaactggaatacaagtttcagtatgcatacttcaggatgggaattaagcatccagacattgtaaagagtgagtacttgcagtattcactaaccaagattaagcagagacacatttacctggagcgcctgggacggtaccaaacccctgataagaaggggcagacacagatccctaacccattgctcaaggacattctcagagtttcagaagctgagtttttggccaggacagcctgtacttctgttgaggagtttcaagtttttaagaagctcctggctcgggaggaggaggagtctgagagcagcacatctgatgacaaaagggcaagtctggatgaggatgaggatgacgatgatgaggaggacaatgatgaggatgacaatgatgaggatgacgatgatgaggacgacgacgaggcggaggacaatgatgaggatgaggacgacgacgaggaggaatagctgtgatggaaggactagagcgaaagggcccagagatatcaaggaagcttttcattctcttaaagcttttgggtcctttacttgaatcttctcaagttattttttattctaaaactggtctcttgatgaaaaaaattataagtcacctgagaggcagacagatcaaaccaaacaggaaacaggaaatgcatgtttgatctgttgtcacgtgtctgtggggagggccctgtcccatcctgaataagatacttatgttgagctattcacatcaaggggactcaatatatcaacaattggttttatttttttctcttttgaatatgttggtgataattccgtgacagttggaagatggggttcattcttccggttcaggaatcactatgtatttccttcttgtgataaaaataaaattacgagaaggcaatgtgaggttttagtacatcatagcactttattttatgaaaacatgtagcagattttccacaaaaatgcttatttttaatccaaaagtatattgcttcataatggtattcagtgcacagcagagtaaaagaagttaattcatgatgtactggttaattttgcatggcttcttaaggccagcaaaatgctggcagttttctttatctttgtgaagaacaggcccttcctgtttggggaagttggcttttatgtcagctcttggccagtggtcacttccaagcctggtgtctccggccctgtagtctgtagtgccagactgtgctggcctggagagtgctggggcaggtggaggccagggaatggtcccatacagttatctcccctgccctggttacagacagcttcgagaaccagaggagaagagcatagggtcatggagcaggtgggctgaagccagggccacagggagcaatccgtgaccccccaaggtgggtgtgggggggggggggggcntgtcaccttagggaactcaatgagtccgaagaacaatttgaaatgttgggaaaagagaagaggaatttgatgtcagccggggtgatccctgagntagaggcctgtctctgatggcatgagctctaagagggtcctggaggattggtacatcctagaacattccagttagccctcttttaggggaaactggcataggattgatgcagaaggcatttttgatgatgggaccaaaattcaagtctccttggtagcattctaggatcaactagatcctaggatctggtagattgtaggattctagtgggtagaggccaggggtgctgtgaaacatcctgcagtgcacaggatggtcccacaagagaggatgatccggcccagaatgtcagtgctgagcctgagaaactcatctaaggcctggtccacaacagtaatgtgactgttcactcgtgacaacttcagatggtaaatggacttaggatcgtattattttatttaaaagaaaaataaggagctggtttttcagccgggttcctttcccctatgcactggaatacccctggtaggtgtgagctgcatgcaattgtggggattcagcactgaaatctaggtgcttttgttttctccagcagcctcgtcttacagcgtgactgcaaagaaaaagacttttgttttgcaaaagaaaagcagctcggtgactccgtccacatcgccacagttgagtcagatggcagtggcagtcctttgccagtggaaggagttcctgctaaggggaggtgcaggaggtgagctgatacctgagtggggcccttgcctgttgggttctctactggaggacagtgggcacagcaaagattcccttacttgtacctggcagcccacacgcaatggggaaaagggagagtttgtctttattgccttgcttggccataggcaaaactgtttggaaatgagacatttcactgtgccagtgttttcattttctcttccattgtggcatcccggtcactgccaccctccctagaacctaggctgttgttgtacccagtcggaggactaagtagaatcctcagtctgcacttngttagatgatcagtccatcccggtttcattagcagatgggtaattcagcaactcaggattgcttctttcattttgatacagaaatctttatgctcctgacagttttctgattctattattactaatttccttgggtggactttgagtattttcaaggaagccatttgagtttttaaaagaagccacatgggaaaagctgtggtggcctctttggaatgtttcaagaacgaactgtaattcctgagcaccaggaagtctttttacttgatatttaatgtggaaaacatcccaatgggcaagtcctgtgacagcacttgggactcaggagccagttcttgttgacacaaggcttctaagctaacactggagcatattagcatttgctgtgtggcaccaagcttgggactcaggagccagttcttgttgacacaaggcttctaagctaacactggagcatattagcatttgctgtgtggcaccaagcttgggactcaggagccagttcttgttgacacaaggcttctaagctaacactggagcatattagcatttgctgtgtggctgaggggcttgaggtcctagtagggagtagaaagtttcctagtaggattcacctacttttccagtgatatcactcgatcttagcatctgctagtaatgctgtagcttacatggacaaacagtgacaggtcccagggcggcaggaagtccgcagtacgcgtttgtgaacgtggtttctctcagttcacccagtgacccttcgctgagctcgagacccttcattgagctccaccttctgctctcaagtgggtctggagcctggggaacagctcgggagtacaggtgaaacttctcgaattgcctgttccttctttctgaaaatgacaaattgcagaatacacagacacatgcacatgaaattttaataaagataaaaagcctaaaatatactctaactcttcaaaaaacatttttatgaaagaggaaaggaaggaggccctctttgtggctggaatgctggctctgagcagagtcagggtgacgcggcagggcgctggctttccagctgggtcagcggtcgtgaggctcaacacgagaggaggtggggtggctgctttggttgtaacattagcagggggaagacagctgcttagaagcatggtgggaagcagatgtggtgaagtgccgtactgttctgcttacaaagatggggatgtctaagatcgtgtttactacctgatagcctaaaacagtatcacttgagtcatggactaaaaggaaccttaaacattgtccagcccagcccaggtgtccatctctgttgcactgagacttgtaaggcgtccttgctgcttcgtggcagtgtgccttagctttccaagcaggggtctgaatagctttttccatgaaaattcaggggtctttctttgatacccttgtgacttgtcattcaggggatggcttccactgtttaaggctgaagcctaggtgatctcatagaacagggttcaccaaataaggcccatgggccaatttggccaccacctgttattgtaaataagtttttattggaacatagccgcagccattcaatgacatgcctgtggctgtgtctgcgctactgtagccacagggacctctggtctgcaaagctgaaaacgtttaccgtctgacccttgatagagaaaggctgccagtcgcgccgttgtctaaaaaagtctgaactccaccttagtgttaactagtccataggatggctcgtcgacctgcacgagcgtcataaacacgctggaggaccagagcaggggcggctgtgtctgcaacccggctttccttctgacatcacctggtctctgccc

SEQ ID NO: 349289 - DNA, 5205 bp, Homo sapiens
  misc_feature (2146)..(2146): n is a, c, g, or t
  misc_feature (2240)..(2240): n is a, c, g, or t
gtgaaggacgggggaggaccgctgcttccggcgccgtaactgctgccatcttctccgcgctatggctgcgttcggccgtcaggtccttgattggcaccgcctgatccccctcacctgggcctgtatggctaggcagactcctcatcttggagaacagagaaggacgacagcttctttgttgcgcaaactgactacagcctccaatggaggggtcattgaggagttatcttgtgttagatccaataactatgtgcaggaaccagagtgcaggaggaatcttgttcagtgcctccttgagaagcaggggactcctgtggtacaagggtccttggagctagagagggtcatgagttccctcctggacatgggtttcagcaatgcccatattaatgaattgctcagtgtacggcgaggtgccagtcttcaacagttgctggacatcatttcagaatttattctcttgggtctgaatccagagcctgtgtgtgtggtcttgaagaaaagtccccagttattgaaactgcctattatgcaaatgaggaagcgctccagttacctgcaaaagcttgggcttggagaagggaaattaaagagggtgctttactgttgccctgaaattttcaccatgcgccagcaggacattaacgacactgtcaggcttctcaaggagaagtgccttttcacggtacagcaagtcaccaagattttgcacagttgcccctctgttcttcgagaggacctgggtcaactggaatacaagtttcagtatgcatacttcaggatgggaattaagcatccagacattgtaaagagtgagtacttgcagtattcactaaccaagattaagcagagacacatttacctggagcgcctgggacggtaccaaacccctgataagaaggggcagacacagatccctaacccattgctcaaggacattctcagagtttcagaagctgagtttttggccaggacagcctgtacttctgttgaggagtttcaagtttttaagaagctcctggctcgggaggaggaggagtctgagagcagcacatctgatgacaaaagggcaagtctggatgaggatgaggatgacgatgatgaggaggacaatgatgaggatgacaatgatgaggatgacgatgatgaggacgacgacgaggcggaggacaatgatgaggatgaggacgacgacgaggaggaatagctgtgatggaaggactagagcgaaagggcccagagatatcaaggaagcttttcattctcttaaagcttttgggtcctttacttgaatcttctcaagttattttttattctaaaactggtctcttgatgaaaaaaattataagtcacctgagaggcagacagatcaaaccaaacaggaaacaggaaatgcatgtttgatctgttgtcacgtgtctgtggggagggccctgtcccatcctgaataagatacttatgttgagctattcacatcaaggggactcaatatatcaacaattggttttatttttttctcttttgaatatgttggtgataattccgtgacagttggaagatggggttcattcttccggttcaggaatcactatgtatttccttcttgtgataaaaataaaattacgagaaggcaatgtgaggttttagtacatcatagcactttattttatgaaaacatgtagcagattttccacaaaaatgcttatttttaatccaaaagtatattgcttcataatggtattcagtgcacagcagagtaaaagaagttaattcatgatgtactggttaattttgcatggcttcttaaggccagcaaaatgctggcagttttctttatctttgtgaagaacaggcccttcctgtttggggaagttggcttttatgtcagctcttggccagtggtcacttccaagcctggtgtctccggccctgtagtctgtagtgccagactgtgctggcctggagagtgctggggcaggtggaggccagggaatggtcccatacagttatctcccctgccctggttacagacagcttcgagaaccagaggagaagagcatagggtcatggagcaggtgggctgaagccagggccacagggagcaatccgtgaccccccaaggtgggtgtgggggggggggggggcntgtcaccttagggaactcaatgagtccgaagaacaatttgaaatgttgggaaaagagaagaggaatttgatgtcagccggggtgatccctgagntagaggcctgtctctgatggcatgagctctaagagggtcctggaggattggtacatcctagaacattccagttagccctcttttaggggaaactggcataggattgatgcagaaggcatttttgatgatgggaccaaaattcaagtctccttggtagcattctaggatcaactagatcctaggatctggtagattgtaggattctagtgggtagaggccaggggtgctgtgaaacatcctgcagtgcacaggatggtcccacaagagaggatgatccggcccagaatgtcagtgctgagcctgagaaactcatctaaggcctggtccacaacagtaatgtgactgttcactcgtgacaacttcagatggtaaatggacttaggatcgtattattttatttaaaagaaaaataaggagctggtttttcagccgggttcctttcccctatgcactggaatacccctggtaggtgtgagctgcatgcaattgtggggattcagcactgaaatctaggtgcttttgttttctccagcagcctcgtcttacagcgtgactgcaaagaaaaagacttttgttttgcaaaagaaaagcagctcggtgactccgtccacatcgccacagttgagtcagatggcagtggcagtcctttgccagtggaaggagttcctgctaaggggaggtgcaggaggactaatttattattgtgcaactgccagtcctgcgcattccagctacgctaagcgccctgcccaggcacgtaacaaaacatagacctgttttgaagtggcttgttacccaagggtgcctcactcatctgcgccaccaggaagatgaactgtgagggctcctataaggggcaggaagagcaaagctgtcctaggccaaccagagattcatctttcatgcagtgacatgttgataaaaaatgatggtcagtatgaaactggtaacaggttgtagatggctttctatggtatatcccagtctcttgcaaacgattgtgaagaatgccagtgttgtttaagattcggcagtttgtgtggggaggtgggggcaggatggggtttggttgccaaaagagtttgggaaatgctggcttaaacaaaggcgagaggaagttcctttcacgtcaggatttatgaatgcctatgagcccagtgtcagtgacgactttctagcggcggtcttcaacactttctaaatattaagcgatcaaggcccctgccccacttttagttccaacagaatgccgttcacaagatctgggaggcactctctcagccctctcctggagcccccggaatttctcagcagcccaggccctcccgctgcccgtggcccctcctcccaggtgccaggtggtcttccagcctctccaagggcccacccccctgcctcttcctcccactgcagctgatctaggggtttcttggccacatttcccttgagagagagtgggatttgccctatccacagagagcctcatttccacctgaaggtgtatttgtcagtggctagaccaggttcatgtctgtttccccttggggacttctgaaccttcctgcccgggagtctgtaacacagcagcacaggaccgcgcttcctttagcagtgctgagtaagcaggcagcggcactctgagatcccggggctgggcagtcgccccccacttcccagcagctctgtggtagtggggcgggagcagcagggacgtaccttaagatttctccagtgtctgactcttactttgtttcctgaaataattagagaaaagtcgtttaatgaaaaagagactgtgtaccttgaattctacagctacctcagtccaggctgcctgctgagatcctgtctttagctcacatacattccacggtgggggacaccattagtccagacaccgctgtggagattagcattttagtttgtgtgcgcccgcctggcttgaggcagtagtttaggaatgacaaggctagaaacctggctggctgtgagtcagagagagagaggatggacgtgggagaaagcaagcaaaagctaccctagggaagagccggtgacgtgcacaggccgagcagcacggctggtgagctgcaggctgcggccttgcccggacacttggtaatgccaaacaagtacgtgtggctactcattggtctatgaggacgatgacaggcttcgactctgtggtttctaaagcatataatattctcacgtacttctttcagcaaacgccaaacagtagtaattcttgtaactaccttgaaccctttgtggaaagaacctgggtgtgagtgaataaaaagtaaagagcgacgcgctatatcggccattaaatactcggggctgtccgtaacaccctgtgcttcccaattgtagcaccatgttctgtgtgaatatgcataaccagagtgaccccccccagcacccagcatgcccggctgtgcccctctgggtatgctcacatgcacatatatggacatacagtttcgtagcagaacgtggctgcccaggggctgcctatctgggcgagtagaccgcctggctcagcccacaggcctgcagcatcccatagcaccccgcccttgccccatcaccctgtgggctacatgcaggacacggcatgggcctgctccccagaggcacctgtttggggtcttcttgaggcttgtgctttcacagctctctttgaagcagatgtcttggtgaactcggtagactcttttatacctgttgtcacaagaaagctttgtaaaaccagacagtgaagcaaaatgttgccaactgcttaacctaggctatgtgaacccacagtaaacctgaaggtgtttgagggaaaaactgctattttctgaatgaaacgtgacctcctattgatgtattaaaatgtctaacataaaggtcatgtgatttgtaataaatttattgtggtacagtaatatgcataaaataaacccattttaatgtg

SEQ ID NO: 349290 - DNA, 5067 bp, Homo sapiens
  misc_feature (27)..(27): n is a, c, g, or t
  misc_feature (2128)..(2128): n is a, c, g, or t
  misc_feature (2222)..(2222): n is a, c, g, or t
  misc_feature (3208)..(3208): n is a, c, g, or t
agaaaagtatgtaaaaaaagaggaggnacggtccggaattccgggatgctgcgttcggccgtaagtccttgattggcaccgcctgatccccctcacctgggcctgtatggctaggcagactcctcatcttggagaacagagaaggacgacagcttctttgttgcgcaaactgactacagcctccaatggaggggtcattgaggagttatcttgtgttagatccaataactatgtgcaggaaccagagtgcaggaggaatcttgttcagtgcctccttgagaagcaggggactcctgtggtacaagggtccttggagctagagagggtcatgagttccctcctggacatgggtttcagcaatgcccatattaatgaattgctcagtgtacggcgaggtgccagtcttcaacagttgctggacatcatttcagaatttattctcttgggtctgaatccagagcctgtgtgtgtggtcttgaagaaaagtccccagttattgaaactgcctattatgcaaatgaggaagcgctccagttacctgcaaaagcttgggcttggagaagggaaattaaagagggtgctttactgttgccctgaaattttcaccatgcgccagcaggacattaacgacactgtcaggcttctcaaggagaagtgccttttcacggtacagcaagtcaccaagattttgcacagttgcccctctgttcttcgagaggacctgggtcaactggaatacaagtttcagtatgcatacttcaggatgggaattaagcatccagacattgtaaagagtgagtacttgcagtattcactaaccaagattaagcagagacacatttacctggagcgcctgggacggtaccaaacccctgataagaaggggcagacacagatccctaacccattgctcaaggacattctcagagtttcagaagctgagtttttggccaggacagcctgtacttctgttgaggagtttcaagtttttaagaagctcctggctcgggaggaggaggagtctgagagcagcacatctgatgacaaaagggcaagtctggatgaggatgaggatgacgatgatgaggaggacaatgatgaggatgacaatgatgaggatgacgatgatgaggacgacgacgaggcggaggacaatgatgaggatgaggacgacgacgaggaggaatagctgtgatggaaggactagagcgaaagggcccagagatatcaaggaagcttttcattctcttaaagcttttgggtcctttacttgaatcttctcaagttattttttattctaaaactggtctcttgatgaaaaaaattataagtcacctgagaggcagacagatcaaaccaaacaggaaacaggaaatgcatgtttgatctgttgtcacgtgtctgtggggagggccctgtcccatcctgaataagatacttatgttgagctattcacatcaaggggactcaatatatcaacaattggttttatttttttctcttttgaatatgttggtgataattccgtgacagttggaagatggggttcattcttccggttcaggaatcactatgtatttccttcttgtgataaaaataaaattacgagaaggcaatgtgaggttttagtacatcatagcactttattttatgaaaacatgtagcagattttccacaaaaatgcttatttttaatccaaaagtatattgcttcataatggtattcagtgcacagcagagtaaaagaagttaattcatgatgtactggttaattttgcatggcttcttaaggccagcaaaatgctggcagttttctttatctttgtgaagaacaggcccttcctgtttggggaagttggcttttatgtcagctcttggccagtggtcacttccaagcctggtgtctccggccctgtagtctgtagtgccagactgtgctggcctggagagtgctggggcaggtggaggccagggaatggtcccatacagttatctcccctgccctggttacagacagcttcgagaaccagaggagaagagcatagggtcatggagcaggtgggctgaagccagggccacagggagcaatccgtgaccccccaaggtgggtgtgggggggggggggggcntgtcaccttagggaactcaatgagtccgaagaacaatttgaaatgttgggaaaagagaagaggaatttgatgtcagccggggtgatccctgagntagaggcctgtctctgatggcatgagctctaagagggtcctggaggattggtacatcctagaacattccagttagccctcttttaggggaaactggcataggattgatgcagaaggcatttttgatgatgggaccaaaattcaagtctccttggtagcattctaggatcaactagatcctaggatctggtagattgtaggattctagtgggtagaggccaggggtgctgtgaaacatcctgcagtgcacaggatggtcccacaagagaggatgatccggcccagaatgtcagtgctgagcctgagaaactcatctaaggcctggtccacaacagtaatgtgactgttcactcgtgacaacttcagatggtaaatggacttaggatcgtattattttatttaaaagaaaaataaggagctggtttttcagccgggttcctttcccctatgcactggaatacccctggtaggtgtgagctgcatgcaattgtggggattcagcactgaaatctaggtgcttttgttttctccagcagcctcgtcttacagcgtgactgcaaagaaaaagacttttgttttgcaaaagaaaagcagctcggtgactccgtccacatcgccacagttgagtcagatggcagtggcagtcctttgccagtggaaggagttcctgctaaggggaggtgcaggaggtgagctgatacctgagtggggcccttgcctgttgggttctctactggaggacagtgggcacagcaaagattcccttacttgtacctggcagcccacacgcaatggggaaaagggagagtttgtctttattgccttgcttggccataggcaaaactgtttggaaatgagacatttcactgtgccagtgttttcattttctcttccattgtggcatcccggtcactgccaccctccctagaacctaggctgttgttgtacccagtcggaggactaagtagaatcctcagtctgcacttngttagatgatcagtccatcccggtttcattagcagatgggtaattcagcaactcaggattgcttctttcattttgatacagaaatctttatgctcctgacagttttctgattctattattactaatttccttgggtggactttgagtattttcaaggaagccatttgagtttttaaaagaagccacatgggaaaagctgtggtggcctctttggaatgtttcaagaacgaactgtaattcctgagcaccaggaagtctttttacttgatatttaatgtggaaaacatcccaatgggcaagtcctgtgacagcacttgggactcaggagccagttcttgttgacacaaggcttctaagctaacactggagcatattagcatttgctgtgtggcaccaagcttgggactcaggagccagttcttgttgacacaaggcttctaagctaacactggagcatattagcatttgctgtgtggcaccaagcttgggactcaggagccagttcttgttgacacaaggcttctaagctaacactggagcatattagcatttgctgtgtggctgaggggcttgaggtcctagtagggagtagaaagtttcctagtaggattcacctacttttccagtgatatcactcgatcttagcatctgctagtaatgctgtagcttacatggacaaacagtgacaggtcccagggcggcaggaagtccgcagtacgcgtttgtgaacgtggtttctctcagttcacccagtgacccttcgctgagctcgagacccttcattgagctccaccttctgctctcaagtgggtctggagcctggggaacagctcgggagtacaggtgaaacttctcgaattgcctgttccttctttctgaaaatgacaaattgcagaatacacagacacatgcacatgaaattttaataaagataaaaagcctaaaatatactctaactcttcaaaaaacatttttatgaaagaggaaaggaaggaggccctctttgtggctggaatgctggctctgagcagagtcagggtgacgcggcagggcgctggctttccagctgggtcagcggtcgtgaggctcaacacgagaggaggtggggtggctgctttggttgtaacattagcagggggaagacagctgcttagaagcatggtgggaagcagatgtggtgaagtgccgtactgttctgcttacaaagatggggatgtctaagatcgtgtttactacctgatagcctaaaacagtatcacttgagtcatggactaaaaggaaccttaaacattgtccagcccagcccaggtgtccatctctgttgcactgagacttgtaaggcgtccttgctgcttcgtggcagtgtgccttagctttccaagcaggggtctgaatagctttttccatgaaaattcaggggtctttctttgatacccttgtgacttgtcattcaggggatggcttccactgtttaaggctgaagcctaggtgatctcatagaacagggttcaccaaataaggcccatgggccaatttggccaccacctgttattgtaaataagtttttattggaacatagccgcagccattcaatgacatgcctgtggctgtgtctgcgctactgtagccacagggacctctggtctgcaaagctgaaaacgtttaccgtctgacccttgatagagaaaggctgccagtcgcgccgttgtctaaaaaagtctgaactccaccttagtgttaactagtccataggatggctcgtcgacctgcacgagcgtcataaacacgctggaggaccagagcaggggcggctgtgtctgcaacccggctttccttctgacatcacctggtctctgccc

SEQ ID NO: 349291 - DNA, 5519 bp, Homo sapiens
  misc_feature (2580)..(2580): n is a, c, g, or t
  misc_feature (2674)..(2674): n is a, c, g, or t
  misc_feature (3660)..(3660): n is a, c, g, or t
aggcttgagcccagttccacgggccgcgcccgctgaccccagcgactgccaggtgttcctggcggagggagcatctggacaggggaggctggagagcagccagagcttgggcttggcagggtggccccagggcgacaatcgatgacgctggagaaggggttgggaccgatgtgaaggttttagagcaggggttccccaacccccggtaccgtcccttgcctattaggaaccaggctgcacagcaggaggtgagcggcaagtgagccagccagactgtatttacagccgctcccttcgctggcattaccgcctgagctccgcctcctgtcagaccagccgccttagattctcactggagcgcgaaccctattgtgaactgcgcctttgaggggtccaggttgcgctccttatgagaatctgatgcccgatgatctgtcactgtttcccatcaaccccagatggcacctcctggttgtaggaaaacaagctcagggctcccagtgattctacattatggtccttgattggcaccgcctgatccccctcacctgggcctgtatggctaggcagactcctcatcttggagaacagagaaggacgacagcttctttgttgcgcaaactgactacagcctccaatggaggggtcattgaggagttatcttgtgttagatccaataactatgtgcaggaaccagagtgcaggaggaatcttgttcagtgcctccttgagaagcaggggactcctgtggtacaagggtccttggagctagagagggtcatgagttccctcctggacatgggtttcagcaatgcccatattaatgaattgctcagtgtacggcgaggtgccagtcttcaacagttgctggacatcatttcagaatttattctcttgggtctgaatccagagcctgtgtgtgtggtcttgaagaaaagtccccagttattgaaactgcctattatgcaaatgaggaagcgctccagttacctgcaaaagcttgggcttggagaagggaaattaaagagggtgctttactgttgccctgaaattttcaccatgcgccagcaggacattaacgacactgtcaggcttctcaaggagaagtgccttttcacggtacagcaagtcaccaagattttgcacagttgcccctctgttcttcgagaggacctgggtcaactggaatacaagtttcagtatgcatacttcaggatgggaattaagcatccagacattgtaaagagtgagtacttgcagtattcactaaccaagattaagcagagacacatttacctggagcgcctgggacggtaccaaacccctgataagaaggggcagacacagatccctaacccattgctcaaggacattctcagagtttcagaagctgagtttttggccaggacagcctgtacttctgttgaggagtttcaagtttttaagaagctcctggctcgggaggaggaggagtctgagagcagcacatctgatgacaaaagggcaagtctggatgaggatgaggatgacgatgatgaggaggacaatgatgaggatgacaatgatgaggatgacgatgatgaggacgacgacgaggcggaggacaatgatgaggatgaggacgacgacgaggaggaatagctgtgatggaaggactagagcgaaagggcccagagatatcaaggaagcttttcattctcttaaagcttttgggtcctttacttgaatcttctcaagttattttttattctaaaactggtctcttgatgaaaaaaattataagtcacctgagaggcagacagatcaaaccaaacaggaaacaggaaatgcatgtttgatctgttgtcacgtgtctgtggggagggccctgtcccatcctgaataagatacttatgttgagctattcacatcaaggggactcaatatatcaacaattggttttatttttttctcttttgaatatgttggtgataattccgtgacagttggaagatggggttcattcttccggttcaggaatcactatgtatttccttcttgtgataaaaataaaattacgagaaggcaatgtgaggttttagtacatcatagcactttattttatgaaaacatgtagcagattttccacaaaaatgcttatttttaatccaaaagtatattgcttcataatggtattcagtgcacagcagagtaaaagaagttaattcatgatgtactggttaattttgcatggcttcttaaggccagcaaaatgctggcagttttctttatctttgtgaagaacaggcccttcctgtttggggaagttggcttttatgtcagctcttggccagtggtcacttccaagcctggtgtctccggccctgtagtctgtagtgccagactgtgctggcctggagagtgctggggcaggtggaggccagggaatggtcccatacagttatctcccctgccctggttacagacagcttcgagaaccagaggagaagagcatagggtcatggagcaggtgggctgaagccagggccacagggagcaatccgtgaccccccaaggtgggtgtgggggggggggggggcntgtcaccttagggaactcaatgagtccgaagaacaatttgaaatgttgggaaaagagaagaggaatttgatgtcagccggggtgatccctgagntagaggcctgtctctgatggcatgagctctaagagggtcctggaggattggtacatcctagaacattccagttagccctcttttaggggaaactggcataggattgatgcagaaggcatttttgatgatgggaccaaaattcaagtctccttggtagcattctaggatcaactagatcctaggatctggtagattgtaggattctagtgggtagaggccaggggtgctgtgaaacatcctgcagtgcacaggatggtcccacaagagaggatgatccggcccagaatgtcagtgctgagcctgagaaactcatctaaggcctggtccacaacagtaatgtgactgttcactcgtgacaacttcagatggtaaatggacttaggatcgtattattttatttaaaagaaaaataaggagctggtttttcagccgggttcctttcccctatgcactggaatacccctggtaggtgtgagctgcatgcaattgtggggattcagcactgaaatctaggtgcttttgttttctccagcagcctcgtcttacagcgtgactgcaaagaaaaagacttttgttttgcaaaagaaaagcagctcggtgactccgtccacatcgccacagttgagtcagatggcagtggcagtcctttgccagtggaaggagttcctgctaaggggaggtgcaggaggtgagctgatacctgagtggggcccttgcctgttgggttctctactggaggacagtgggcacagcaaagattcccttacttgtacctggcagcccacacgcaatggggaaaagggagagtttgtctttattgccttgcttggccataggcaaaactgtttggaaatgagacatttcactgtgccagtgttttcattttctcttccattgtggcatcccggtcactgccaccctccctagaacctaggctgttgttgtacccagtcggaggactaagtagaatcctcagtctgcacttngttagatgatcagtccatcccggtttcattagcagatgggtaattcagcaactcaggattgcttctttcattttgatacagaaatctttatgctcctgacagttttctgattctattattactaatttccttgggtggactttgagtattttcaaggaagccatttgagtttttaaaagaagccacatgggaaaagctgtggtggcctctttggaatgtttcaagaacgaactgtaattcctgagcaccaggaagtctttttacttgatatttaatgtggaaaacatcccaatgggcaagtcctgtgacagcacttgggactcaggagccagttcttgttgacacaaggcttctaagctaacactggagcatattagcatttgctgtgtggcaccaagcttgggactcaggagccagttcttgttgacacaaggcttctaagctaacactggagcatattagcatttgctgtgtggcaccaagcttgggactcaggagccagttcttgttgacacaaggcttctaagctaacactggagcatattagcatttgctgtgtggctgaggggcttgaggtcctagtagggagtagaaagtttcctagtaggattcacctacttttccagtgatatcactcgatcttagcatctgctagtaatgctgtagcttacatggacaaacagtgacaggtcccagggcggcaggaagtccgcagtacgcgtttgtgaacgtggtttctctcagttcacccagtgacccttcgctgagctcgagacccttcattgagctccaccttctgctctcaagtgggtctggagcctggggaacagctcgggagtacaggtgaaacttctcgaattgcctgttccttctttctgaaaatgacaaattgcagaatacacagacacatgcacatgaaattttaataaagataaaaagcctaaaatatactctaactcttcaaaaaacatttttatgaaagaggaaaggaaggaggccctctttgtggctggaatgctggctctgagcagagtcagggtgacgcggcagggcgctggctttccagctgggtcagcggtcgtgaggctcaacacgagaggaggtggggtggctgctttggttgtaacattagcagggggaagacagctgcttagaagcatggtgggaagcagatgtggtgaagtgccgtactgttctgcttacaaagatggggatgtctaagatcgtgtttactacctgatagcctaaaacagtatcacttgagtcatggactaaaaggaaccttaaacattgtccagcccagcccaggtgtccatctctgttgcactgagacttgtaaggcgtccttgctgcttcgtggcagtgtgccttagctttccaagcaggggtctgaatagctttttccatgaaaattcaggggtctttctttgatacccttgtgacttgtcattcaggggatggcttccactgtttaaggctgaagcctaggtgatctcatagaacagggttcaccaaataaggcccatgggccaatttggccaccacctgttattgtaaataagtttttattggaacatagccgcagccattcaatgacatgcctgtggctgtgtctgcgctactgtagccacagggacctctggtctgcaaagctgaaaacgtttaccgtctgacccttgatagagaaaggctgccagtcgcgccgttgtctaaaaaagtctgaactccaccttagtgttaactagtccataggatggctcgtcgacctgcacgagcgtcataaacacgctggaggaccagagcaggggcggctgtgtctgcaacccggctttccttctgacatcacctggtctctgccc

SEQ ID NO: 349292 - DNA, 3306 bp, Homo sapiens
  misc_feature (2146)..(2146): n is a, c, g, or t
  misc_feature (2240)..(2240): n is a, c, g, or t
gtgaaggacgggggaggaccgctgcttccggcgccgtaactgctgccatcttctccgcgctatggctgcgttcggccgtcaggtccttgattggcaccgcctgatccccctcacctgggcctgtatggctaggcagactcctcatcttggagaacagagaaggacgacagcttctttgttgcgcaaactgactacagcctccaatggaggggtcattgaggagttatcttgtgttagatccaataactatgtgcaggaaccagagtgcaggaggaatcttgttcagtgcctccttgagaagcaggggactcctgtggtacaagggtccttggagctagagagggtcatgagttccctcctggacatgggtttcagcaatgcccatattaatgaattgctcagtgtacggcgaggtgccagtcttcaacagttgctggacatcatttcagaatttattctcttgggtctgaatccagagcctgtgtgtgtggtcttgaagaaaagtccccagttattgaaactgcctattatgcaaatgaggaagcgctccagttacctgcaaaagcttgggcttggagaagggaaattaaagagggtgctttactgttgccctgaaattttcaccatgcgccagcaggacattaacgacactgtcaggcttctcaaggagaagtgccttttcacggtacagcaagtcaccaagattttgcacagttgcccctctgttcttcgagaggacctgggtcaactggaatacaagtttcagtatgcatacttcaggatgggaattaagcatccagacattgtaaagagtgagtacttgcagtattcactaaccaagattaagcagagacacatttacctggagcgcctgggacggtaccaaacccctgataagaaggggcagacacagatccctaacccattgctcaaggacattctcagagtttcagaagctgagtttttggccaggacagcctgtacttctgttgaggagtttcaagtttttaagaagctcctggctcgggaggaggaggagtctgagagcagcacatctgatgacaaaagggcaagtctggatgaggatgaggatgacgatgatgaggaggacaatgatgaggatgacaatgatgaggatgacgatgatgaggacgacgacgaggcggaggacaatgatgaggatgaggacgacgacgaggaggaatagctgtgatggaaggactagagcgaaagggcccagagatatcaaggaagcttttcattctcttaaagcttttgggtcctttacttgaatcttctcaagttattttttattctaaaactggtctcttgatgaaaaaaattataagtcacctgagaggcagacagatcaaaccaaacaggaaacaggaaatgcatgtttgatctgttgtcacgtgtctgtggggagggccctgtcccatcctgaataagatacttatgttgagctattcacatcaaggggactcaatatatcaacaattggttttatttttttctcttttgaatatgttggtgataattccgtgacagttggaagatggggttcattcttccggttcaggaatcactatgtatttccttcttgtgataaaaataaaattacgagaaggcaatgtgaggttttagtacatcatagcactttattttatgaaaacatgtagcagattttccacaaaaatgcttatttttaatccaaaagtatattgcttcataatggtattcagtgcacagcagagtaaaagaagttaattcatgatgtactggttaattttgcatggcttcttaaggccagcaaaatgctggcagttttctttatctttgtgaagaacaggcccttcctgtttggggaagttggcttttatgtcagctcttggccagtggtcacttccaagcctggtgtctccggccctgtagtctgtagtgccagactgtgctggcctggagagtgctggggcaggtggaggccagggaatggtcccatacagttatctcccctgccctggttacagacagcttcgagaaccagaggagaagagcatagggtcatggagcaggtgggctgaagccagggccacagggagcaatccgtgaccccccaaggtgggtgtgggggggggggggggcntgtcaccttagggaactcaatgagtccgaagaacaatttgaaatgttgggaaaagagaagaggaatttgatgtcagccggggtgatccctgagntagaggcctgtctctgatggcatgagctctaagagggtcctggaggattggtacatcctagaacattccagttagccctcttttaggggaaactggcataggattgatgcagaaggcatttttgatgatgggaccaaaattcaagtctccttggtagcattctaggatcaactagatcctaggatctggtagattgtaggattctagtgggtagaggccaggggtgctgtgaaacatcctgcagtgcacaggatggtcccacaagagaggatgatccggcccagaatgtcagtgctgagcctgagaaactcatctaaggcctggtccacaacagtaatgtgactgttcactcgtgacaacttcagatggtaaatggacttaggatcgtattattttatttaaaagaaaaataaggagctggtttttcagccgggttcctttcccctatgcactggaatacccctggtaggtgtgagctgcatgcaattgtggggattcagcactgaaatctaggtgcttttgttttctccagcagcctcgtcttacagcgtgactgcaaagaaaaagacttttgttttgcaaaagaaaagcagctcggtgactccgtccacatcgccacagttgagtcagatggcagtggcagtcctttgccagtggaaggagttcctgctaaggggaggtgcaggaggactaatttattattgtgcaactgccagtcctgcgcattccagctacgctaagcgccctgcccaggcacgtaacaaaacatagacctgttttgaagtggcttgttacccaagggtgcctcactcatctgcgccaccaggaagatgaactgtgagggctcctataaggggcaggaagagcaaagctgtcctaggccaaccagagattcatctttcatgcagtgacatgttgataaaaaatgatggaagtaccaccaagaacagggaaggacaagccagaggctggaggaagatacctgcagaacacagacctgacaaaggatcagtatcaaaacatataagaattttgacaaatgaataaaaagagtacaaataaccca

SEQ ID NO: 349293 - DNA, 3856 bp, Homo sapiens
  misc_feature (2146)..(2146): n is a, c, g, or t
  misc_feature (2240)..(2240): n is a, c, g, or t
gtgaaggacgggggaggaccgctgcttccggcgccgtaactgctgccatcttctccgcgctatggctgcgttcggccgtcaggtccttgattggcaccgcctgatccccctcacctgggcctgtatggctaggcagactcctcatcttggagaacagagaaggacgacagcttctttgttgcgcaaactgactacagcctccaatggaggggtcattgaggagttatcttgtgttagatccaataactatgtgcaggaaccagagtgcaggaggaatcttgttcagtgcctccttgagaagcaggggactcctgtggtacaagggtccttggagctagagagggtcatgagttccctcctggacatgggtttcagcaatgcccatattaatgaattgctcagtgtacggcgaggtgccagtcttcaacagttgctggacatcatttcagaatttattctcttgggtctgaatccagagcctgtgtgtgtggtcttgaagaaaagtccccagttattgaaactgcctattatgcaaatgaggaagcgctccagttacctgcaaaagcttgggcttggagaagggaaattaaagagggtgctttactgttgccctgaaattttcaccatgcgccagcaggacattaacgacactgtcaggcttctcaaggagaagtgccttttcacggtacagcaagtcaccaagattttgcacagttgcccctctgttcttcgagaggacctgggtcaactggaatacaagtttcagtatgcatacttcaggatgggaattaagcatccagacattgtaaagagtgagtacttgcagtattcactaaccaagattaagcagagacacatttacctggagcgcctgggacggtaccaaacccctgataagaaggggcagacacagatccctaacccattgctcaaggacattctcagagtttcagaagctgagtttttggccaggacagcctgtacttctgttgaggagtttcaagtttttaagaagctcctggctcgggaggaggaggagtctgagagcagcacatctgatgacaaaagggcaagtctggatgaggatgaggatgacgatgatgaggaggacaatgatgaggatgacaatgatgaggatgacgatgatgaggacgacgacgaggcggaggacaatgatgaggatgaggacgacgacgaggaggaatagctgtgatggaaggactagagcgaaagggcccagagatatcaaggaagcttttcattctcttaaagcttttgggtcctttacttgaatcttctcaagttattttttattctaaaactggtctcttgatgaaaaaaattataagtcacctgagaggcagacagatcaaaccaaacaggaaacaggaaatgcatgtttgatctgttgtcacgtgtctgtggggagggccctgtcccatcctgaataagatacttatgttgagctattcacatcaaggggactcaatatatcaacaattggttttatttttttctcttttgaatatgttggtgataattccgtgacagttggaagatggggttcattcttccggttcaggaatcactatgtatttccttcttgtgataaaaataaaattacgagaaggcaatgtgaggttttagtacatcatagcactttattttatgaaaacatgtagcagattttccacaaaaatgcttatttttaatccaaaagtatattgcttcataatggtattcagtgcacagcagagtaaaagaagttaattcatgatgtactggttaattttgcatggcttcttaaggccagcaaaatgctggcagttttctttatctttgtgaagaacaggcccttcctgtttggggaagttggcttttatgtcagctcttggccagtggtcacttccaagcctggtgtctccggccctgtagtctgtagtgccagactgtgctggcctggagagtgctggggcaggtggaggccagggaatggtcccatacagttatctcccctgccctggttacagacagcttcgagaaccagaggagaagagcatagggtcatggagcaggtgggctgaagccagggccacagggagcaatccgtgaccccccaaggtgggtgtgggggggggggggggcntgtcaccttagggaactcaatgagtccgaagaacaatttgaaatgttgggaaaagagaagaggaatttgatgtcagccggggtgatccctgagntagaggcctgtctctgatggcatgagctctaagagggtcctggaggattggtacatcctagaacattccagttagccctcttttaggggaaactggcataggattgatgcagaaggcatttttgatgatgggaccaaaattcaagtctccttggtagcattctaggatcaactagatcctaggatctggtagattgtaggattctagtgggtagaggccaggggtgctgtgaaacatcctgcagtgcacaggatggtcccacaagagaggatgatccggcccagaatgtcagtgctgagcctgagaaactcatctaaggcctggtccacaacagtaatgtgactgttcactcgtgacaacttcagatggtaaatggacttaggatcgtattattttatttaaaagaaaaataaggagctggtttttcagccgggttcctttcccctatgcactggaatacccctggtaggtgtgagctgcatgcaattgtggggattcagcactgaaatctaggtgcttttgttttctccagcagcctcgtcttacagcgtgactgcaaagaaaaagacttttgttttgcaaaagaaaagcagctcggtgactccgtccacatcgccacagttgagtcagatggcagtggcagtcctttgccagtggaaggagttcctgctaaggggaggtgcaggaggactaatttattattgtgcaactgccagtcctgcgcattccagctacgctaagcgccctgcccaggcacgtaacaaaacatagacctgttttgaagtggcttgttacccaagggtgcctcactcatctgcgccaccaggaagatgaactgtgagggctcctataaggggcaggaagagcaaagctgtcctaggccaaccagagattcatctttcatgcagtgacatgttgataaaaaatgatggaagtaccaccaagaacagggaaggacaagccagaggctggaggaagatacctgcagaacacagacctgacaaaggatcagtatcaaaacatataagaattttgacaaatgaataaaaagagtacaaataacccaacataaagtcaaaaggcgtgatcaggcatttcacagaagcaaacacctttggtggatgcccatgaggagaggcgcagtcacatcagtgcccaggagatgcaaacccagatcccaggggtgtgcatcccacccgttctgcctgtaggatctgcaaacccggcaaaacctagttctagagagactggattcactgcatgtcttcatcactgctggagggagcgcagactgctatcgcctcttagaaaatgacttagttctcatgtaatttgggcattcacacatcctcatcctagatccagcttttccactcccgcacacgtactggaaaacctgtacaggaacatccactgcagcactgctcataccaaacacaacctacatgttctctgcacagagaggggagaagagccggtcagttcactcagtggactctgtgctcaatagtaggtgtgaataagccgcagccgcccagaccgcatgggccaacctcagtccgagaatgcggagtgaaaacacaggtctaacgatcacacatggcaagataattatc

SEQ ID NO: 349294 - DNA, 2515 bp, Homo sapiens
gtgaaggacgggggaggaccgctgcttccggcgccgtaactgctgccatcttctccgcgctatggctgcgttcggccgtcagcagcctcgtcttacagcgtgactgcaaagaaaaagacttttgttttgcaaaagaaaagcagctcggtgactccgtccacatcgccacagttgagtcagatggcagtggcagtcctttgccagtggaaggagttcctgctaaggggaggtgcaggaggactaatttattattgtgcaactgccagtcctgcgcattccagctacgctaagcgccctgcccaggcacgtaacaaaacatagacctgttttgaagtggcttgttacccaagggtgcctcactcatctgcgccaccaggaagatgaactgtgagggctcctataaggggcaggaagagcaaagctgtcctaggccaaccagagattcatctttcatgcagtgacatgttgataaaaaatgatggtcagtatgaaactggtaacaggttgtagatggctttctatggtatatcccagtctcttgcaaacgattgtgaagaatgccagtgttgtttaagattcggcagtttgtgtggggaggtgggggcaggatggggtttggttgccaaaagagtttgggaaatgctggcttaaacaaaggcgagaggaagttcctttcacgtcaggatttatgaatgcctatgagcccagtgtcagtgacgactttctagcggcggtcttcaacactttctaaatattaagcgatcaaggcccctgccccacttttagttccaacagaatgccgttcacaagatctgggaggcactctctcagccctctcctggagcccccggaatttctcagcagcccaggccctcccgctgcccgtggcccctcctcccaggtgccaggtggtcttccagcctctccaagggcccacccccctgcctcttcctcccactgcagctgatctaggggtttcttggccacatttcccttgagagagagtgggatttgccctatccacagagagcctcatttccacctgaaggtgtatttgtcagtggctagaccaggttcatgtctgtttccccttggggacttctgaaccttcctgcccgggagtctgtaacacagcagcacaggaccgcgcttcctttagcagtgctgagtaagcaggcagcggcactctgagatcccggggctgggcagtcgccccccacttcccagcagctctgtggtagtggggcgggagcagcagggacgtaccttaagatttctccagtgtctgactcttactttgtttcctgaaataattagagaaaagtcgtttaatgaaaaagagactgtgtaccttgaattctacagctacctcagtccaggctgcctgctgagatcctgtctttagctcacatacattccacggtgggggacaccattagtccagacaccgctgtggagattagcattttagtttgtgtgcgcccgcctggcttgaggcagtagtttaggaatgacaaggctagaaacctggctggctgtgagtcagagagagagaggatggacgtgggagaaagcaagcaaaagctaccctagggaagagccggtgacgtgcacaggccgagcagcacggctggtgagctgcaggctgcggccttgcccggacacttggtaatgccaaacaagtacgtgtggctactcattggtctatgaggacgatgacaggcttcgactctgtggtttctaaagcatataatattctcacgtacttctttcagcaaacgccaaacagtagtaattcttgtaactaccttgaaccctttgtggaaagaacctgggtgtgagtgaataaaaagtaaagagcgacgcgctatatcggccattaaatactcggggctgtccgtaacaccctgtgcttcccaattgtagcaccatgttctgtgtgaatatgcataaccagagtgaccccccccagcacccagcatgcccggctgtgcccctctgggtatgctcacatgcacatatatggacatacagtttcgtagcagaacgtggctgcccaggggctgcctatctgggcgagtagaccgcctggctcagcccacaggcctgcagcatcccatagcaccccgcccttgccccatcaccctgtgggctacatgcaggacacggcatgggcctgctccccagaggcacctgtttggggtcttcttgaggcttgtgctttcacagctctctttgaagcagatgtcttggtgaactcggtagactcttttatacctgttgtcacaagaaagctttgtaaaaccagacagtgaagcaaaatgttgccaactgcttaacctaggctatgtgaacccacagtaaacctgaaggtgtttgagggaaaaactgctattttctgaatgaaacgtgacctcctattgatgtattaaaatgtctaacataaaggtcatgtgatttgtaataaatttattgtggtacagtaatatgcataaaataaacccattttaatgtg

SEQ ID NO: 349295 - DNA, 801 bp, Homo sapiens
gtgaaggacgggggaggaccgctgcttccggcgccgtaactgctgccatcttctccgcgctatggctgcgttcggccgtcagggaaattaaagagggtgctttactgttgccctgaaattttcaccatgcgccagcaggacattaacgacactgtcaggcttctcaaggagaagtgccttttcacggtacagcaagtcaccaagattttgcacagttgcccctctgttcttcgagaggacctgggtcaactggaatacaagtttcagcagcctcgtcttacagcgtgactgcaaagaaaaagacttttgttttgcaaaagaaaagcagctcggtgactccgtccacatcgccacagttgagtcagatggcagtggcagtcctttgccagtggaaggagttcctgctaaggggaggtgcaggaggactaatttattattgtgcaactgccagtcctgcgcattccagctacgctaagcgccctgcccaggcacgtaacaaaacatagacctgttttgaagtggcttgttacccaagggtgcctcactcatctgcgccaccaggaagatgaactgtgagggctcctataaggggcaggaagagcaaagctgtcctaggccaaccagagattcatctttcatgcagtgacatgttgataaaaaatgatggaagtaccaccaagaacagggaaggacaagccagaggctggaggaagatacctgcagaacacagacctgacaaaggatcagtatcaaaacatataagaattttgacaaatgaataaaaagagtacaaataaccca

SEQ ID NO: 349296 - DNA, 1166 bp, Homo sapiens
acccccccgactagcccgacaggattccaggctgcctgctgagatcctgtctttagctcacatacattccacggtgggggacaccattagtccagacaccgctgtggagattagcattttagtttgtgtgcgcccgcctggcttgaggcagtagtttaggaatgacaaggctagaaacctggctggctgtgagtcagagagagagaggatggacgtgggagaaagcaagcaaaagctaccctagggaagagccggtgacgtgcacaggccgagcagcacggctggtgagctgcaggctgcggccttgcccggacacttggtaatgccaaacaagtacgtgtggctactcattggtctatgaggacgatgacaggcttcgactctgtggtttctaaagcatataatattctcacgtacttctttcagcaaacgccaaacagtagtaattcttgtaactaccttgaaccctttgtggaaagaacctgggtgtgagtgaataaaaagtaaagagcgacgcgctatatcggccattaaatactcggggctgtccgtaacaccctgtgcttcccaattgtagcaccatgttctgtgtgaatatgcataaccagagtgaccccccccagcacccagcatgcccggctgtgcccctctgggtatgctcacatgcacatatatggacatacagtttcgtagcagaacgtggctgcccaggggctgcctatctgggcgagtagaccgcctggctcagcccacaggcctgcagcatcccatagcaccccgcccttgccccatcaccctgtgggctacatgcaggacacggcatgggcctgctccccagaggcacctgtttggggtcttcttgaggcttgtgctttcacagctctctttgaagcagatgtcttggtgaactcggtagactcttttatacctgttgtcacaagaaagctttgtaaaaccagacagtgaagcaaaatgttgccaactgcttaacctaggctatgtgaacccacagtaaacctgaaggtgtttgagggaaaaactgctattttctgaatgaaacgtgacctcctattgatgtattaaaatgtctaacataaaggtcatgtgatttgtaataaatttattgtggtacagtaatatgcataaaataaacccattttaatgtg

SEQ ID NO: 349297 - DNA, 1166 bp, Homo sapiens
gtgaaggacgggggaggaccgctgcttccggcgccgtaactgctgccatcttctccgcgctatggctgcgttcggccgtcagcagcctcgtcttacagcgtgactgcaaagaaaaagacttttgttttgcaaaagaaaagcagctcggtgactccgtccacatcgccacagttgagtcagatggcagtggcagtcctttgccagtggaaggagttcctgctaaggggaggtgcaggaggactaatttattattgtgcaactgccagtcctgcgcattccagctacgctaagcgccctgcccaggcacgtaacaaaacatagacctgttttgaagtggcttgttacccaagggtgcctcactcatctgcgccaccaggaagatgaactgtgagggctcctataaggggcaggaagagcaaagctgtcctaggccaaccagagattcatctttcatgcagtgacatgttgataaaaaatgatggaagtaccaccaagaacagggaaggacaagccagaggctggaggaagatacctgcagaacacagacctgacaaaggatcagtatcaaaacatataagaattttgacaaatgaataaaaagagtacaaataacccaacataaagtcaaaaggcgtgatcaggcatttcacagaagcaaacacctttggtggatgcccatgaggagaggcgcagtcacatcagtgcccaggagatgcaaacccagatcccaggggtgtgcatcccacccgttctgcctgtaggatctgcaaacccggcaaaacctagttctagagagactggattcactgcatgtcttcatcactgctggagggagcgcagactgctatcgcctcttagaaaatgacttagttctcatgtaatttgggcattcacacatcctcatcctagatccagcttttccactcccgcacacgtactggaaaacctgtacaggaacatccactgcagcactgctcataccaaacacaacctacatgttctctgcacagagaggggagaagagccggtcagttcactcagtggactctgtgctcaatagtaggtgtgaataagccgcagccgcccagaccgcatgggccaacctcagtccgagaatgcggagtgaaaacacaggtctaacgatcacacatggcaagataattatc

SEQ ID NO: 349298 - DNA, 701 bp, Homo sapiens
ggctaggtacgagctgggtttgaatcggccgaggctgtgcatcttctccgcgctatggctgcgttcggccgtcgtccttgattggcaccgcctgatccccctcacctgggcctgtatggctaggcagactcctcatcttggagaacagagaaggacgacagcttctttgttgcgcaaactgactacagcctccaatggaggggtcattgaggagttatcttgtgttagatccaataactatgtgcaggaaccagagtgcaggaggaatcttgttcagtgcctccttgagaagcaggggactcctgtggtacaagggtccttggagctagagagggtcatgagttccctcctggacatgggtttcagcaatgcccatattaatgaattgctcagtgtacggcgaggtgccagtcttcaacagttgctggacatcatttcagaatttattctcttgggtctgaatccagagcctgtgtgtgtggtcttgaagaaaagtccccagttattgaaactgcctattatgcaaatgaggaagcgctccagttacctgcaaaagcttgggcttggagaagaaggtacaagaagttgcagattttggctgggtgcggtggctcatgcctgtaatcccagatctttgggaggccgaggcaggcagatcacttgaggtcaggggttcaagatcagcctggccaacatggtga

SEQ ID NO: 349299 - DNA, 5377 bp, Homo sapiens
  misc_feature (2146)..(2146): n is a, c, g, or t
  misc_feature (2240)..(2240): n is a, c, g, or t
gtgaaggacgggggaggaccgctgcttccggcgccgtaactgctgccatcttctccgcgctatggctgcgttcggccgtcaggtccttgattggcaccgcctgatccccctcacctgggcctgtatggctaggcagactcctcatcttggagaacagagaaggacgacagcttctttgttgcgcaaactgactacagcctccaatggaggggtcattgaggagttatcttgtgttagatccaataactatgtgcaggaaccagagtgcaggaggaatcttgttcagtgcctccttgagaagcaggggactcctgtggtacaagggtccttggagctagagagggtcatgagttccctcctggacatgggtttcagcaatgcccatattaatgaattgctcagtgtacggcgaggtgccagtcttcaacagttgctggacatcatttcagaatttattctcttgggtctgaatccagagcctgtgtgtgtggtcttgaagaaaagtccccagttattgaaactgcctattatgcaaatgaggaagcgctccagttacctgcaaaagcttgggcttggagaagggaaattaaagagggtgctttactgttgccctgaaattttcaccatgcgccagcaggacattaacgacactgtcaggcttctcaaggagaagtgccttttcacggtacagcaagtcaccaagattttgcacagttgcccctctgttcttcgagaggacctgggtcaactggaatacaagtttcagtatgcatacttcaggatgggaattaagcatccagacattgtaaagagtgagtacttgcagtattcactaaccaagattaagcagagacacatttacctggagcgcctgggacggtaccaaacccctgataagaaggggcagacacagatccctaacccattgctcaaggacattctcagagtttcagaagctgagtttttggccaggacagcctgtacttctgttgaggagtttcaagtttttaagaagctcctggctcgggaggaggaggagtctgagagcagcacatctgatgacaaaagggcaagtctggatgaggatgaggatgacgatgatgaggaggacaatgatgaggatgacaatgatgaggatgacgatgatgaggacgacgacgaggcggaggacaatgatgaggatgaggacgacgacgaggaggaatagctgtgatggaaggactagagcgaaagggcccagagatatcaaggaagcttttcattctcttaaagcttttgggtcctttacttgaatcttctcaagttattttttattctaaaactggtctcttgatgaaaaaaattataagtcacctgagaggcagacagatcaaaccaaacaggaaacaggaaatgcatgtttgatctgttgtcacgtgtctgtggggagggccctgtcccatcctgaataagatacttatgttgagctattcacatcaaggggactcaatatatcaacaattggttttatttttttctcttttgaatatgttggtgataattccgtgacagttggaagatggggttcattcttccggttcaggaatcactatgtatttccttcttgtgataaaaataaaattacgagaaggcaatgtgaggttttagtacatcatagcactttattttatgaaaacatgtagcagattttccacaaaaatgcttatttttaatccaaaagtatattgcttcataatggtattcagtgcacagcagagtaaaagaagttaattcatgatgtactggttaattttgcatggcttcttaaggccagcaaaatgctggcagttttctttatctttgtgaagaacaggcccttcctgtttggggaagttggcttttatgtcagctcttggccagtggtcacttccaagcctggtgtctccggccctgtagtctgtagtgccagactgtgctggcctggagagtgctggggcaggtggaggccagggaatggtcccatacagttatctcccctgccctggttacagacagcttcgagaaccagaggagaagagcatagggtcatggagcaggtgggctgaagccagggccacagggagcaatccgtgaccccccaaggtgggtgtgggggggggggggggcntgtcaccttagggaactcaatgagtccgaagaacaatttgaaatgttgggaaaagagaagaggaatttgatgtcagccggggtgatccctgagntagaggcctgtctctgatggcatgagctctaagagggtcctggaggattggtacatcctagaacattccagttagccctcttttaggggaaactggcataggattgatgcagaaggcatttttgatgatgggaccaaaattcaagtctccttggtagcattctaggatcaactagatcctaggatctggtagattgtaggattctagtgggtagaggccaggggtgctgtgaaacatcctgcagtgcacaggatggtcccacaagagaggatgatccggcccagaatgtcagtgctgagcctgagaaactcatctaaggcctggtccacaacagtaatgtgactgttcactcgtgacaacttcagatggtaaatggacttaggatcgtattattttatttaaaagaaaaataaggagctggtttttcagccgggttcctttcccctatgcactggaatacccctggtaggtgtgagctgcatgcaattgtggggattcagcactgaaatctaggtgcttttgttttctccagcagcctcgtcttacagcgtgactgcaaagaaaaagacttttgttttgcaaaagaaaagcagctcggtgactccgtccacatcgccacagttgagtcagatggcagtggcagtcctttgccagtggaaggagttcctgctaaggggaggtgcaggagagtgtactccttctacttatgaaaaaaagttaactataaaatggcctcaggcaggtccttcaggaggtttccagaagaaggcatcattgtcacaggaggtggcagctccatgtgtgttactgggacacgatgtggaagtggaagaaggtgacatggatgatcctgcccctgtgactaatttattattgtgcaactgccagtcctgcgcattccagctacgctaagcgccctgcccaggcacgtaacaaaacatagacctgttttgaagtggcttgttacccaagggtgcctcactcatctgcgccaccaggaagatgaactgtgagggctcctataaggggcaggaagagcaaagctgtcctaggccaaccagagattcatctttcatgcagtgacatgttgataaaaaatgatggtcagtatgaaactggtaacaggttgtagatggctttctatggtatatcccagtctcttgcaaacgattgtgaagaatgccagtgttgtttaagattcggcagtttgtgtggggaggtgggggcaggatggggtttggttgccaaaagagtttgggaaatgctggcttaaacaaaggcgagaggaagttcctttcacgtcaggatttatgaatgcctatgagcccagtgtcagtgacgactttctagcggcggtcttcaacactttctaaatattaagcgatcaaggcccctgccccacttttagttccaacagaatgccgttcacaagatctgggaggcactctctcagccctctcctggagcccccggaatttctcagcagcccaggccctcccgctgcccgtggcccctcctcccaggtgccaggtggtcttccagcctctccaagggcccacccccctgcctcttcctcccactgcagctgatctaggggtttcttggccacatttcccttgagagagagtgggatttgccctatccacagagagcctcatttccacctgaaggtgtatttgtcagtggctagaccaggttcatgtctgtttccccttggggacttctgaaccttcctgcccgggagtctgtaacacagcagcacaggaccgcgcttcctttagcagtgctgagtaagcaggcagcggcactctgagatcccggggctgggcagtcgccccccacttcccagcagctctgtggtagtggggcgggagcagcagggacgtaccttaagatttctccagtgtctgactcttactttgtttcctgaaataattagagaaaagtcgtttaatgaaaaagagactgtgtaccttgaattctacagctacctcagtccaggctgcctgctgagatcctgtctttagctcacatacattccacggtgggggacaccattagtccagacaccgctgtggagattagcattttagtttgtgtgcgcccgcctggcttgaggcagtagtttaggaatgacaaggctagaaacctggctggctgtgagtcagagagagagaggatggacgtgggagaaagcaagcaaaagctaccctagggaagagccggtgacgtgcacaggccgagcagcacggctggtgagctgcaggctgcggccttgcccggacacttggtaatgccaaacaagtacgtgtggctactcattggtctatgaggacgatgacaggcttcgactctgtggtttctaaagcatataatattctcacgtacttctttcagcaaacgccaaacagtagtaattcttgtaactaccttgaaccctttgtggaaagaacctgggtgtgagtgaataaaaagtaaagagcgacgcgctatatcggccattaaatactcggggctgtccgtaacaccctgtgcttcccaattgtagcaccatgttctgtgtgaatatgcataaccagagtgaccccccccagcacccagcatgcccggctgtgcccctctgggtatgctcacatgcacatatatggacatacagtttcgtagcagaacgtggctgcccaggggctgcctatctgggcgagtagaccgcctggctcagcccacaggcctgcagcatcccatagcaccccgcccttgccccatcaccctgtgggctacatgcaggacacggcatgggcctgctccccagaggcacctgtttggggtcttcttgaggcttgtgctttcacagctctctttgaagcagatgtcttggtgaactcggtagactcttttatacctgttgtcacaagaaagctttgtaaaaccagacagtgaagcaaaatgttgccaactgcttaacctaggctatgtgaacccacagtaaacctgaaggtgtttgagggaaaaactgctattttctgaatgaaacgtgacctcctattgatgtattaaaatgtctaacataaaggtcatgtgatttgtaataaatttattgtggtacagtaatatgcataaaataaacccattttaatgtg

SEQ ID NO: 349300 - DNA, 5104 bp, Homo sapiens
  misc_feature (2165)..(2165): n is a, c, g, or t
  misc_feature (2259)..(2259): n is a, c, g, or t
  misc_feature (3245)..(3245): n is a, c, g, or t
gtgtggaaccaaggcagtaagtactctggctcagaagtcttatggtgtccattacactggaatagtgaggaattaattgtcttttggtcctgtgtcttacagtccttgattggcaccgcctgatccccctcacctgggcctgtatggctaggcagactcctcatcttggagaacagagaaggacgacagcttctttgttgcgcaaactgactacagcctccaatggaggggtcattgaggagttatcttgtgttagatccaataactatgtgcaggaaccagagtgcaggaggaatcttgttcagtgcctccttgagaagcaggggactcctgtggtacaagggtccttggagctagagagggtcatgagttccctcctggacatgggtttcagcaatgcccatattaatgaattgctcagtgtacggcgaggtgccagtcttcaacagttgctggacatcatttcagaatttattctcttgggtctgaatccagagcctgtgtgtgtggtcttgaagaaaagtccccagttattgaaactgcctattatgcaaatgaggaagcgctccagttacctgcaaaagcttgggcttggagaagggaaattaaagagggtgctttactgttgccctgaaattttcaccatgcgccagcaggacattaacgacactgtcaggcttctcaaggagaagtgccttttcacggtacagcaagtcaccaagattttgcacagttgcccctctgttcttcgagaggacctgggtcaactggaatacaagtttcagtatgcatacttcaggatgggaattaagcatccagacattgtaaagagtgagtacttgcagtattcactaaccaagattaagcagagacacatttacctggagcgcctgggacggtaccaaacccctgataagaaggggcagacacagatccctaacccattgctcaaggacattctcagagtttcagaagctgagtttttggccaggacagcctgtacttctgttgaggagtttcaagtttttaagaagctcctggctcgggaggaggaggagtctgagagcagcacatctgatgacaaaagggcaagtctggatgaggatgaggatgacgatgatgaggaggacaatgatgaggatgacaatgatgaggatgacgatgatgaggacgacgacgaggcggaggacaatgatgaggatgaggacgacgacgaggaggaatagctgtgatggaaggactagagcgaaagggcccagagatatcaaggaagcttttcattctcttaaagcttttgggtcctttacttgaatcttctcaagttattttttattctaaaactggtctcttgatgaaaaaaattataagtcacctgagaggcagacagatcaaaccaaacaggaaacaggaaatgcatgtttgatctgttgtcacgtgtctgtggggagggccctgtcccatcctgaataagatacttatgttgagctattcacatcaaggggactcaatatatcaacaattggttttatttttttctcttttgaatatgttggtgataattccgtgacagttggaagatggggttcattcttccggttcaggaatcactatgtatttccttcttgtgataaaaataaaattacgagaaggcaatgtgaggttttagtacatcatagcactttattttatgaaaacatgtagcagattttccacaaaaatgcttatttttaatccaaaagtatattgcttcataatggtattcagtgcacagcagagtaaaagaagttaattcatgatgtactggttaattttgcatggcttcttaaggccagcaaaatgctggcagttttctttatctttgtgaagaacaggcccttcctgtttggggaagttggcttttatgtcagctcttggccagtggtcacttccaagcctggtgtctccggccctgtagtctgtagtgccagactgtgctggcctggagagtgctggggcaggtggaggccagggaatggtcccatacagttatctcccctgccctggttacagacagcttcgagaaccagaggagaagagcatagggtcatggagcaggtgggctgaagccagggccacagggagcaatccgtgaccccccaaggtgggtgtgggggggggggggggcntgtcaccttagggaactcaatgagtccgaagaacaatttgaaatgttgggaaaagagaagaggaatttgatgtcagccggggtgatccctgagntagaggcctgtctctgatggcatgagctctaagagggtcctggaggattggtacatcctagaacattccagttagccctcttttaggggaaactggcataggattgatgcagaaggcatttttgatgatgggaccaaaattcaagtctccttggtagcattctaggatcaactagatcctaggatctggtagattgtaggattctagtgggtagaggccaggggtgctgtgaaacatcctgcagtgcacaggatggtcccacaagagaggatgatccggcccagaatgtcagtgctgagcctgagaaactcatctaaggcctggtccacaacagtaatgtgactgttcactcgtgacaacttcagatggtaaatggacttaggatcgtattattttatttaaaagaaaaataaggagctggtttttcagccgggttcctttcccctatgcactggaatacccctggtaggtgtgagctgcatgcaattgtggggattcagcactgaaatctaggtgcttttgttttctccagcagcctcgtcttacagcgtgactgcaaagaaaaagacttttgttttgcaaaagaaaagcagctcggtgactccgtccacatcgccacagttgagtcagatggcagtggcagtcctttgccagtggaaggagttcctgctaaggggaggtgcaggaggtgagctgatacctgagtggggcccttgcctgttgggttctctactggaggacagtgggcacagcaaagattcccttacttgtacctggcagcccacacgcaatggggaaaagggagagtttgtctttattgccttgcttggccataggcaaaactgtttggaaatgagacatttcactgtgccagtgttttcattttctcttccattgtggcatcccggtcactgccaccctccctagaacctaggctgttgttgtacccagtcggaggactaagtagaatcctcagtctgcacttngttagatgatcagtccatcccggtttcattagcagatgggtaattcagcaactcaggattgcttctttcattttgatacagaaatctttatgctcctgacagttttctgattctattattactaatttccttgggtggactttgagtattttcaaggaagccatttgagtttttaaaagaagccacatgggaaaagctgtggtggcctctttggaatgtttcaagaacgaactgtaattcctgagcaccaggaagtctttttacttgatatttaatgtggaaaacatcccaatgggcaagtcctgtgacagcacttgggactcaggagccagttcttgttgacacaaggcttctaagctaacactggagcatattagcatttgctgtgtggcaccaagcttgggactcaggagccagttcttgttgacacaaggcttctaagctaacactggagcatattagcatttgctgtgtggcaccaagcttgggactcaggagccagttcttgttgacacaaggcttctaagctaacactggagcatattagcatttgctgtgtggctgaggggcttgaggtcctagtagggagtagaaagtttcctagtaggattcacctacttttccagtgatatcactcgatcttagcatctgctagtaatgctgtagcttacatggacaaacagtgacaggtcccagggcggcaggaagtccgcagtacgcgtttgtgaacgtggtttctctcagttcacccagtgacccttcgctgagctcgagacccttcattgagctccaccttctgctctcaagtgggtctggagcctggggaacagctcgggagtacaggtgaaacttctcgaattgcctgttccttctttctgaaaatgacaaattgcagaatacacagacacatgcacatgaaattttaataaagataaaaagcctaaaatatactctaactcttcaaaaaacatttttatgaaagaggaaaggaaggaggccctctttgtggctggaatgctggctctgagcagagtcagggtgacgcggcagggcgctggctttccagctgggtcagcggtcgtgaggctcaacacgagaggaggtggggtggctgctttggttgtaacattagcagggggaagacagctgcttagaagcatggtgggaagcagatgtggtgaagtgccgtactgttctgcttacaaagatggggatgtctaagatcgtgtttactacctgatagcctaaaacagtatcacttgagtcatggactaaaaggaaccttaaacattgtccagcccagcccaggtgtccatctctgttgcactgagacttgtaaggcgtccttgctgcttcgtggcagtgtgccttagctttccaagcaggggtctgaatagctttttccatgaaaattcaggggtctttctttgatacccttgtgacttgtcattcaggggatggcttccactgtttaaggctgaagcctaggtgatctcatagaacagggttcaccaaataaggcccatgggccaatttggccaccacctgttattgtaaataagtttttattggaacatagccgcagccattcaatgacatgcctgtggctgtgtctgcgctactgtagccacagggacctctggtctgcaaagctgaaaacgtttaccgtctgacccttgatagagaaaggctgccagtcgcgccgttgtctaaaaaagtctgaactccaccttagtgttaactagtccataggatggctcgtcgacctgcacgagcgtcataaacacgctggaggaccagagcaggggcggctgtgtctgcaacccggctttccttctgacatcacctggtctctgccc

SEQ ID NO: 349301 - DNA, 4586 bp, Homo sapiens
  misc_feature (1647)..(1647): n is a, c, g, or t
  misc_feature (1741)..(1741): n is a, c, g, or t
  misc_feature (2727)..(2727): n is a, c, g, or t
gtgaaggacgggggaggaccgctgcttccggcgccgtaactgctgccatcttctccgcgctatggctgcgttcggccgtcagggaaattaaagagggtgctttactgttgccctgaaattttcaccatgcgccagcaggacattaacgacactgtcaggcttctcaaggagaagtgccttttcacggtacagcaagtcaccaagattttgcacagttgcccctctgttcttcgagaggacctgggtcaactggaatacaagtttcagtatgcatacttcaggatgggaattaagcatccagacattgtaaagagtgagtacttgcagtattcactaaccaagattaagcagagacacatttacctggagcgcctgggacggtaccaaacccctgataagaaggggcagacacagatccctaacccattgctcaaggacattctcagagtttcagaagctgagtttttggccaggacagcctgtacttctgttgaggagtttcaagtttttaagaagctcctggctcgggaggaggaggagtctgagagcagcacatctgatgacaaaagggcaagtctggatgaggatgaggatgacgatgatgaggaggacaatgatgaggatgacaatgatgaggatgacgatgatgaggacgacgacgaggcggaggacaatgatgaggatgaggacgacgacgaggaggaatagctgtgatggaaggactagagcgaaagggcccagagatatcaaggaagcttttcattctcttaaagcttttgggtcctttacttgaatcttctcaagttattttttattctaaaactggtctcttgatgaaaaaaattataagtcacctgagaggcagacagatcaaaccaaacaggaaacaggaaatgcatgtttgatctgttgtcacgtgtctgtggggagggccctgtcccatcctgaataagatacttatgttgagctattcacatcaaggggactcaatatatcaacaattggttttatttttttctcttttgaatatgttggtgataattccgtgacagttggaagatggggttcattcttccggttcaggaatcactatgtatttccttcttgtgataaaaataaaattacgagaaggcaatgtgaggttttagtacatcatagcactttattttatgaaaacatgtagcagattttccacaaaaatgcttatttttaatccaaaagtatattgcttcataatggtattcagtgcacagcagagtaaaagaagttaattcatgatgtactggttaattttgcatggcttcttaaggccagcaaaatgctggcagttttctttatctttgtgaagaacaggcccttcctgtttggggaagttggcttttatgtcagctcttggccagtggtcacttccaagcctggtgtctccggccctgtagtctgtagtgccagactgtgctggcctggagagtgctggggcaggtggaggccagggaatggtcccatacagttatctcccctgccctggttacagacagcttcgagaaccagaggagaagagcatagggtcatggagcaggtgggctgaagccagggccacagggagcaatccgtgaccccccaaggtgggtgtgggggggggggggggcntgtcaccttagggaactcaatgagtccgaagaacaatttgaaatgttgggaaaagagaagaggaatttgatgtcagccggggtgatccctgagntagaggcctgtctctgatggcatgagctctaagagggtcctggaggattggtacatcctagaacattccagttagccctcttttaggggaaactggcataggattgatgcagaaggcatttttgatgatgggaccaaaattcaagtctccttggtagcattctaggatcaactagatcctaggatctggtagattgtaggattctagtgggtagaggccaggggtgctgtgaaacatcctgcagtgcacaggatggtcccacaagagaggatgatccggcccagaatgtcagtgctgagcctgagaaactcatctaaggcctggtccacaacagtaatgtgactgttcactcgtgacaacttcagatggtaaatggacttaggatcgtattattttatttaaaagaaaaataaggagctggtttttcagccgggttcctttcccctatgcactggaatacccctggtaggtgtgagctgcatgcaattgtggggattcagcactgaaatctaggtgcttttgttttctccagcagcctcgtcttacagcgtgactgcaaagaaaaagacttttgttttgcaaaagaaaagcagctcggtgactccgtccacatcgccacagttgagtcagatggcagtggcagtcctttgccagtggaaggagttcctgctaaggggaggtgcaggaggtgagctgatacctgagtggggcccttgcctgttgggttctctactggaggacagtgggcacagcaaagattcccttacttgtacctggcagcccacacgcaatggggaaaagggagagtttgtctttattgccttgcttggccataggcaaaactgtttggaaatgagacatttcactgtgccagtgttttcattttctcttccattgtggcatcccggtcactgccaccctccctagaacctaggctgttgttgtacccagtcggaggactaagtagaatcctcagtctgcacttngttagatgatcagtccatcccggtttcattagcagatgggtaattcagcaactcaggattgcttctttcattttgatacagaaatctttatgctcctgacagttttctgattctattattactaatttccttgggtggactttgagtattttcaaggaagccatttgagtttttaaaagaagccacatgggaaaagctgtggtggcctctttggaatgtttcaagaacgaactgtaattcctgagcaccaggaagtctttttacttgatatttaatgtggaaaacatcccaatgggcaagtcctgtgacagcacttgggactcaggagccagttcttgttgacacaaggcttctaagctaacactggagcatattagcatttgctgtgtggcaccaagcttgggactcaggagccagttcttgttgacacaaggcttctaagctaacactggagcatattagcatttgctgtgtggcaccaagcttgggactcaggagccagttcttgttgacacaaggcttctaagctaacactggagcatattagcatttgctgtgtggctgaggggcttgaggtcctagtagggagtagaaagtttcctagtaggattcacctacttttccagtgatatcactcgatcttagcatctgctagtaatgctgtagcttacatggacaaacagtgacaggtcccagggcggcaggaagtccgcagtacgcgtttgtgaacgtggtttctctcagttcacccagtgacccttcgctgagctcgagacccttcattgagctccaccttctgctctcaagtgggtctggagcctggggaacagctcgggagtacaggtgaaacttctcgaattgcctgttccttctttctgaaaatgacaaattgcagaatacacagacacatgcacatgaaattttaataaagataaaaagcctaaaatatactctaactcttcaaaaaacatttttatgaaagaggaaaggaaggaggccctctttgtggctggaatgctggctctgagcagagtcagggtgacgcggcagggcgctggctttccagctgggtcagcggtcgtgaggctcaacacgagaggaggtggggtggctgctttggttgtaacattagcagggggaagacagctgcttagaagcatggtgggaagcagatgtggtgaagtgccgtactgttctgcttacaaagatggggatgtctaagatcgtgtttactacctgatagcctaaaacagtatcacttgagtcatggactaaaaggaaccttaaacattgtccagcccagcccaggtgtccatctctgttgcactgagacttgtaaggcgtccttgctgcttcgtggcagtgtgccttagctttccaagcaggggtctgaatagctttttccatgaaaattcaggggtctttctttgatacccttgtgacttgtcattcaggggatggcttccactgtttaaggctgaagcctaggtgatctcatagaacagggttcaccaaataaggcccatgggccaatttggccaccacctgttattgtaaataagtttttattggaacatagccgcagccattcaatgacatgcctgtggctgtgtctgcgctactgtagccacagggacctctggtctgcaaagctgaaaacgtttaccgtctgacccttgatagagaaaggctgccagtcgcgccgttgtctaaaaaagtctgaactccaccttagtgttaactagtccataggatggctcgtcgacctgcacgagcgtcataaacacgctggaggaccagagcaggggcggctgtgtctgcaacccggctttccttctgacatcacctggtctctgccc

SEQ ID NO: 349302 - DNA, 3199 bp, Homo sapiens
gtgaaggacgggggaggaccgctgcttccggcgccgtaactgctgccatcttctccgcgctatggctgcgttcggccgtcaggtccttgattggcaccgcctgatccccctcacctgggcctgtatggctaggcagactcctcatcttggagaacagagaaggacgacagcttctttgttgcgcaaactgactacagcctccaatggaggggtcattgaggagttatcttgtgttagatccaataactatgtgcaggaaccagagtgcaggaggaatcttgttcagtgcctccttgagaagcaggggactcctgtggtacaagggtccttggagctagagagggtcatgagttccctcctggacatgggtttcagcaatgcccatattaatgaattgctcagtgtacggcgaggtgccagtcttcaacagttgctggacatcatttcagaatttattctcttgggtctgaatccagagcctgtgtgtgtggtcttgaagaaaagtccccagttattgaaactgcctattatgcaaatgaggaagcgctccagttacctgcaaaagcttgggcttggagaagggaaattaaagagggtgctttactgttgccctgaaattttcaccatgcgccagcaggacattaacgacactgtcaggcttctcaaggagaagtgccttttcacggtacagcaagtcaccaagattttgcacagttgcccctctgttcttcgagaggacctgggtcaactggaatacaagtttcagcagcctcgtcttacagcgtgactgcaaagaaaaagacttttgttttgcaaaagaaaagcagctcggtgactccgtccacatcgccacagttgagtcagatggcagtggcagtcctttgccagtggaaggagttcctgctaaggggaggtgcaggaggactaatttattattgtgcaactgccagtcctgcgcattccagctacgctaagcgccctgcccaggcacgtaacaaaacatagacctgttttgaagtggcttgttacccaagggtgcctcactcatctgcgccaccaggaagatgaactgtgagggctcctataaggggcaggaagagcaaagctgtcctaggccaaccagagattcatctttcatgcagtgacatgttgataaaaaatgatggtcagtatgaaactggtaacaggttgtagatggctttctatggtatatcccagtctcttgcaaacgattgtgaagaatgccagtgttgtttaagattcggcagtttgtgtggggaggtgggggcaggatggggtttggttgccaaaagagtttgggaaatgctggcttaaacaaaggcgagaggaagttcctttcacgtcaggatttatgaatgcctatgagcccagtgtcagtgacgactttctagcggcggtcttcaacactttctaaatattaagcgatcaaggcccctgccccacttttagttccaacagaatgccgttcacaagatctgggaggcactctctcagccctctcctggagcccccggaatttctcagcagcccaggccctcccgctgcccgtggcccctcctcccaggtgccaggtggtcttccagcctctccaagggcccacccccctgcctcttcctcccactgcagctgatctaggggtttcttggccacatttcccttgagagagagtgggatttgccctatccacagagagcctcatttccacctgaaggtgtatttgtcagtggctagaccaggttcatgtctgtttccccttggggacttctgaaccttcctgcccgggagtctgtaacacagcagcacaggaccgcgcttcctttagcagtgctgagtaagcaggcagcggcactctgagatcccggggctgggcagtcgccccccacttcccagcagctctgtggtagtggggcgggagcagcagggacgtaccttaagatttctccagtgtctgactcttactttgtttcctgaaataattagagaaaagtcgtttaatgaaaaagagactgtgtaccttgaattctacagctacctcagtccaggctgcctgctgagatcctgtctttagctcacatacattccacggtgggggacaccattagtccagacaccgctgtggagattagcattttagtttgtgtgcgcccgcctggcttgaggcagtagtttaggaatgacaaggctagaaacctggctggctgtgagtcagagagagagaggatggacgtgggagaaagcaagcaaaagctaccctagggaagagccggtgacgtgcacaggccgagcagcacggctggtgagctgcaggctgcggccttgcccggacacttggtaatgccaaacaagtacgtgtggctactcattggtctatgaggacgatgacaggcttcgactctgtggtttctaaagcatataatattctcacgtacttctttcagcaaacgccaaacagtagtaattcttgtaactaccttgaaccctttgtggaaagaacctgggtgtgagtgaataaaaagtaaagagcgacgcgctatatcggccattaaatactcggggctgtccgtaacaccctgtgcttcccaattgtagcaccatgttctgtgtgaatatgcataaccagagtgaccccccccagcacccagcatgcccggctgtgcccctctgggtatgctcacatgcacatatatggacatacagtttcgtagcagaacgtggctgcccaggggctgcctatctgggcgagtagaccgcctggctcagcccacaggcctgcagcatcccatagcaccccgcccttgccccatcaccctgtgggctacatgcaggacacggcatgggcctgctccccagaggcacctgtttggggtcttcttgaggcttgtgctttcacagctctctttgaagcagatgtcttggtgaactcggtagactcttttatacctgttgtcacaagaaagctttgtaaaaccagacagtgaagcaaaatgttgccaactgcttaacctaggctatgtgaacccacagtaaacctgaaggtgtttgagggaaaaactgctattttctgaatgaaacgtgacctcctattgatgtattaaaatgtctaacataaaggtcatgtgatttgtaataaatttattgtggtacagtaatatgcataaaataaacccattttaatgtg

SEQ ID NO: 349303 - DNA, 2535 bp, Homo sapiens
tgctgggtggctgctctcaggactcctctttgtcgccagggctccaccacctgcattctcaggggaagatccacagagacatcaagggagccaaccttctcctcactctccagggagatgtcaaactggctgactttggggtgtcaggcgagctgacagcgtctgtggccaagaggaggtctttcattgggactccctactggatggctcccgaggtggctgctgtggagcgcaaaggtggctacaatgagctatgtgacgtctgggccctgggcatcactgccattgagctgggcgagctgcagccccctctgttccacctgcaccccatgagggccctgatgctcatgtcgaagagcagcttccagccgcccaaactgagagataagactcgctggacccagaatttccaccactttctcaaactggccctgaccaagaatcctaagaagaggccgacagcagagaagctcctgcagcacccgttcacgactcagcagctccctcgggccctcctcacacagctgctggacaaagccagtgaccctcatctggggaccccctcccctgaggactgtgagctggagacctatgacatgtttccagacaccattcactcccgggggcagcacggcccagccgagaggaccccctcggagatccagtttcaccaggtgaaatttggcgccccacgcaggaaggaaactgacccactgaatgagccgtgggaggaagagtggacactactgggaaaggaagagttgagtgggagcctgctgcagtcggtccaggaggccctggaggaaaggagtctgactattcggtcagcctcagaattccaggagctggactccccagacgataccatgggaaccatcaagcgggccccgttcctagggccactccccactgaccctccagcagaggagcctctgtccagtcccccaggaaccctgcccccacctccttcaggccccaacagctccccactgctgcccacggcctgggccaccatgaagcagcgggaggatcctgagaggtcatcctgccacgggctccccccaactcccaaggtgcatatgggcgcctgcttctccaaggtcttcaatggctgccccctgcggatccacgctgctgtcacctggattcaccctgttactcgggaccagttcctggtggtaggggccgaggaaggcatctacacactcaacctgcatgaactgcatgaggatacgctggagaagctgatttcacatcgctgctcctggctctactgcgtgaacaacgtgctgctgtcactctcagggaaatccacgcacatctgggcccatgacctcccaggcctgtttgagcagcggaggctacagcaacaggttcccctctccatccccaccaaccgcctcacccagcgcatcatccccaggcgctttgctctgtccaccaagattcctgacaccaaaggctgcttgcagtgtcgtgtggtgcggaacccctacacgggtgccaccttcctgctggccgccctgcccaccagcctgctcctgctgcagtggtatgagccgctgcagaagtttctgctgctgaagaacttctccagccctctgcccagcccagctgggatgctggagccgctggtgctggatgggaaggagctgccgcaggtgtgtgttggggccgaggggcctgaggggcccggctgccgcgtcctgttccatgtcctgcccctggaggctggcctgacgcccgacatcctcatcccacctgaggggatcccaggctcggcccagcaggtgatccaggtggacagggacacaatcctagtcagctttgaacgctgtgtgaggattgtcaacatgcagggcgagcccacggccacactggcacctgagctgacctttgatttccccatcgagactgtggtgtgcctgcaggacagtgtgctggccttctggagccatgggatgcaaggccgaagcctggataccaatgaggtgacccaggagatcacagatgaaacaaggatcttccgagtgcttggggcccacagagacatcatcctggagagcattcccactgacaacccagaggcgcacagcaacctctacatcctcacgggccaccagagcacctactaagagcagcgggcctgtccaggggctccccgccccaccccacgccttagctgcaggcccttttgggcaaaggggcccatcctagaccagaggagcccaggccctggccctgctggggctgaaggtcagaagtaatcctgagaaatgtttcaggcctggggagggaggggagcccccgacgcctctgcaataactggaccagggggagctgctgtcactcccccatccccgaggcagcccagtccctagtgcccaaggcagggaccctgggcctgggccatccattccattttgttccacatttcctttctactctttctgccaagagcctgcccctgcatttgtcctgggaaacacggtatttaagagagaactatattggtattaaagctggtttgtttta

SEQ ID NO: 349304 - DNA, 2838 bp, Homo sapiens
gctccggcccgccccgctgcccggcccgcgcgccgggccatggcgcagctgcgggatgtgtcgctgcaggacccgcgggaccgcttcgagctgctgcagcgcgtgggggccgggacctatggcgacgtctacaaggtgcgacgggacgggcgggagagccgggaggagggtgccagccccgcaccccgcggcaggatctagcccccggccccgccccccatcccgcttcaccctccgcccctgcaggcccgcgacacggtcacgtccgaactggccgccgtgaagatagtcaagctagacccaggggacgacatcagctccctccagcaggaaatcaccatcctgcgtgagtgccgccaccccaatgtggtggcctacattggcagctacctcaggaatgaccgcttgtggatctgcatggagttctgcggagggggctccctgcaggagatttaccatgccactgggcccctggaggagcggcagattgcctacgtctgccgagagcgactgaaggggctccaccacctgcattctcaggggaagatccacagagacatcaagctgactttggggtgtcaggcgagctgacagcgtctgtggccaagaggaggtctttcattgggactccctactgggccctgatgctcatgtcgaagagcagcttccagccgcccaaactgagagataagactcgctggacccagaatttccaccactttctcaaactggccctgaccaagaatcctaagaagaggccgacagcagagaagctcctgcagcacccgttcacgactcagcagctccctcgggccctcctcacacagctgctggacaaagccagtgaccctcatctggggaccccctcccctgaggactgtgagctggagacctatgacatgtttccagacaccattcactcccgggggcagcacggcccagccgagaggaccccctcggagatccagtttcaccaggtgaaatttggcgccccacgcaggaaggaaactgacccactgaatgagccgtgggaggaagagtggacactactgggaaaggaagagttgagtgggagcctgctgcagtcggtccaggaggccctggaggaaaggagtctgactattcggtcagcctcagaattccaggagctggactccccagacgataccatgggaaccatcaagcgggccccgttcctagggccactccccactgaccctccagcagaggagcctctgtccagtcccccaggaaccctgcccccacctccttcaggccccaacagctccccactgctgcccacggcctgggccaccatgaagcagcgggaggatcctgagaggtcatcctgccacgggctccccccaactcccaaggtgcatatgggcgcctgcttctccaaggtcttcaatggctgccccctgcggatccacgctgctgtcacctggattcaccctgttactcgggaccagttcctggtggtaggggccgaggaaggcatctacacactcaacctgcatgaactgcatgaggatacgctggagaagctgatttcacatcgctgctcctggctctactgcgtgaacaacgtgctgctgtcactctcagggaaatccacgcacatctgggcccatgacctcccaggcctgtttgagcagcggaggctacagcaacaggttcccctctccatccccaccaaccgcctcacccagcgcatcatccccaggcgctttgctctgtccaccaagattcctgacaccaaaggctgcttgcagtgtcgtgtggtgcggaacccctacacgggtgccaccttcctgctggccgccctgcccaccagcctgctcctgctgcagtggtatgagccgctgcagaagtttctgctgctgaagaacttctccagccctctgcccagcccagctgggatgctggagccgctggtgctggatgggaaggagctgccgcaggtgtgtgttggggccgaggggcctgaggggcccggctgccgcgtcctgttccatgtcctgcccctggaggctggcctgacgcccgacatcctcatcccacctgaggggatcccaggctcggcccagcaggtgatccaggtggacagggacacaatcctagtcagctttgaacgctgtgtgaggattgtcaacatgcagggcgagcccacggccacactggcacctgagctgacctttgatttccccatcgagactgtggtgtgcctgcaggacagtgtgctggccttctggagccatgggatgcaaggccgaagcctggataccaatgaggtgacccaggagatcacagatgaaacaaggatcttccgagtgcttggggcccacagagacatcatcctggagagcattcccactgacaacccagaggcgcacagcaacctctacatcctcacgggccaccagagcacctactaagagcagcgggcctgtccaggggctccccgccccaccccacgccttagctgcaggcccttttgggcaaaggggcccatcctagaccagaggagcccaggccctggccctgctggggctgaaggtcagaagtaatcctgagaaatgtttcaggcctggggagggaggggagcccccgacgcctctgcaataactggaccagggggagctgctgtcactcccccatccccgaggcagcccagtccctagtgcccaaggcagggaccctgggcctgggccatccattccattttgttccacatttcctttctactctttctgccaagagcctgcccctgcatttgtcctgggaaacacggtatttaagagagaactatattggtattaaagctggtttgtttta

SEQ ID NO: 349305 - DNA, 2655 bp, Homo sapiens
tgctgggtggctgctctcaggactcctctttgtcgccagggctccaccacctgcattctcaggggaagatccacagagacatcaagggagccaaccttctcctcactctccagggagatgtcaaactggctgactttggggtgtcaggcgagctgacagcgtctgtggccaagaggaggtctttcattgggactccctactggatggctcccgaggtggctgctgtggagcgcaaaggtggctacaatgagctatgtgacgtctgggccctgggcatcactgccattgagctgggcgagctgcagccccctctgttccacctgcaccccatgagggccctgatgctcatgtcgaagagcagcttccagccgcccaaactgagagataagactcgctggacccagaatttccaccactttctcaaactggccctgaccaagaatcctaagaagaggccgacagcagagaagctcctgcagcacccgttcacgactcagcagctccctcgggccctcctcacacagctgctggacaaagccagtgaccctcatctggggaccccctcccctgaggactgtgagctggagacctatgacatgtttccagacaccattcactcccgggggcagcacggcccagccgagaggaccccctcggagatccagtttcaccaggtgaaatttggcgccccacgcaggaaggaaactgacccactgaatgagccgtgggaggaagagtggacactactgggaaaggaagagttgagtgggagcctgctgcagtcggtccaggaggccctggaggaaaggagtctgactattcggtcagcctcagaattccaggtgccacacagagggaggctggagctgggatccaggccactgcagagggtacgattggagtgggatgtggttacagggcaacctggtaacggccgggctgggccctgcccctcctaccaggagctggactccccagacgataccatgggaaccatcaagcgggccccgttcctagggccactccccactgaccctccagcagaggagcctctgtccagtcccccaggaaccctgcccccacctccttcaggccccaacagctccccactgctgcccacggcctgggccaccatgaagcagcgggaggatcctgagaggtcatcctgccacgggctccccccaactcccaaggtgcatatgggcgcctgcttctccaaggtcttcaatggctgccccctgcggatccacgctgctgtcacctggattcaccctgttactcgggaccagttcctggtggtaggggccgaggaaggcatctacacactcaacctgcatgaactgcatgaggatacgctggagaagctgatttcacatcgctgctcctggctctactgcgtgaacaacgtgctgctgtcactctcagggaaatccacgcacatctgggcccatgacctcccaggcctgtttgagcagcggaggctacagcaacaggttcccctctccatccccaccaaccgcctcacccagcgcatcatccccaggcgctttgctctgtccaccaagattcctgacaccaaaggctgcttgcagtgtcgtgtggtgcggaacccctacacgggtgccaccttcctgctggccgccctgcccaccagcctgctcctgctgcagtggtatgagccgctgcagaagtttctgctgctgaagaacttctccagccctctgcccagcccagctgggatgctggagccgctggtgctggatgggaaggagctgccgcaggtgtgtgttggggccgaggggcctgaggggcccggctgccgcgtcctgttccatgtcctgcccctggaggctggcctgacgcccgacatcctcatcccacctgaggggatcccaggctcggcccagcaggtgatccaggtggacagggacacaatcctagtcagctttgaacgctgtgtgaggattgtcaacatgcagggcgagcccacggccacactggcacctgagctgacctttgatttccccatcgagactgtggtgtgcctgcaggacagtgtgctggccttctggagccatgggatgcaaggccgaagcctggataccaatgaggtgacccaggagatcacagatgaaacaaggatcttccgagtgcttggggcccacagagacatcatcctggagagcattcccactgacaacccagaggcgcacagcaacctctacatcctcacgggccaccagagcacctactaagagcagcgggcctgtccaggggctccccgccccaccccacgccttagctgcaggcccttttgggcaaaggggcccatcctagaccagaggagcccaggccctggccctgctggggctgaaggtcagaagtaatcctgagaaatgtttcaggcctggggagggaggggagcccccgacgcctctgcaataactggaccagggggagctgctgtcactcccccatccccgaggcagcccagtccctagtgcccaaggcagggaccctgggcctgggccatccattccattttgttccacatttcctttctactctttctgccaagagcctgcccctgcatttgtcctgggaaacacggtatttaagagagaactatattggtattaaagctggtttgtttta

SEQ ID NO: 349306 - DNA, 2571 bp, Homo sapiens
tgctgggtggctgctctcaggactcctctttgtcgccagggctccaccacctgcattctcaggggaagatccacagagacatcaagggagccaaccttctcctcactctccagggagatgtcaaactggctgactttggggtgtcaggcgagctgacagcgtctgtggccaagaggaggtctttcattgggactccctactggatggctcccgaggtggctgctgtggagcgcaaaggtggctacaatgagctatgtgacgtctgggccctgggcatcactgccattgagctgggcgagctgcagccccctctgttccacctgcaccccatgagggccctgatgctcatgtcgaagagcagcttccagccgcccaaactgagagataagactcgctggacccagaatttccaccactttctcaaactggccctgaccaagaatcctaagaagaggccgacagcagagaagctcctgcagcacccgttcacgactcagcagctccctcgggccctcctcacacagctgctggacaaagccagtgaccctcatctggggaccccctcccctgaggactgtgagctggagacctatgacatgtttccagacaccattcactcccgggggcagcacggcccagccgagaggaccccctcggagatccagtttcaccaggtgaaatttggcgccccacgcaggaaggaaactgacccactgaatgagccgtgggaggaagagtggacactactgggaaaggaagagttgagtgggagcctgctgcagtcggtccaggaggccctggaggaaaggagtctgactattcggtcagcctcagaattccaggagctggactccccagacgataccatgggaaccatcaagcgggccccgttcctagggccactccccactgaccctccagcagaggagcctctgtccagtcccccaggaaccctgcccccacctccttcaggccccaacagctccccactgctgcccacggcctgggccaccatgaagcagcgggaggatcctgagaggtcatcctgccacgggctccccccaactcccaaggtgcatatgggcgcctgcttctccaaggtcttcaatggctgccccctgcggatccacgctgctgtcacctggattcaccctgttactcgggaccagttcctggtggtaggggccgaggaaggcatctacacactcaacctgcatgaactgcatgaggatacgctggagaagctgatttcacatcgctgctcctggctctactgcgtgaacaacgtgctgctgtcactctcagggaaatccacgcacatctgggcccatgacctcccaggcctgtttgagcagcggaggctacagcaacaggttcccctctccatccccaccaaccgcctcacccagcgcatcatccccaggcgctttgctctgtccaccaagattcctgacaccaaaggctgcttgcagtgtcgtgtggtgcggaacccctacacgggtgccaccttcctgctggccgccctgcccaccagcctgctcctgctgcagtggtatgagccgctgcagaagtttctgctgctgaagaacttctccagccctctgcccagcccagctgggatgctggagccgctggtgctggatgggaaggagctgccgcaggtgtgtgttggggccgaggggcctgaggggcccggctgccgcgtcctgttccatgtcctgcccctggaggctggcctgacgcccgacatcctcatcccacctgaggggatcccaggctcggcccagcaggtgatccaggtggacagggacacaatcctagtcagctttgaacgctgtgtgaggattgtcaacatgcagggcgagcccacggccacactggcacctgagctgacctttgatttccccatcgagactgtggtgtgcctgcaggacagtgtgctggccttctggagccatgggatgcaaggccgaagcctggataccaatgaggtgacccaggagatcacagatgaaacaaggatcttccgagtgcttggggcccacagagacatcatcctggagagcattcccactgacaacccagaggcgcacagcaacctctacatcctcacgggccaccagagcacctactaagagcagcgggcctgtccaggggctccccgccccaccccacgccttagctgcaggcccttttgggcaaaggggcccatcctagaccagaggagcccaggccctggccctgctggggctgaaggtcagaagtaatcctgagaaatgtttcaggcctggggagggaggggagcccccgacgcctctgcaataactggaccagggggagctgctgtcactcccccatccccgaggcagcccagtccctagtgcccaaggcagggaccctgggcctgggccatccattccattttgttccacatttcctttctactctttctgccaagagcctgcccctgcatttgtcctgggaaacacggtatttaagagagaactatattggtattaaagctggtttgttttagtcctctggtccctctgggtagggggagtgaaccca

SEQ ID NO: 349307 - DNA, 2344 bp, Homo sapiens
tgctgggtggctgctctcaggactcctctttgtcgccagggctccaccacctgcattctcaggggaagatccacagagacatcaagggagccaaccttctcctcactctccagggagatgtcaaactggctgactttggggtgtcaggcgagctgacagcgtctgtggccaagaggaggtctttcattgggactccctactggatggctcccgaggtggctgctgtggagcgcaaaggtggctacaatgagctatgtgacgtctgggccctgggcatcactgccattgagctgggcgagctgcagccccctctgttccacctgcaccccatgagggccctgatgctcatgtcgaagagcagcttccagccgcccaaactgagagataagactcgctggacccagaatttccaccactttctcaaactggccctgaccaagaatcctaagaagaggccgacagcagagaagctcctgcagcacccgttcacgactcagcagctccctcgggccctcctcacacagctgctggacaaagccagtgaccctcatctggggaccccctcccctgaggactgtgagctggagacctatgacatgtttccagacaccattcactcccgggggcagcacggcccagccgagaggaccccctcggagatccagtttcaccaggtgaaatttggcgccccacgcaggaaggaaactgacccactgaatgagccgtgggaggaagagtggacactactgggaaaggaagagttgagtgggagcctgctgcagtcggtccaggaggccctggaggaaaggagtctgactattcggtcagcctcagaattccaggagctggactccccagacgataccatgggaaccatcaagcgggccccgttcctagggccactccccactgaccctccagcagaggagcctctgtccagtcccccaggaaccctgcccccacctccttcaggccccaacagctccccactgctgcccacggcctgggccaccatgaagcagcgggaggatcctgagaggtcatcctgccacgggctccccccaactcccaaggtgcatatgggcgcctgcttctccaaggtcttcaatggctgccccctgcggatccacgctgctgtcacctggattcaccctgttactcgggaccagttcctggtggtaggggccgaggaaggcatctacacactcaacctgcatgaactgcatgaggatacgctggagaagctgatttcacatcgctgctcctggctctactgcgtgaacaacgtgctgctgtcactctcagggaaatccacgcacatctgggcccatgacctcccaggcctgtttgagcagcggaggctacagcaacaggttcccctctccatccccaccaaccgcctcacccagcgcatcatccccaggcgctttgctctgtccaccaagattcctgacaccaaaggctgcttgcagtgtcgtgtggtgcggaacccctacacgggtgccaccttcctgctggccgccctgcccaccagcctgctcctgctgcagtggtatgagccgctgcagaagtttctgctgctgaagaacttctccagccctctgcccagcccagctgggatgctggagccgctggtgctggatgggaaggagctgccgcaggtgtgtgttggggccgaggggcctgaggggcccggctgccgcgtcctgttccatgtcctgcccctggaggctggcctgacgcccgacatcctcatcccacctgaggggatcccaggctcggcccagcaggtgatccaggtggacagggacacaatcctagtcagctttgaacgctgtgtgaggattgtcaacatgcagggcgagcccacggccacactggcacctgagctgacctttgatttccccatcgagactgtggtgtgcctgcaggacagtgtgctggccttctggagccatgggatgcaaggccgaagcctggataccaatgaggtgacccaggagatcacagatgaaacaaggatcttccgagtgcttggggcccacagagacatcatcctggagagcattcccactgacaacccagaggcgcacagcaacctctacatcctcacgggccaccagagcacctactaagagcagcgggcctgtccaggggctccccgccccaccccacgccttagctgcaggcccttttgggcaaaggggcccatcctgggccatccattccattttgttccacatttcctttctactctttctgccaagagcctgcccctgcatttgtcctgggaaacacggtatttaagagagaactatattggtattaaagctggtttgtttta

SEQ ID NO: 349308 - DNA, 2412 bp, Homo sapiens
tgctgggtggctgctctcaggactcctctttgtcgccagggctccaccacctgcattctcaggggaagatccacagagacatcaagggagccaaccttctcctcactctccagggagatgtcaaactggctgactttggggtgtcaggcgagctgacagcgtctgtggccaagaggaggtctttcattgggactccctactggatggctcccgaggtggctgctgtggagcgcaaaggtggctacaatgagctatgtgacgtctgggccctgggcatcactgccattgagctgggcgagctgcagccccctctgttccacctgcaccccatgagggccctgatgctcatgtcgaagagcagcttccagccgcccaaactgagagataagactcgctggacccagaatttccaccactttctcaaactggccctgaccaagaatcctaagaagaggccgacagcagagaagctcctgcagcacccgttcacgactcagcagctccctcgggccctcctcacacagctgctggacaaagccagtgaccctcatctggggaccccctcccctgaggactgtgagctggagacctatgacatgtttccagacaccattcactcccgggggcagcacggcccagccgagaggaccccctcggagatccagtttcaccaggtgaaatttggcgccccacgcaggaaggaaactgacccactgaatgagccgtgggaggaagagtggacactactgggaaaggaagagttgagtgggagcctgctgcagtcggtccaggaggccctggaggaaaggagtctgactattcggtcagcctcagaattccaggagctggactccccagacgataccatgggaaccatcaagcgggccccgttcctagggccactccccactgaccctccagcagaggagcctctgtccagtcccccaggaaccctgcccccacctccttcaggccccaacagctccccactgctgcccacggcctgggccaccatgaagcagcgggaggatcctgagaggtcatcctgccacgggctccccccaactcccaaggtgcatatgggcgcctgcttctccaaggtcttcaatggctgccccctgcggatccacgctgctgtcacctggattcaccctgttactcgggaccagttcctggtggtaggggccgaggaaggcatctacacactcaacctgcatgaactgcatgaggatacgctggagaagctgatttcacatcgctgctcctggctctactgcgtgaacaacgtgctgctgtcactctcagggaaatccacgcacatctgggcccatgacctcccaggcctgtttgagcagcggaggctacagcaacaggttcccctctccatccccaccaaccgcctcacccagcgcatcatccccaggcgctttgctctgtccaccaagattcctgacaccaaaggctgcttgcagtgtcgtgtggtgcggaacccctacacgggtgccaccttcctgctggccgccctgcccaccagcctgctcctgctgcagtggtatgagccgctgcagaagtttctgctgctgaagaacttctccagccctctgcccagcccagctgggatgctggagccgctggtgctggatgggaaggagctgccgcaggtgtgtgttggggccgaggggcctgaggggcccggctgccgcgtcctgttccatgtcctgcccctggaggctggcctgacgcccgacatcctcatcccacctgaggggatcccaggctcggcccagcaggtgatccaggtggacagggacacaatcctagtcagctttgaacgctgtgtgaggattgtcaacatgcagggcgagcccacggccacactggcacctgagctgacctttgatttccccatcgagactgtggtgtgcctgcaggacagtgtgctggccttctggagccatgggatgcaaggccgaagcctggataccaatgaggtgacccaggagatcacagatgaaacaaggatcttccgagtgcttggggcccacagagacatcatcctggagagcattcccactgacaacccagaggcgcacagcaacctctacatcctcacgggccaccagagcacctactaagagcagggagcccccgacgcctctgcaataactggaccagggggagctgctgtcactcccccatccccgaggcagcccagtccctagtgcccaaggcagggaccctgggcctgggccatccattccattttgttccacatttcctttctactctttctgccaagagcctgcccctgcatttgtcctgggaaacacggtatttaagagagaactatattggtattaaagctggtttgttttagtcctctggtccctctgggtagggggagtgaaccca

SEQ ID NO: 349309 - DNA, 690 bp, Homo sapiens
gacctgagcatccctgctgccccctagaacttctccagccctctgcccagcccagctgggatgctggagccgctgtgtgcctgcaggacagtgtgctggccttctggagccatgggatgcaaggccgaagcctggataccaatgaggtgacccaggagatcacagatgaaacaaggatcttccgagtgcttggggcccacagagacatcatcctggagagcattcccactgacaacccagaggcgcacagcaacctctacatcctcacgggccaccagagcacctactaagagcagcgggcctgtccaggggctccccgccccaccccacgccttagctgcaggcccttttgggcaaaggggcccatcctagaccagaggagcccaggccctggccctgctggggctgaaggtcagaagtaatcctgagaaatgtttcaggcctggggagggaggggagcccccgacgcctctgcaataactggaccagggggagctgctgtcactcccccatccccgaggcagcccagtccctagtgcccaaggcagggaccctgggcctgggccatccattccattttgttccacatttcctttctactctttctgccaagagcctgcccctgcatttgtcctgggaaacacggtatttaagagagaactatattggtattaaagctggtttgtttta

SEQ ID NO: 349310 - DNA, 377 bp, Homo sapiens
ttcaccaggtgaaatttggcgccccacgcaggaaggaaactgacccactgaatgagccggtgagtgggcaggccttgaggggaaggtggtgcccagaggtggggcagggaggtcggatggaggccgagcagctcaaatcaagggagatttgaagctgggtggcctcgggccttgggccttggactgtccaagcaagcctgtcctacccagggacctggagggttaggggctccttcctgggccaagttcttttaggtgggtgtctggaaggtagcacagagaccatgcctttcccaaaaggaggccgtcatgtgcctgagccctcaccctaccctgctcagcctcgttttcccacctgtgtgtccccagtggtctga

SEQ ID NO: 349311 - DNA, 2902 bp, Homo sapiens
gctccggcccgccccgctgcccggcccgcgcgccgggccatggcgcagctgcgggatgtgtcgctgcaggacccgcgggaccgcttcgagctgctgcagcgcgtgggggccgggacctatggcgacgtctacaaggcccgcgacacggtcacgtccgaactggccgccgtgaagatagtcaagctagacccaggggacgacatcagctccctccagcaggaaatcaccatcctgcgtgagtgccgccaccccaatgtggtggcctacattggcagctacctcaggaatgaccgcttgtggatctgcatggagttctgcggagggggctccctgcaggagatttaccatgccactgggcccctggaggagcggcagattgcctacgtctgccgagagcgactgaaggggctccaccacctgcattctcaggggaagatccacagagacatcaagggagccaaccttctcctcactctccagggagatgtcaaactggctgactttggggtgtcaggcgagctgacagcgtctgtggccaagaggaggtctttcattgggactccctactggatggctcccgaggtggctgctgtggagcgcaaaggtggctacaatgagctatgtgacgtctgggccctgggcatcactgccattgagctgggcgagctgcagccccctctgttccacctgcaccccatgagggccctgatgctcatgtcgaagagcagcttccagccgcccaaactgagagataagactcgctggacccagaatttccaccactttctcaaactggccctgaccaagaatcctaagaagaggccgacagcagagaagctcctgcagcacccgttcacgactcagcagctccctcgggccctcctcacacagctgctggacaaagccagtgaccctcatctggggaccccctcccctgaggactgtgagctggagacctatgacatgtttccagacaccattcactcccgggggcagcacggcccagccgagaggaccccctcggagatccagtttcaccaggtgaaatttggcgccccacgcaggaaggaaactgacccactgaatgagccgtgggaggaagagtggacactactgggaaaggaagagttgagtgggagcctgctgcagtcggtccaggaggccctggaggaaaggagtctgactattcggtcagcctcagaattccaggagctggactccccagacgataccatgggaaccatcaagcgggccccgttcctagggccactccccactgaccctccagcagaggagcctctgtccagtcccccaggaaccctgcccccacctccttcaggccccaacagctccccactgctgcccacggcctgggccaccatgaagcagcgggaggatcctgagaggtcatcctgccacgggctccccccaactcccaaggtgcatatgggcgcctgcttctccaaggtcttcaatggctgccccctgcggatccacgctgctgtcacctggattcaccctgttactcgggaccagttcctggtggtaggggccgaggaaggcatctacacactcaacctgcatgaactgcatgaggatacgctggagaagctgatttcacatcgctgctcctggctctactgcgtgaacaacgtgctgctgtcactctcagggaaatccacgcacatctgggcccatgacctcccaggcctgtttgagcagcggaggctacagcaacaggttcccctctccatccccaccaaccgcctcacccagcgcatcatccccaggcgctttgctctgtccaccaagattcctgacaccaaaggctgcttgcagtgtcgtgtggtgcggaacccctacacgggtgccaccttcctgctggccgccctgcccaccagcctgctcctgctgcagtggtatgagccgctgcagaagtttctgctgctgaagaacttctccagccctctgcccagcccagctgggatgctggagccgctggtgctggatgggaaggagctgccgcaggtgtgtgttggggccgaggggcctgaggggcccggctgccgcgtcctgttccatgtcctgcccctggaggctggcctgacgcccgacatcctcatcccacctgaggggatcccaggctcggcccagcaggtgatccaggtggacagggacacaatcctagtcagctttgaacgctgtgtgaggattgtcaacatgcagggcgagcccacggccacactggcacctgagctgacctttgatttccccatcgagactgtggtgtgcctgcaggacagtgtgctggccttctggagccatgggatgcaaggccgaagcctggataccaatgaggtgacccaggagatcacagatgaaacaaggatcttccgagtgcttggggcccacagagacatcatcctggagagcattcccactgacaacccagaggcgcacagcaacctctacatcctcacgggccaccagagcacctactaagagcagcgggcctgtccaggggctccccgccccaccccacgccttagctgcaggcccttttgggcaaaggggcccatcctagaccagaggagcccaggccctggccctgctggggctgaaggtcagaagtaatcctgagaaatgtttcaggcctggggagggaggggagcccccgacgcctctgcaataactggaccagggggagctgctgtcactcccccatccccgaggcagcccagtccctagtgcccaaggcagggaccctgggcctgggccatccattccattttgttccacatttcctttctactctttctgccaagagcctgcccctgcatttgtcctgggaaacacggtatttaagagagaactatattggtattaaagctggtttgtttta

SEQ ID NO: 349312 - DNA, 3013 bp, Homo sapiens
gctccggcccgccccgctgcccggcccgcgcgccgggccatggcgcagctgcgggatgtgtcgctgcaggacccgcgggaccgcttcgagctgctgcagcgcgtgggggccgggacctatggcgacgtctacaaggtgcgacgggacgggcgggagagccgggaggagggtgccagccccgcaccccgcggcaggatctagcccccggccccgccccccatcccgcttcaccctccgcccctgcaggcccgcgacacggtcacgtccgaactggccgccgtgaagatagtcaagctagacccaggggacgacatcagctccctccagcaggaaatcaccatcctgcgtgagtgccgccaccccaatgtggtggcctacattggcagctacctcaggaatgaccgcttgtggatctgcatggagttctgcggagggggctccctgcaggagatttaccatgccactgggcccctggaggagcggcagattgcctacgtctgccgagagcgactgaaggggctccaccacctgcattctcaggggaagatccacagagacatcaagggagccaaccttctcctcactctccagggagatgtcaaactggctgactttggggtgtcaggcgagctgacagcgtctgtggccaagaggaggtctttcattgggactccctactggatggctcccgaggtggctgctgtggagcgcaaaggtggctacaatgagctatgtgacgtctgggccctgggcatcactgccattgagctgggcgagctgcagccccctctgttccacctgcaccccatgagggccctgatgctcatgtcgaagagcagcttccagccgcccaaactgagagataagactcgctggacccagaatttccaccactttctcaaactggccctgaccaagaatcctaagaagaggccgacagcagagaagctcctgcagcacccgttcacgactcagcagctccctcgggccctcctcacacagctgctggacaaagccagtgaccctcatctggggaccccctcccctgaggactgtgagctggagacctatgacatgtttccagacaccattcactcccgggggcagcacggcccagccgagaggaccccctcggagatccagtttcaccaggtgaaatttggcgccccacgcaggaaggaaactgacccactgaatgagccgtgggaggaagagtggacactactgggaaaggaagagttgagtgggagcctgctgcagtcggtccaggaggccctggaggaaaggagtctgactattcggtcagcctcagaattccaggagctggactccccagacgataccatgggaaccatcaagcgggccccgttcctagggccactccccactgaccctccagcagaggagcctctgtccagtcccccaggaaccctgcccccacctccttcaggccccaacagctccccactgctgcccacggcctgggccaccatgaagcagcgggaggatcctgagaggtcatcctgccacgggctccccccaactcccaaggtgcatatgggcgcctgcttctccaaggtcttcaatggctgccccctgcggatccacgctgctgtcacctggattcaccctgttactcgggaccagttcctggtggtaggggccgaggaaggcatctacacactcaacctgcatgaactgcatgaggatacgctggagaagctgatttcacatcgctgctcctggctctactgcgtgaacaacgtgctgctgtcactctcagggaaatccacgcacatctgggcccatgacctcccaggcctgtttgagcagcggaggctacagcaacaggttcccctctccatccccaccaaccgcctcacccagcgcatcatccccaggcgctttgctctgtccaccaagattcctgacaccaaaggctgcttgcagtgtcgtgtggtgcggaacccctacacgggtgccaccttcctgctggccgccctgcccaccagcctgctcctgctgcagtggtatgagccgctgcagaagtttctgctgctgaagaacttctccagccctctgcccagcccagctgggatgctggagccgctggtgctggatgggaaggagctgccgcaggtgtgtgttggggccgaggggcctgaggggcccggctgccgcgtcctgttccatgtcctgcccctggaggctggcctgacgcccgacatcctcatcccacctgaggggatcccaggctcggcccagcaggtgatccaggtggacagggacacaatcctagtcagctttgaacgctgtgtgaggattgtcaacatgcagggcgagcccacggccacactggcacctgagctgacctttgatttccccatcgagactgtggtgtgcctgcaggacagtgtgctggccttctggagccatgggatgcaaggccgaagcctggataccaatgaggtgacccaggagatcacagatgaaacaaggatcttccgagtgcttggggcccacagagacatcatcctggagagcattcccactgacaacccagaggcgcacagcaacctctacatcctcacgggccaccagagcacctactaagagcagcgggcctgtccaggggctccccgccccaccccacgccttagctgcaggcccttttgggcaaaggggcccatcctagaccagaggagcccaggccctggccctgctggggctgaaggtcagaagtaatcctgagaaatgtttcaggcctggggagggaggggagcccccgacgcctctgcaataactggaccagggggagctgctgtcactcccccatccccgaggcagcccagtccctagtgcccaaggcagggaccctgggcctgggccatccattccattttgttccacatttcctttctactctttctgccaagagcctgcccctgcatttgtcctgggaaacacggtatttaagagagaactatattggtattaaagctggtttgtttta

SEQ ID NO: 349313 - DNA, 2623 bp, Homo sapiens
tgctgggtggctgctctcaggactcctctttgtcgccagggctccaccacctgcattctcaggggaagatccacagagacatcaagggagccaaccttctcctcactctccagggagatgtcaaactggctgactttggggtgtcaggcgagctgacagcgtctgtggccaagaggaggtctttcattgggactccctactggatggctcccgaggtggctgctgtggagcgcaaaggtggctacaatgagctatgtgacgtctgggccctgggcatcactgccattgagctgggcgagctgcagccccctctgttccacctgcaccccatgagggccctgatgctcatgtcgaagagcagcttccagccgcccaaactgagagataagactcgctggacccagaatttccaccactttctcaaactggccctgaccaagaatcctaagaagaggccgacagcagagaagctcctgcagcacccgttcacgactcagcagctccctcgggccctcctcacacagctgctggacaaagccagtgaccctcatctggggaccccctcccctgaggactgtgagctggagacctatgacatgtttccagacaccattcactcccgggggcagcacggcccagccgagaggaccccctcggagatccagtttcaccaggtgaaatttggcgccccacgcaggaaggaaactgacccactgaatgagccgtgggaggaagagtggacactactgggaaaggaagagttgagtgggagcctgctgcagtcggtccaggaggccctggaggaaaggagtctgactattcggtcagcctcagaattccaggagctggactccccagacgataccatgggaaccatcaagcgggccccgttcctagggccactccccactgaccctccagcagaggagcctctgtccagtcccccaggaaccctgcccccacctccttcaggccccaacagctccccactgctgcccacggcctgggccaccatgaagcagcgggaggatcctgagaggtcatcctgccacgggctccccccaactcccaaggtgcatatgggcgcctgcttctccaaggtcttcaatggctgccccctgcggatccacgctgctgtcacctggattcaccctgttactcgggaccagttcctggtggtaggggccgaggaaggcatctacacactcaacctgcatgaactgcatgaggatacgctggagaagctgatttcacatcgctgctcctggctctactgcgtgaacaacgtgctgctgtcactctcagggaaatccacgcacatctgggcccatgacctcccaggcctgtttgagcagcggaggctacagcaacaggttcccctctccatccccaccaaccgcctcacccagcgcatcatccccaggcgctttgctctgtccaccaagattcctgacaccaaaggctgcttgcagtgtcgtgtgggtaagaaatgggctgggcggggtggggcggggcctggtggggggcagcgcaggcccagcccggtgcccactgcctgctcccctgccagtgcggaacccctacacgggtgccaccttcctgctggccgccctgcccaccagcctgctcctgctgcagtggtatgagccgctgcagaagtttctgctgctgaagaacttctccagccctctgcccagcccagctgggatgctggagccgctggtgctggatgggaaggagctgccgcaggtgtgtgttggggccgaggggcctgaggggcccggctgccgcgtcctgttccatgtcctgcccctggaggctggcctgacgcccgacatcctcatcccacctgaggggatcccaggctcggcccagcaggtgatccaggtggacagggacacaatcctagtcagctttgaacgctgtgtgaggattgtcaacatgcagggcgagcccacggccacactggcacctgagctgacctttgatttccccatcgagactgtggtgtgcctgcaggacagtgtgctggccttctggagccatgggatgcaaggccgaagcctggataccaatgaggtgacccaggagatcacagatgaaacaaggatcttccgagtgcttggggcccacagagacatcatcctggagagcattcccactgacaacccagaggcgcacagcaacctctacatcctcacgggccaccagagcacctactaagagcagcgggcctgtccaggggctccccgccccaccccacgccttagctgcaggcccttttgggcaaaggggcccatcctagaccagaggagcccaggccctggccctgctggggctgaaggtcagaagtaatcctgagaaatgtttcaggcctggggagggaggggagcccccgacgcctctgcaataactggaccagggggagctgctgtcactcccccatccccgaggcagcccagtccctagtgcccaaggcagggaccctgggcctgggccatccattccattttgttccacatttcctttctactctttctgccaagagcctgcccctgcatttgtcctgggaaacacggtatttaagagagaactatattggtattaaagctggtttgtttta

SEQ ID NO: 349314 - DNA, 1821 bp, Homo sapiens
  misc_feature (22)..(22): n is a, c, g, or t
ccatggaggatggaaactgacncactgaatgaccgtgggaggaagagtggacactactgggaaaggaagagttgagtgggagcctgctgcagtcggtccaggaggccctggaggaaaggagtctgactattcggtcagcctcagaattccaggagctggactccccagacgataccatgggaaccatcaagcgggccccgttcctagggccactccccactgaccctccagcagaggagcctctgtccagtcccccaggccccaacagctccccactgctgcccacggcctgggccaccatgaagcagcgggaggatcctgagaggtcatcctgccacgggctccccccaactcccaaggtgcatatgggcgcctgcttctccaaggtcttcaatggctgccccctgcggatccacgctgctgtcacctggattcaccctgttactcgggaccagttcctggtggtaggggccgaggaaggcatctacacactcaacctgcatgaactgcatgaggatacgctggagaagctgatttcacatcgctgctcctggctctactgcgtgaacaacgtgctgctgtcactctcagggaaatccacgcacatctgggcccatgacctcccaggcctgtttgagcagcggaggctacagcaacaggttcccctctccatccccaccaaccgcctcacccagcgcatcatccccaggcgctttgctctgtccaccaagattcctgacaccaaaggctgcttgcagtgtcgtgtggtgcggaacccctacacgggtgccaccttcctgctggccgccctgcccaccagcctgctcctgctgcagtggtatgagccgctgcagaagtttctgctgctgaagaacttctccagccctctgcccagcccagctgggatgctggagccgctggtgctggatgggaaggagctgccgcaggtgtgtgttggggccgaggggcctgaggggcccggctgccgcgtcctgttccatgtcctgcccctggaggctggcctgacgcccgacatcctcatcccacctgaggggatcccaggctcggcccagcaggtgatccaggtggacagggacacaatcctagtcagctttgaacgctgtgtgaggattgtcaacatgcagggcgagcccacggccacactggcacctgagctgacctttgatttccccatcgagactgtggtgtgcctgcaggacagtgtgctggccttctggagccatgggatgcaaggccgaagcctggataccaatgaggtgacccaggagatcacagatgaaacaaggatcttccgagtgcttggggcccacagagacatcatcctggagagcattcccactgacaacccagaggcgcacagcaacctctacatcctcacgggccaccagagcacctactaagagcagcgggcctgtccaggggctccccgccccaccccacgccttagctgcaggcccttttgggcaaaggggcccatcctagaccagaggagcccaggccctggccctgctggggctgaaggtcagaagtaatcctgagaaatgtttcaggcctggggagggaggggagcccccgacgcctctgcaataactggaccagggggagctgctgtcactcccccatccccgaggcagcccagtccctagtgcccaaggcagggaccctgggcctgggccatccattccattttgttccacatttcctttctactctttctgccaagagcctgcccctgcatttgtcctgggaaacacggtatttaagagagaactatattggtattaaagctggtttgtttta

SEQ ID NO: 349315 - DNA, 1318 bp, Homo sapiens
  misc_feature (22)..(22): n is a, c, g, or t
ccatggaggatggaaactgacncactgaatgaccgtgggaggaagagtggacactactgcgtgaacaacgtgctgctgtcactctcagggaaatccacgcacatctgggcccatgacctcccaggcctgtttgagcagcggaggctacagcaacaggttcccctctccatccccaccaaccgcctcacccagcgcatcatccccaggcgctttgctctgtccaccaagattcctgacaccaaaggctgcttgcagtgtcgtgtggtgcggaacccctacacgggtgccaccttcctgctggccgccctgcccaccagcctgctcctgctgcagtggtatgagccgctgcagaagtttctgctgctgaagaacttctccagccctctgcccagcccagctgggatgctggagccgctggtgctggatgggaaggagctgccgcaggtgtgtgttggggccgaggggcctgaggggcccggctgccgcgtcctgttccatgtcctgcccctggaggctggcctgacgcccgacatcctcatcccacctgaggggatcccaggctcggcccagcaggtgatccaggtggacagggacacaatcctagtcagctttgaacgctgtgtgaggattgtcaacatgcagggcgagcccacggccacactggcacctgagctgacctttgatttccccatcgagactgtggtgtgcctgcaggacagtgtgctggccttctggagccatgggatgcaaggccgaagcctggataccaatgaggtgacccaggagatcacagatgaaacaaggatcttccgagtgcttggggcccacagagacatcatcctggagagcattcccactgacaacccagaggcgcacagcaacctctacatcctcacgggccaccagagcacctactaagagcagcgggcctgtccaggggctccccgccccaccccacgccttagctgcaggcccttttgggcaaaggggcccatcctagaccagaggagcccaggccctggccctgctggggctgaaggtcagaagtaatcctgagaaatgtttcaggcctggggagggaggggagcccccgacgcctctgcaataactggaccagggggagctgctgtcactcccccatccccgaggcagcccagtccctagtgcccaaggcagggaccctgggcctgggccatccattccattttgttccacatttcctttctactctttctgccaagagcctgcccctgcatttgtcctgggaaacacggtatttaagagagaactatattggtattaaagctggtttgtttta

SEQ ID NO: 349316 - DNA, 1138 bp, Homo sapiens
tttttttttttaactctgttgcccaggctggagtgcagtggcatgatctcggctcactgcaacctccacctcctgggttcaagtgattctgctcctcagcctcccgagtagctgggattttaggcatgcaccatcacacccgaccaatttttgtatttttaataaagacggggtttcatcttgttggtcaggctggtcttgaacccctagggacctcaagtgatccacccgcctcagcctccccaaagtgctgggattatgtcaccacaccagaccagttcgccattttcttagcccagcatgcttcactactctatgttatcttcctggccattgaaagcactggagtctgctttaaagaatctatgttgatcagaaatgttcccttagattgtaaattggtacagattctttggaaggcaatttggtagcaccaccagattttttcaatgtacgcatagtctttgacacaaaaattctaagaatttatatcttaggcatccacttgttcatgtatataaggatatttgtccaatgatattcactgaagccttgttcgtgatagaggaaaacagaataacttcagtgtctatcagtagggggctgactaataatgtgttacagccctagaatagaatactaattggtatgtataaagaatgaaatgtatcaatacatactgatatgtaaatgtttctaaggtgttagtgaaataaagtgtatagaagaatgactaatgtgaaatagaatatatatgggattacatgcaacaaaaatttctgaggaggtgaataagagactattgctatatctgggaatgagttgtatagtgggatggacttctcccactttgtaacttttttttccctgtttctccaaatcatatgcctatgttattttctgtatgatacatttacatatatatgtgtgtgtgtatgtatatacacatacatatatataaacatccactatctttaatccagaaaagaagtatcattaataggttttttgaatctataaagtgccataaacagtattttatgtagtgataaacagtattttcataatcacaaaacttataattttgtttagtgtgtttaatttaaaacaagtttaattgaactctttgtaaacagtt

SEQ ID NO: 349317 - DNA, 1600 bp, Homo sapiens
acagtatcacttctttgcacccatgaatgtgatctatttaggtctttaacatcctttggtaccttacattctctgtagggttctggtaccatttttaaagaattattctttgatgtgtcttatggggtattttaaaatttcattttctaacttgtatatgaactaacttgtatatgaagtttcttttttgggggaaattttgaatgtagcaattttttaaaaaatgaagttacataaacatgttaccaaaaatagaaaacagcaaaaaggaaatcaaaatccatagacttaccaccccccccacaatgtagcctaagtagtattttaatttttgagacagggtctcactctgtcccccaggttggagtgcagtggggcaatctcagctcactgcaacttctacctcctggcctcaaacaatccacctgccttagcctcccgaagtgctgggattacaagtgtgggctaccacccccagccagtttttgttttgttctttagtacatgtctagtttttttcttttgtcattttacaaccataacttttaaaattatactggaggcgagggagatgcatcttcctagccatggcactcctggggaaaggctgacttggcttatggctgtcagtgcacagcagcgccagtatgcagaatgcctgtgcctctgctggagcagctcagtgaggcggacaccaggtcactttaactagttttggtgccaaactagttttgtgagatagctgcagaagtgctcgtttctgtctgttgccacttcacttttggagacagggtcttgctctgtcacctaggctggagtgtaccagtggcgccatcagagctcactgcagccttggcctcccaaagtggtgggattacaggcgagagccactgtgcccagccagcttcactttcatttgttttaaaatttggtgttctgtccacatagttcagaattcaaaactgcttacaggggaaaatttcctcctacctgtgtccccagtgcagccagcattagggcttttgtatttctgcagagattatgtgcatttgtgggcagctgcgcccgtgggcttccaagggggaacttgctgtgcagtgggtccttgccttgcttttctcccttagggtaactaggtgacctccacattagcatattaagaatgtcctttttttccagctacgtagactagaaatgtgaggatgtgcatttgaagtgtttcctctgttaggttgggtgcggtgcctcacgcctgtaatcccaacattttgggaggcctaggcgggtggatcacttgaggtcaggagttcgagacctcatctctactaaaaatacaaaaactagctgggggtggtggtgggtgcctgtaatcccagttacttgggaggctgaggcaagagaacctcttgaaaccaggaggctgcggtgagccaagatcatgccatttcactctagcttgggtgaaggagtgagagtctatctatctatctatctatctatctatctaaaaaaaaaagtgtttaaagggatgcagttaggaaatggaatggctgagtctcagcatatcatccacatgtggttttcccgactccagttgtcc

SEQ ID NO: 349318 - DNA, 499 bp, Homo sapiens
aaaaggtgccccatgcccctcataatgggtttctcctcttgcctttcaatatacgagaacgccatgattgctgctggacttgttgacgaccctagggccatggtgggccgcttgaatgagctgcttgtcaaggccctggagcgacactgacagccagggggccagaaggactgacaccacagatgacagccccacctccttgagctttatttacctaaatttaaaggtatttcttaacccgattaacccgagtgtgtgttgggctttttttctgggtcctgtggcaggatgggtcctctcttcctgcagttcaactggtgtggggaggggctgctcacttcagcatcacctccactggatagtggtcactgatggcttgggcctgcaggcaagtgggcacagggtctgggctgagcctacctgagctcctgtgtcccatcctcatgtggctgtgcaagggaggacacataccagttggtcactcaggccataggcagcc

SEQ ID NO: 349319 - DNA, 590 bp, Homo sapiens
attttttccataaacattttttgtccattttttattgagatacaacttacatagcatcagattcacagaattcaccttttaacacgtaaaattcagtggcatttagtgcattcacagtgtggagtgcttctgccttgaaggcagtcagagccttccttagacccaggtgtcgtagtaactgtcatgcaggcctaggaaccccaactgccccggtgttccccagtgtggcccgcttggctcccccagccctcctgccgccctcatcctttcttctgtggtggctggaggcccccggggtctgatggagctgctcttggccacctgcaggttctcttctgctttgagcagtttgatgagctcaccctgctgcaccttcgtgagtttgacaagaagaagctgatctctgtggagacggacatagtcgtggatcactacaaggaggagaagtttgaggacaggtccccagttaacagcacacaggtaagagtcagagacatttctaggtctttgtaggtgtgcacgtgtgacatgtcttatcaatgcagacccaccatgtgtgcaggggtctgtccagtgctcctgccacggtg

SEQ ID NO: 349320 - DNA, 659 bp, Homo sapiens
tttttttttgagatggagtcttgctctgtcacccaggctggagtgcagtggcgcgatcttggctcactgcaagctccgcctcccgggttcaggccattctcctgcctcagcctcccgagtagctgggactttaggcgcccaccaccatgcctggctaattttttgtatttttagtagagacggggtttcaccctgttagccaggatggtctcgatctcctgacctcgtgatccgcccacttcggcctcccaaagtgctgggattacaagcgtgagccactgtgcccagccagagttgtgatttttaacataaagcccaggctgtcattttccgagtgttaccccgaggctgtcccggccacccacagcccaggtcactgttctgggaggtggcaggacgtagaggaagctccggcagtgccgcctccctgcttccctcttagcacacgtgctgggttgaaggccaggcctgaagacaaagggcaggttaatggggaatgttgggtggtgtggagggccgcagccccgggagaagctgactgccgtgtctcccaggtgtggtggacagtgaggacattcccctgaacctcagccgggagctgctgcaggagagcgcactcatcaggtgagcctcgggccgcggggagaggaccctgctgg

SEQ ID NO: 349321 - DNA, 210 bp, Homo sapiens
ctgtgcttctttaaatatcctgataatcccaaaacatgaagggagggtcacagcacgtggtactgagctgcttttctggtgggttctgtgttgaggcacgcgctcatcaagaagctgaatcagctgcgcgcaagcgagcctggcctggctcagctgctggtggatcaggtgagtgcagcagcttaggatgactgcagggacccaggctac

SEQ ID NO: 349322 - DNA, 2402 bp, Homo sapiens
cgccccttcccatcgtgtacggtcccgcgtggctgcgcgcggcgctctgggagtacgacatggcgcgcgagctgcgggcgctgctgctgtggggccgccgcctgcggcctttgctgcgggcgccggcgctggcggccgtgccgggaggaaaaccaattctgtgtcctcggaggaccacagcccagttgggccccaggcgaaacccagcctggagcttgcaggcaggacgactgttcagcacgcagaccgccgaggacaaggaggaacccctgcactcgattatcagcagcacagagagcgtgcagggttccacttccaaacatgagttccaggccgagacaaagaagcttttggacattgttgcccggtccctgtactcagaaaaagaggtgtttatacgggagctgatctccaatgccagcgatgccttggaaaaactgcgtcacaaactggtgtctgacggccaagcactgccagaaatggagattcacttgcagaccaatgccgagaaaggcaccatcaccatccaggatactggtatcgggatgacacaggaagagctggtgtccaacctggggacgattgccagatcggggtcaaaggccttcctggatgctctgcagaaccaggctgaggccagcagcaagatcatcggccagtttggagtgggtttctactcagctttcatggtggctgacagagtggaggtctattcccgctcggcagccccggggagcctgggttaccagtggctttcagatggttctggagtgtttgaaatcgccgaagcttcgggagttagaaccgggacaaaaatcatcatccacctgaaatccgactgcaaggagttttccagcgaggcccgggtgcgagatgtggtaacgaagtacagcaacttcgtcagcttccccttgtacttgaatggaaggcggatgaacaccttgcaggccatctggatgatggaccccaaggatgtccgtgagtggcaacatgaggagttctaccgctacgtcgcgcaggctcacgacaagccccgctacaccctgcactataagacggacgcaccgctcaacatccgcagcatcttctacgtgcccgacatgaaaccgtccatgtttgatgtgagccgggagctgggctccagcgttgcactgtacagccgcaaagtcctcatccagaccaaggccacggacatcctgcccaagtggctgcgcttcatccgaggtgtggtggacagtgaggacattcccctgaacctcagccgggagctgctgcaggagagcgcactcatcaggaaactccgggacgttttacagcagaggctgatcaaattcttcattgaccagagtaaaaaagatgctgagaagtatgcaaagttttttgaagattacggcctgttcatgcgggagggcattgtgaccgccaccgagcaggaggtcaaggaggacatagcaaagctgctgcgctacgagtcctcggcgctgccctccgggcagctaaccagcctctcagaatacgccagccgcatgcgggccggcacccgcaacatctactacctgtgcgcccccaaccgtcacctggcagagcactcaccctactatgaggccatgaagaagaaagacacagaggttctcttctgctttgagcagtttgatgagctcaccctgctgcaccttcgtgagtttgacaagaagaagctgatctctgtggagacggacatagtcgtggatcactacaaggaggagaagtttgaggacaggtccccagccgccgagtgcctatcagagaaggagacggaggagctcatggcctggatgagaaatgtgctggggtcgcgtgtcaccaacgtgaaggtgaccctccgactggacacccaccctgccatggtcaccgtgctggagatgggggctgcccgccacttcctgcgcatgcagcagctggccaagacccaggaggagcgcgcacagctcctgcagcccacgctggagatcaaccccaggcacgcgctcatcaagaagctgaatcagctgcgcgcaagcgagcctggcctggctcagctgctggtggatcagatatacgagaacgccatgattgctgctggacttgttgacgaccctagggccatggtgggccgcttgaatgagctgcttgtcaaggccctggagcgacactgacagccagggggccagaaggactgacaccacagatgacagccccacctccttgagctttatttacctaaatttaaaggtatttcttaacccgaacaaaaaaaaaggggggcgcaaaattcctgggggccaggttaagggtccagcttctggtcaaagggcccaaggggcgaaaaagcagaccggcgggtaaaaggcgggggaaagctggattggagactactctgggga

SEQ ID NO: 349323 - DNA, 2523 bp, Homo sapiens
cgccccttcccatcgtgtacggtcccgcgtggctgcgcgcggcgctctgggagtacgacatggcgcgcgagctgcgggcgctgctgctgtggggccgccgcctgcggcctttgctgcgggcgccggcgctggcggccgtgccgggaggaaaaccaattctgtgtcctcggaggaccacagcccagttgggccccaggcgaaacccagcctggagcttgcaggcaggacgactgttcagcacgcagaccgccgaggacaaggaggaacccctgcactcgattatcagcagcacagagagcgtgcagggttccacttccaaacatgagttccaggccgagacaaagaagcttttggacattgttgcccggtccctgtactcagaaaaagaggtgtttatacgggagctgatctccaatgccagcgatgccttggaaaaactgcgtcacaaactggtgtctgacggccaagcactgccagaaatggagattcacttgcagaccaatgccgagaaaggcaccatcaccatccaggatactggtatcgggatgacacaggaagagctggtgtccaacctggggacgattgccagatcggggtcaaaggccttcctggatgctctgcagaaccaggctgaggccagcagcaagatcatcggccagtttggagtgggtttctactcagctttcatggtggctgacagagtggaggtctattcccgctcggcagccccggggagcctgggttaccagtggctttcagatggttctggagtgtttgaaatcgccgaagcttcgggagttagaaccgggacaaaaatcatcatccacctgaaatccgactgcaaggagttttccagcgaggcccgggtgcgagatgtggtaacgaagtacagcaacttcgtcagcttccccttgtacttgaatggaaggcggatgaacaccttgcaggccatctggatgatggaccccaaggatgtccgtgagtggcaacatgaggagttctaccgctacgtcgcgcaggctcacgacaagccccgctacaccctgcactataagacggacgcaccgctcaacatccgcagcatcttctacgtgcccgacatgaaaccgtccatgtttgatgtgagccgggagctgggctccagcgttgcactgtacagccgcaaagtcctcatccagaccaaggccacggacatcctgcccaagtggctgcgcttcatccgaggtgtggtggacagtgaggacattcccctgaacctcagccgggagctgctgcaggagagcgcactcatcaggaaactccgggacgttttacagcagaggctgatcaaattcttcattgaccagagtaaaaaagatgctgagaagtatgcaaagttttttgaagattacggcctgttcatgcgggagggcattgtgaccgccaccgagcaggaggtcaaggaggacatagcaaagctgctgcgctacgagtcctcggcgctgccctccgggcagctaaccagcctctcagaatacgccagccgcatgcgggccggcacccgcaacatctactacctgtgcgcccccaaccgtcacctggcagagcactcaccctactatgaggccatgaagaagaaagacacagaggttctcttctgctttgagcagtttgatgagctcaccctgctgcaccttcgtgagtttgacaagaagaagctgatctctgtggagacggacatagtcgtggatcactacaaggaggagaagtttgaggacaggtccccagccgccgagtgcctatcagagaaggagacggaggagctcatggcctggatgagaaatgtgctggggtcgcgtgtcaccaacgtgaaggtgaccctccgactggacacccaccctgccatggtcaccgtgctggagatgggggctgcccgccacttcctgcgcatgcagcagctggccaagacccaggaggagcgcgcacagctcctgcagcccacgctggagatcaaccccaggcacgcgctcatcaagaagctgaatcagctgcgcgcaagcgagcctggcctggctcagctgctggtggatcagatatacgagaacgccatgattgctgctggacttgttgacgaccctagggccatggtgggccgcttgaatgagctgcttgtcaaggccctggagcgacactgacagccagggggccagaaggactgacaccacagatgacagccccacctccttgagctttatttacctaaatttaaaggtatttcttaacccgattaacccgagtgtgtgttgggctttttttctgggtcctgtggcaggatgggtcctctcttcctgcagttcaactggtgtggggaggggctgctcacttcagcatcacctccactggatagtggtcactgatggcttgggcctgcaggcaagtgggcacagggtctgggctgagcctacctgagctcctgtgtcccatcctcatgtggctgtgcaagggaggacacataccagttggtcactcaggccataggcagcc

SEQ ID NO: 349324 - DNA, 2348 bp, Homo sapiens
cgccccttcccatcgtgtacggtcccgcgtggctgcgcgcggcgctctgggagtacgacatggcgcgcgagctgcgggcgctgctgctgtggggccgccgcctgcggcctttgctgcgggcgccggcgctggcggccgtgccgggaggaaaaccaattctgtgtcctcggaggaccacagcccagttgggccccaggcgaaacccagcctggagcttgcaggcaggacgactgttcagcacgcagaccgccgaggacaaggaggaacccctgcactcgattatcagcagcacagagagcgtgcagggttccacttccaaacatgagttccaggccgagacaaagaagcttttggacattgttgcccggtccctgtactcagaaaaagaggtgtttatacgggagctgatctccaatgccagcgatgccttggaaaaactgcgtcacaaactggtgtctgacggccaagcactgccagaaatggagattcacttgcagaccaatgccgagaaaggcaccatcaccatccaggatactggtatcgggatgacacaggaagagctggtgtccaacctggggacgattgccagatcggggtcaaaggccttcctggatgctctgcagaaccaggctgaggccagcagcaagatcatcggccagtttggagtgggtttctactcagctttcatggtggctgacagagtggaggtctattcccgctcggcagccccggggagcctgggttaccagtggctttcagatggttctggagtgtttgaaatcgccgaagcttcgggagttagaaccgggacaaaaatcatcatccacctgaaatccgactgcaaggagttttccagcgaggcccgggtgcgagatgtggtaacgaagtacagcaacttcgtcagcttccccttgtacttgaatggaaggcggatgaacaccttgcaggccatctggatgatggaccccaaggatgtccgtgagtggcaacatgaggagttctaccgctacgtcgcgcaggctcacgacaagccccgctacaccctgcactataagacggacgcaccgctcaacatccgcagcatcttctacgtgcccgacatgaaaccgtccatgtttgatgtgagccgggagctgggctccagcgttgcactgtacagccgcaaagtcctcatccagaccaaggccacggacatcctgcccaagtggctgcgcttcatccgaggtgtggtggacagtgaggacattcccctgaacctcagccgggagctgctgcaggagagcgcactcatcaggaaactccgggacgttttacagcagaggctgatcaaattcttcattgaccagagtaaggagggcattgtgaccgccaccgagcaggaggtcaaggaggacatagcaaagctgctgcgctacgagtcctcggcgctgccctccgggcagctaaccagcctctcagaatacgccagccgcatgcgggccggcacccgcaacatctactacctgtgcgcccccaaccgtcacctggcagagcactcaccctactatgaggccatgaagaagaaagacacagaggttctcttctgctttgagcagtttgatgagctcaccctgctgcaccttcgtgagtttgacaagaagaagctgatctctgtggagacggacatagtcgtggatcactacaaggaggagaagtttgaggacaggtccccagccgccgagtgcctatcagagaaggagacggaggagctcatggcctggatgagaaatgtgctggggtcgcgtgtcaccaacgtgaaggtgaccctccgactggacacccaccctgccatggtcaccgtgctggagatgggggctgcccgccacttcctgcgcatgcagcagctggccaagacccaggaggagcgcgcacagctcctgcagcccacgctggagatcaaccccaggcacgcgctcatcaagaagctgaatcagctgcgcgcaagcgagcctggcctggctcagctgctggtggatcagatatacgagaacgccatgattgctgctggacttgttgacgaccctagggccatggtgggccgcttgaatgagctgcttgtcaaggccctggagcgacactgacagccagggggccagaaggactgacaccacagatgacagccccacctccttgagctttatttacctaaatttaaaggtatttcttaacccgaacaaaaaaaaaggggggcgcaaaattcctgggggccaggttaagggtccagcttctggtcaaagggcccaaggggcgaaaaagcagaccggcgggtaaaaggcgggggaaagctggattggagactactctgggga

SEQ ID NO: 349325 - DNA, 2281 bp, Homo sapiens
cgccccttcccatcgtgtacggtcccgcgtggctgcgcgcggcgctctgggagtacgacatggcgcgcgagctgcgggcgctgctgctgtggggccgccgcctgcggcctttgctgcgggcgccggcgctggcggccgtgccgggaggaaaaccaattctgtgtcctcggaggaccacagcccagttgggccccaggcgaaacccagcctggagcttgcaggcaggacgactgttcagcacgcagaccgccgaggacaaggaggaacccctgcactcgattatcagcagcacagagagcgtgcagggttccacttccaaacatgagttccaggccgagacaaagaagcttttggacattgttgcccggtccctgtactcagaaaaagaggtgtttatacgggagctgatctccaatgccagcgatgccttggaaaaactgcgtcacaaactggtgtctgacggccaagcactgccagaaatggagattcacttgcagaccaatgccgagaaaggcaccatcaccatccaggatactggtatcgggatgacacaggaagagctggtgtccaacctggggacgattgccagatcggggtcaaaggccttcctggatgctctgcagaaccaggctgaggccagcagcaagatcatcggccagtttggagtgggtttctactcagctttcatggtggctgacagagtggaggtctattcccgctcggcagccccggggagcctgggttaccagtggctttcagatggttctggagtgtttgaaatcgccgaagcttcgggagttagaaccgggacaaaaatcatcatccacctgaaatccgactgcaaggagttttccagcgaggcccgggtgcgagatgtggtaacgaagtacagcaacttcgtcagcttccccttgtacttgaatggaaggcggatgaacaccttgcaggccatctggatgatggaccccaaggatgtccgtgagtggcaacatgaggagttctaccgctacgtcgcgcaggctcacgacaagccccgctacaccctgcactataagacggacgcaccgctcaacatccgcagcatcttctacgtgcccgacatggtgtggtggacagtgaggacattcccctgaacctcagccgggagctgctgcaggagagcgcactcatcaggaaactccgggacgttttacagcagaggctgatcaaattcttcattgaccagagtaaaaaagatgctgagaagtatgcaaagttttttgaagattacggcctgttcatgcgggagggcattgtgaccgccaccgagcaggaggtcaaggaggacatagcaaagctgctgcgctacgagtcctcggcgctgccctccgggcagctaaccagcctctcagaatacgccagccgcatgcgggccggcacccgcaacatctactacctgtgcgcccccaaccgtcacctggcagagcactcaccctactatgaggccatgaagaagaaagacacagaggttctcttctgctttgagcagtttgatgagctcaccctgctgcaccttcgtgagtttgacaagaagaagctgatctctgtggagacggacatagtcgtggatcactacaaggaggagaagtttgaggacaggtccccagccgccgagtgcctatcagagaaggagacggaggagctcatggcctggatgagaaatgtgctggggtcgcgtgtcaccaacgtgaaggtgaccctccgactggacacccaccctgccatggtcaccgtgctggagatgggggctgcccgccacttcctgcgcatgcagcagctggccaagacccaggaggagcgcgcacagctcctgcagcccacgctggagatcaaccccaggcacgcgctcatcaagaagctgaatcagctgcgcgcaagcgagcctggcctggctcagctgctggtggatcagatatacgagaacgccatgattgctgctggacttgttgacgaccctagggccatggtgggccgcttgaatgagctgcttgtcaaggccctggagcgacactgacagccagggggccagaaggactgacaccacagatgacagccccacctccttgagctttatttacctaaatttaaaggtatttcttaacccgaacaaaaaaaaaggggggcgcaaaattcctgggggccaggttaagggtccagcttctggtcaaagggcccaaggggcgaaaaagcagaccggcgggtaaaaggcgggggaaagctggattggagactactctgggga

SEQ ID NO: 349326 - DNA, 2034 bp, Homo sapiens
  misc_feature (2013)..(2014): n is a, c, g, or t
cgccccttcccatcgtgtacggtcccgcgtggctgcgcgcggcgctctgggagtacgacatggcgcgcgagctgcgggcgctgctgctgtggggccgccgcctgcggcctttgctgcgggcgccggcgctggcggccgtgccgggaggaaaaccaattctgtgtcctcggaggaccacagcccagttgggccccaggcgaaacccagcctggagcttgcaggcaggacgactgttcagcacgcagaccgccgaggacaaggaggaacccctgcactcgattatcagcagcacagagagcgtgcagggttccacttccaaacatgagttccaggccgagacaaagaagcttttggacattgttgcccggtccctgtactcagaaaaagaggtgtttatacgggagctgatctccaatgccagcgatgccttggaaaaactgcgtcacaaactggtgtctgacggccaagcactgccagaaatggagattcacttgcagaccaatgccgagaaaggcaccatcaccatccaggatactggtatcgggatgacacaggaagagctggtgtccaacctggggacgattgccagatcggggtcaaaggccttcctggatgctctgcagaaccaggctgaggccagcagcaagatcatcggccagtttggagtgggtttctactcagctttcatggtggctgacagagtggaggtctattcccgctcggcagccccggggagcctgggttaccagtggctttcagatggttctggagtgtttgaaatcgccgaagcttcgggagttagaaccgggacaaaaatcatcatccacctgaaatccgactgcaaggagttttccagcgaggcccgggtgcgagatgtggtaacgaagtacagcaacttcgtcagcttccccttgtacttgaatggaaggcggatgaacaccttgcaggccatctggatgatggaccccaaggatgtccgtgagtggcaacatgaggagttctaccgctacgtcgcgcaggctcacgacaagccccgctacaccctgcactataagacggacgcaccgctcaacatccgcagcatcttctacgtgcccgacatgaaaccgtccatgtttgatgtgagccgggagctgggctccagcgttgcactgtacagccgcaaagtcctcatccagaccaaggccacggacatcctgcccaagtggctgcgcttcatccgaggtgtggtggacagtgaggacattcccctgaacctcagccgggagctgctgcaggagagcgcactcatcaggaaactccgggacgttttacagcagaggctgatcaaattcttcattgaccagagtaaaaaagatgctgagaagtatgcaaagttttttgaagattacggcctgttcatgcgggagggcattgtgaccgccaccgagcaggaggtcaaggaggacatagcaaagctgctgcgctacgagtcctcggcgctgccctccgggcagctaaccagcctctcagaatacgccagccgcatgcgggccggcacccgcaacatctactacctgtgcgcccccaaccgtcacctggcagagcactcaccctactatgaggccatgaagaagaaagacacagaggttctcttctgctttgagcagtttgatgagctcaccctgctgcaccttcgtgagtttgacaagaagaagctgatctctgtggagacggacatagtcgtggatcactacaaggaggagaagtttgaggacaggtccccagccgccgagtgcctatcagagaaggagacggaggagctcatggcctggatgagaaatgtgctggggtcgcgtgtcaccaacgtgaaggtgaccctccgactggacacccaccctgccatggtcaccgtgctggagatgggggctgcccgccacttcctgcgcatgcagcagctggccaagacccaggaggagcgcgcacagctcctgcagcccacgctggagatcaaccccaggcacgcgcacatcnnatcgggccgagctcgatcgt

SEQ ID NO: 349327 - DNA, 2316 bp, Homo sapiens
cgccccttcccatcgtgtacggtcccgcgtggctgcgcgcggcgctctgggagtacgacatggcgcgcgagctgcgggcgctgctgctgtggggccgccgcctgcggcctttgctgcgggcgccggcgctggcggccgtgccgggaggaaaaccaattctgtgtcctcggaggaccacagcccagttgggccccaggcgaaacccagcctggagcttgcaggcaggacgactgttcagcacgcagaccgccgaggacaaggaggaacccctgcactcgattatcagcagcacagagagcgtgcagggttccacttccaaacatgagttccaggccgagacaaagaagcttttggacattgttgcccggtccctgtactcagaaaaagaggtgtttatacgggagctgatctccaatgccagcgatgccttggaaaaactgcgtcacaaactggtgtctgacggccaagcactgccagaaatggagattcacttgcagaccaatgccgagaaaggcaccatcaccatccaggatactggtatcgggatgacacaggaagagctggtgtccaacctggggacgattgccagatcggggtcaaaggccttcctggatgctctgcagaaccaggctgaggccagcagcaagatcatcggccagtttggagtgggtttctactcagctttcatggtggctgacagagtggaggtctattcccgctcggcagccccggggagcctgggttaccagtggctttcagatggttctggagtgtttgaaatcgccgaagcttcgggagttagaaccgggacaaaaatcatcatccacctgaaatccgactgcaaggagttttccagcgaggcccgggtgcgagatgtggtaacgaagtacagcaacttcgtcagcttccccttgtacttgaatggaaggcggatgaacaccttgcaggccatctggatgatggaccccaaggatgtccgtgagtggcaacatgaggagttctaccgctacgtcgcgcaggctcacgacaagccccgctacaccctgcactataagacggacgcaccgctcaacatccgcagcatcttctacgtgcccgacatgaaaccgtccatgtttgatgtgagccgggagctgggctccagcgttgcactgtacagccgcaaagtcctcatccagaccaaggccacggacatcctgcccaagtggctgcgcttcatccgaggtgtggtggacagtgaggacattcccctgaacctcagccgggagctgctgcaggagagcgcactcatcaggaaactccgggacgttttacagcagaggctgatcaaattcttcattgaccagagtaaaaaagatgctgagaagtatgcaaagttttttgaagattacggcctgttcatgcgggagggcattgtgaccgccaccgagcaggaggtcaaggaggacatagcaaagctgctgcgctacgagtcctcggcgctgccctccgggcagctaaccagcctctcagaatacgccagccgcatgcgggccggcacccgcaacatctactacctgtgcgcccccaaccgtcacctggcagagcactcaccctactatgaggccatgaagaagaaagacacagaggttctcttctgctttgagcagtttgatgagctcaccctgctgcaccttcgtgagtttgacaagaagaagctgatctctgtggagacggacatagtcgtggatcactacaaggaggagaagtttgaggacaggtccccaggtgaccctccgactggacacccaccctgccatggtcaccgtgctggagatgggggctgcccgccacttcctgcgcatgcagcagctggccaagacccaggaggagcgcgcacagctcctgcagcccacgctggagatcaaccccaggcacgcgctcatcaagaagctgaatcagctgcgcgcaagcgagcctggcctggctcagctgctggtggatcagatatacgagaacgccatgattgctgctggacttgttgacgaccctagggccatggtgggccgcttgaatgagctgcttgtcaaggccctggagcgacactgacagccagggggccagaaggactgacaccacagatgacagccccacctccttgagctttatttacctaaatttaaaggtatttcttaacccgaacaaaaaaaaaggggggcgcaaaattcctgggggccaggttaagggtccagcttctggtcaaagggcccaaggggcgaaaaagcagaccggcgggtaaaaggcgggggaaagctggattggagactactctgggga

SEQ ID NO: 349328 - DNA, 1996 bp, Homo sapiens
cgccccttcccatcgtgtacggtcccgcgtggctgcgcgcggcgctctgggagtacgacatggcgcgcgagctgcgggcgctgctgctgtggggccgccgcctgcggcctttgctgcgggcgccggcgctggcggccgtgccgggaggaaaaccaattctgtgtcctcggaggaccacagcccagttgggccccaggcgaaacccagcctggagcttgcaggcaggacgactgttcagcacgcagaccgccgaggacaaggaggaacccctgcactcgattatcagcagcacagagagcgtgcagggttccacttccaaacatgagttccaggccgagacaaagaagcttttggacattgttgcccggtccctgtactcagaaaaagaggtgtttatacgggagctgatctccaatgccagcgatgccttggaaaaactgcgtcacaaactggtgtctgacggccaagcactgccagaaatggagattcacttgcagaccaatgccgagaaaggcaccatcaccatccaggatactggtatcgggatgacacaggaagagctggtgtccaacctggggacgattgccagatcggggtcaaaggccttcctggatgctctgcagaaccaggctgaggccagcagcaagatcatcggccagtttggagtgggtttctactcagctttcatggtggctgacagagtggaggtctattcccgctcggcagccccggggagcctgggttaccagtggctttcagatggttctggagtgtttgaaatcgccgaagcttcgggagttagaaccgggacaaaaatcatcatccacctgaaatccgactgcaaggagttttccagcgaggcccgggtgcgagatgtggtaacgaagtacagcaacttcgtcagcttccccttgtacttgaatggaaggcggatgaacaccttgcaggccatctggatgatggaccccaaggatgtccgtgagtggcaacatgaggagttctaccgctacgtcgcgcaggctcacgacaagccccgctacaccctgcactataagacggacgcaccgctcaacatccgcagcatcttctacgtgcccgacatgaaaccgtccatgtttgatgtgagccgggagctgggctccagcgttgcactgtacagccgcaaagtcctcatccagaccaaggccacggacatcctgcccaagtggctgcgcttcatccgaggtgtggtggacagtgaggacattcccctgaacctcagccgggagctgctgcaggagagcgcactcatcaggaaactccgggacgttttacagcagaggctgatcaaattcttcattgaccagagtaaaaaagatgctgagaagtatgcaaagttttttgaagattacggcctgttcatgcgggagggcattgtgaccgccaccgagcaggaggtcaaggaggacatagcaaagctgctgcgctacgagtcctcggcgctgccctccgggcagctaaccagcctctcagaatacgccagccgcatgcgggccggcacccgcaacatctactacctgtgcgcccccaaccgtcacctggcagagcactcaccctactatgaggccatgaagaagaaagacacagaggttctcttctgctttgagcagtttgatgagctcaccctgctgcaccttcgtgagtttgacaagaagaagctgatctctgtggagacggacatagtcgtggatcactacaaggaggagaagtttgaggacaggtccccagccgccgagtgcctatcagagaaggagacggaggagctcatggcctggatgagaaatgtgctggggtcgcgtgtcaccaacgtgaagacgtcattgacatgagagcggacagtccgaagggacaaccaccgcagcacgactacagaggagcagactcacaggctcgactccgccagagcaggacacacgcaccgagccggcgaggccaccaggcagggaggagcaccaga

SEQ ID NO: 349329 - DNA, 2622 bp, Homo sapiens
cgccccttcccatcgtgtacggtcccgcgtggctgcgcgcggcgctctgggagtacgacatggcgcgcgagctgcgggcgctgctgctgtggggccgccgcctgcggcctttgctgcgggcgccggcgctggcggccgtgccgggaggaaaaccaattctgtgtcctcggaggaccacagcccagttgggccccaggcgaaacccagcctggagcttgcaggcaggacgactgttcagcacgcagaccgccgaggacaaggaggaacccctgcactcgattatcagcagcacagagagcgtgcagggttccacttccaaacatgagttccaggccgagacaaagaagcttttggacattgttgcccggtccctgtactcagaaaaagaggtgtttatacgggagctgatctccaatgccagcgatgccttggaaaaactgcgtcacaaactggtgtctgacggccaagcactgccagaaatggagattcacttgcagaccaatgccgagaaaggcaccatcaccatccaggatactggtatcgggatgacacaggaagagctggtgtccaacctggggacgattgccagatcggggtcaaaggccttcctggatgctctgcagaaccaggctgaggccagcagcaagatcatcggccagtttggagtgggtttctactcagctttcatggtggctgacagagtggaggtctattcccgctcggcagccccggggagcctgggttaccagtggctttcagatggttctggagtgtttgaaatcgccgaagcttcgggagttagaaccgggacaaaaatcatcatccacctgaaatccgactgcaaggagttttccagcgaggcccgggtgcgagatgtggtaacgaagtacagcaacttcgtcagcttccccttgtacttgaatggaaggcggatgaacaccttgcaggccatctggatgatggaccccaaggatgtccgtgagtggcaacatgaggagttctaccgctacgtcgcgcaggctcacgacaagccccgctacaccctgcactataagacggacgcaccgctcaacatccgcagcatcttctacgtgcccgacatgaaaccgtccatgtttgatgtgagccgggagctgggctccagcgttgcactgtacagccgcaaagtcctcatccagaccaaggccacggacatcctgcccaagtggctgcgcttcatccgaggtgtggtggacagtgaggacattcccctgaacctcagccgggagctgctgcaggagagcgcactcatcaggaaactccgggacgttttacagcagaggctgatcaaattcttcattgaccagagtaaaaaagatgctgagaagtatgcaaagttttttgaagattacggcctgttcatgcgggagggcattgtgaccgccaccgagcaggaggtcaaggaggacatagcaaagctgctgcgctacgagtcctcggcgctgccctccgggcagctaaccagcctctcagaatacgccagccgcatgcgggccggcacccgcaacatctactacctgtgcgcccccaaccgtcacctggcagagcactcaccctactatgaggccatgaagaagaaagacacagaggttctcttctgctttgagcagtttgatgagctcaccctgctgcaccttcgtgagtttgacaagaagaagctgatctctgtggagacggacatagtcgtggatcactacaaggaggagaagtttgaggacaggtccccagagacccaggaggagcgcgcacagctcctgcagcccacgctggagatcaaccccaggcacgcgctcatcaagaagctgaatcagctgcgcgcaagcgagcctggcctggctcagctgctggtggatcagatatacgagaacgccatgattgctgctggacttgttgacgaccctagggccatggtgggccgcttgaatgagctgcttgtcaaggccctggagcgacactgacagccagggggccagaaggactgacaccacagatgacagccccacctccttgagctttatttacctaaatttaaaggtatttcttaacccgagaactcccaggcatagtgcccctgcttcctctacctgccagaaggaaggctggaacttgggcctcgcttgtacaaatggcgagtgctgcctgctgtgtggctgccctcaggacgggctttggtgagggcagcacagccctggaggagcctggtctgacatggggcccgtctgggatcactgttgggccttcaaccgtctggagcctctatgtcttcctctgatagattcccagaacaatcatttcaccttctaagaagccatcctgcccctgcagcctgtggcttgtggagtctccagcactctcacttctccctcgtggatctcttttctgtctgtgtcagtcaatgctgccatgtaacagccacctgcaaactcagtgtatacacatgcatttctctcacactgccaggtctgctggggtggctctgctgcctgggcctcgtcctggggctgggctggagagactgcagctccctgggcaccctcttcccacagtgtggaaggtggaggctcccagggcacaagcagaaca

SEQ ID NO: 349330 - DNA, 2494 bp, Homo sapiens
cgccccttcccatcgtgtacggtcccgcgtggctgcgcgcggcgctctgggagtacgacatggcgcgcgagctgcgggcgctgctgctgtggggccgccgcctgcggcctttgctgcgggcgccggcgctggcggccgtgccgggaggaaaaccaattctgtgtcctcggaggaccacagcccagttgggccccaggcgaaacccagcctggagcttgcaggcaggacgactgttcagcacgcagaccgccgaggacaaggaggaacccctgcactcgattatcagcagcacagagagcgtgcagggttccacttccaaacatgagttccaggccgagacaaagaagcttttggacattgttgcccggtccctgtactcagaaaaagaggtgtttatacgggagctgatctccaatgccagcgatgccttggaaaaactgcgtcacaaactggtgtctgacggccaagcactgccagaaatggagattcacttgcagaccaatgccgagaaaggcaccatcaccatccaggatactggtatcgggatgacacaggaagagctggtgtccaacctggggacgattgccagatcggggtcaaaggccttcctggatgctctgcagaaccaggctgaggccagcagcaagatcatcggccagtttggagtgggtttctactcagctttcatggtggctgacagagtggaggtctattcccgctcggcagccccggggagcctgggttaccagtggctttcagatggttctggagtgtttgaaatcgccgaagcttcgggagttagaaccgggacaaaaatcatcatccacctgaaatccgactgcaaggagttttccagcgaggcccgggtgcgagatgtggtaacgaagtacagcaacttcgtcagcttccccttgtacttgaatggaaggcggatgaacaccttgcaggccatctggatgatggaccccaaggatgtccgtgagtggcaacatgaggagttctaccgctacgtcgcgcaggctcacgacaagccccgctacaccctgcactataagacggacgcaccgctcaacatccgcagcatcttctacgtgcccgacatgaaaccgtccatgtttgatgtgagccgggagctgggctccagcgttgcactgtacagccgcaaagtcctcatccagaccaaggccacggacatcctgcccaagtggctgcgcttcatccgaggtgtggtggacagtgaggacattcccctgaacctcagccgggagctgctgcaggagagcgcactcatcaggaaactccgggacgttttacagcagaggctgatcaaattcttcattgaccagagtaaaaaagatgctgagaagtatgcaaagttttttgaagattacggcctgttcatgcgggagggcattgtgaccgccaccgagcaggaggtcaaggaggacatagcaaagctgctgcgctacgagtcctcggcgctgccctccgggcagctaaccagcctctcagaatacgccagccgcatgcgggccggcacccgcaacatctactacctgtgcgcccccaaccgtcacctggcagagcactcaccctactatgaggccatgaagaagaaagacacagaggttctcttctgctttgagcagtttgatgagctcaccctgctgcaccttcgtgagtttgacaagaagaagctgatctctgtggagacggacatagtcgtggatcactacaaggaggagaagtttgaggacaggtccccagatatacgagaacgccatgattgctgctggacttgttgacgaccctagggccatggtgggccgcttgaatgagctgcttgtcaaggccctggagcgacactgacagccagggggccagaaggactgacaccacagatgacagccccacctccttgagctttatttacctaaatttaaaggtatttcttaacccgagaactcccaggcatagtgcccctgcttcctctacctgccagaaggaaggctggaacttgggcctcgcttgtacaaatggcgagtgctgcctgctgtgtggctgccctcaggacgggctttggtgagggcagcacagccctggaggagcctggtctgacatggggcccgtctgggatcactgttgggccttcaaccgtctggagcctctatgtcttcctctgatagattcccagaacaatcatttcaccttctaagaagccatcctgcccctgcagcctgtggcttgtggagtctccagcactctcacttctccctcgtggatctcttttctgtctgtgtcagtcaatgctgccatgtaacagccacctgcaaactcagtgtatacacatgcatttctctcacactgccaggtctgctggggtggctctgctgcctgggcctcgtcctggggctgggctggagagactgcagctccctgggcaccctcttcccacagtgtggaaggtggaggctcccagggcacaagcagaaca

SEQ ID NO: 349331 - DNA, 2309 bp, Homo sapiens
cgccccttcccatcgtgtacggtcccgcgtggctgcgcgcggcgctctgggagtacgacatggcgcgcgagctgcgggcgctgctgctgtggggccgccgcctgcggcctttgctgcgggcgccggcgctggcggccgtgccgggaggaaaaccaattctgtgtcctcggaggaccacagcccagttgggccccaggcgaaacccagcctggagcttgcaggcaggacgactgttcagcacgcagaccgccgaggacaaggaggaacccctgcactcgattatcagcagcacagagagcgtgcagggttccacttccaaacatgagttccaggccgagacaaagaagcttttggacattgttgcccggtccctgtactcagaaaaagaggtgtttatacgggagctgatctccaatgccagcgatgccttggaaaaactgcgtcacaaactggtgtctgacggccaagcactgccagaaatggagattcacttgcagaccaatgccgagaaaggcaccatcaccatccaggatactggtatcgggatgacacaggaagagctggtgtccaacctggggacgattgccagatcggggtcaaaggccttcctggatgctctgcagaaccaggctgaggccagcagcaagatcatcggccagtttggagtgggtttctactcagctttcatggtggctgacagagtggaggtctattcccgctcggcagccccggggagcctgggttaccagtggctttcagatggttctggagtgtttgaaatcgccgaagcttcgggagttagaaccgggacaaaaatcatcatccacctgaaatccgactgcaaggagttttccagcgaggcccgggtgcgagatgtggtaacgaagtacagcaacttcgtcagcttccccttgtacttgaatggaaggcggatgaacaccttgcaggccatctggatgatggaccccaaggatgtccgtgagtggcaacatgaggagttctaccgctacgtcgcgcaggctcacgacaagccccgctacaccctgcactataagacggacgcaccgctcaacatccgcagcatcttctacgtgcccgacatgaaaccgtccatgtttgatgtgagccgggagctgggctccagcgttgcactgtacagccgcaaagtcctcatccagaccaaggccacggacatcctgcccaagtggctgcgcttcatccgaggtgtggtggacagtgaggacattcccctgaacctcagccgggagctgctgcaggagagcgcactcatcaggaaactccgggacgttttacagcagaggctgatcaaattcttcattgaccagagtaaaaaagatgctgagaagtatgcaaagttttttgaagattacggcctgttcatgcgggagggcattgtgaccgccaccgagcaggaggtcaaggaggacatagcaaagctgctgcgctacgagtcctcggcgctgccctccgggcagctaaccagcctctcagaatacgccagccgcatgcgggccggcacccgcaacatctactacctgtgcgcccccaaccgtcacctggcagagcactcaccctactatgaggccatgaagaagaaagacacagaggtgggtgagcggtgggtggggcgggctccgggggctgcaacctggggagggtcttgaccttctcagctctgtgctgggtgaacctgcccaagactccgggcagggctgcacagtgggtcagggtcacgggcacagaggccggaccgactgtgacggctgtttcccacttggaggtcacatgtggttttttttgtttgttttttgtttttttgagatggagtcttgctctctcgcccaggctagagtgcagtggtgcgatctcggctcactgcaacttccgcctcctgggttcaggtcattctcctgcctcagcctcctgagtagctgggactacaggtgcacaccaccacacccagcaaatttttgtatttttaatagagacggcatttcaccatgttggtctcgaataaaaatacaaaaactagctgggggtggtggtgggtgcctgtaatcccagttacttgggaggctgaggcaagagaacctcttgaaaccaggaggctgcggtgagccaagatcatgccatttcactctagcttgggtgaaggagtgagagtctatctatctatctatctatctatctatctaaaaaaaaaagtgtttaaagggatgcagttaggaaatggaatggctgagtctcagcatatcatccacatgtggttttcccgactccagttgtcc

SEQ ID NO: 349332 - DNA, 2056 bp, Homo sapiens
acgggcgacgaaaacttaggcaggtacgaggcctgggtgttgggtgtttatacgggagctgatctccaatgccagcgatgccttggaaaaactgcgtcacaaactggtgtctgacggccaagcactgccagaaatggagattcacttgcagaccaatgccgagaaaggcaccatcaccatccaggatactggtatcgggatgacacaggaagagctggtgtccaacctggggacgattgccagatcggggtcaaaggccttcctggatgctctgcagaaccaggctgaggccagcagcaagatcatcggccagtttggagtgggtttctactcagctttcatggtggctgacagagtggaggtctattcccgctcggcagccccggggagcctgggttaccagtggctttcagatggttctggagtgtttgaaatcgccgaagcttcgggagttagaaccgggacaaaaatcatcatccacctgaaatccgactgcaaggagttttccagcgaggcccgggtgcgagatgtggtaacgaagtacagcaacttcgtcagcttccccttgtacttgaatggaaggcggatgaacaccttgcaggccatctggatgatggaccccaaggatgtccgtgagtggcaacatgaggagttctaccgctacgtcgcgcaggctcacgacaagccccgctacaccctgcactataagacggacgcaccgctcaacatccgcagcatcttctacgtgcccgacatgaaaccgtccatgtttgatgtgagccgggagctgggctccagcgttgcactgtacagccgcaaagtcctcatccagaccaaggccacggacatcctgcccaagtggctgcgcttcatccgaggtgtggtggacagtgaggacattcccctgaacctcagccgggagctgctgcaggagagcgcactcatcaggaaactccgggacgttttacagcagaggctgatcaaattcttcattgaccagagtaaaaaagatgctgagaagtatgcaaagttttttgaagattacggcctgttcatgcgggagggcattgtgaccgccaccgagcaggaggtcaaggaggacatagcaaagctgctgcgctacgagtcctcggcgctgccctccgggcagctaaccagcctctcagaatacgccagccgcatgcgggccggcacccgcaacatctactacctgtgcgcccccaaccgtcacctggcagagcactcaccctactatgaggccatgaagaagaaagacacagaggttctcttctgctttgagcagtttgatgagctcaccctgctgcaccttcgtgagtttgacaagaagaagctgatctctgtggagacggacatagtcgtggatcactacaaggaggagaagtttgaggacaggtccccagccgccgagtgcctatcagagaaggagacggaggagctcatggcctggatgagaaatgtgctggggtcgcgtgtcaccaacgtgaaggtgaccctccgactggacacccaccctgccatggtcaccgtgctggagatgggggctgcccgccacttcctgcgcatgcagcagctggccaagacccaggaggagcgcgcacagctcctgcagcccacgctggagatcaaccccaggcacgcgctcatcaagaagctgaatcagctgcgcgcaagcgagcctggcctggctcagctgctggtggatcagatatacgagaacgccatgattgctgctggacttgttgacgaccctagggccatggtgggccgcttgaatgagctgcttgtcaaggccctggagcgacactgacagccagggggccagaaggactgacaccacagatgacagccccacctccttgagctttatttacctaaatttaaaggtatttcttaacccgaacaaaaaaaaaggggggcgcaaaattcctgggggccaggttaagggtccagcttctggtcaaagggcccaaggggcgaaaaagcagaccggcgggtaaaaggcgggggaaagctggattggagactactctgggga

SEQ ID NO: 349333 - DNA, 2349 bp, Homo sapiens
cgccccttcccatcgtgtacggtcccgcgtggctgcgcgcggcgctctgggagtacgacatggcgcgcgagctgcgggcgctgctgctgtggggccgccgcctgcggcctttgctgcgggcgccggcgctggcggccgtgccgggaggaaaaccaattctgtgtcctcggaggaccacagcccagttgggccccaggcgaaacccagcctggagcttgcaggcaggacgactgttcagcacgcagaccgccgaggacaaggaggaacccctgcactcgattatcagcagcacagagagcgtgcagggttccacttccaaacatgagttccaggccgagacaaagaagcttttggacattgttgcccggtccctgtactcagaaaaagaggtgtttatacgggagctgatctccaatgccagcgatgccttggattcacttgcagaccaatgccgagaaaggcaccatcaccatccaggatactggtatcgggatgacacaggaagagctggtgtccaacctggggacgattgccagatcggggtcaaaggccttcctggatgctctgcagaaccaggctgaggccagcagcaagatcatcggccagtttggagtgggtttctactcagctttcatggtggctgacagagtggaggtctattcccgctcggcagccccggggagcctgggttaccagtggctttcagatggttctggagtgtttgaaatcgccgaagcttcgggagttagaaccgggacaaaaatcatcatccacctgaaatccgactgcaaggagttttccagcgaggcccgggtgcgagatgtggtaacgaagtacagcaacttcgtcagcttccccttgtacttgaatggaaggcggatgaacaccttgcaggccatctggatgatggaccccaaggatgtccgtgagtggcaacatgaggagttctaccgctacgtcgcgcaggctcacgacaagccccgctacaccctgcactataagacggacgcaccgctcaacatccgcagcatcttctacgtgcccgacatgaaaccgtccatgtttgatgtgagccgggagctgggctccagcgttgcactgtacagccgcaaagtcctcatccagaccaaggccacggacatcctgcccaagtggctgcgcttcatccgaggtgtggtggacagtgaggacattcccctgaacctcagccgggagctgctgcaggagagcgcactcatcaggaaactccgggacgttttacagcagaggctgatcaaattcttcattgaccagagtaaaaaagatgctgagaagtatgcaaagttttttgaagattacggcctgttcatgcgggagggcattgtgaccgccaccgagcaggaggtcaaggaggacatagcaaagctgctgcgctacgagtcctcggcgctgccctccgggcagctaaccagcctctcagaatacgccagccgcatgcgggccggcacccgcaacatctactacctgtgcgcccccaaccgtcacctggcagagcactcaccctactatgaggccatgaagaagaaagacacagaggttctcttctgctttgagcagtttgatgagctcaccctgctgcaccttcgtgagtttgacaagaagaagctgatctctgtggagacggacatagtcgtggatcactacaaggaggagaagtttgaggacaggtccccagccgccgagtgcctatcagagaaggagacggaggagctcatggcctggatgagaaatgtgctggggtcgcgtgtcaccaacgtgaaggtgaccctccgactggacacccaccctgccatggtcaccgtgctggagatgggggctgcccgccacttcctgcgcatgcagcagctggccaagacccaggaggagcgcgcacagctcctgcagcccacgctggagatcaaccccaggcacgcgctcatcaagaagctgaatcagctgcgcgcaagcgagcctggcctggctcagctgctggtggatcagatatacgagaacgccatgattgctgctggacttgttgacgaccctagggccatggtgggccgcttgaatgagctgcttgtcaaggccctggagcgacactgacagccagggggccagaaggactgacaccacagatgacagccccacctccttgagctttatttacctaaatttaaaggtatttcttaacccgaacaaaaaaaaaggggggcgcaaaattcctgggggccaggttaagggtccagcttctggtcaaagggcccaaggggcgaaaaagcagaccggcgggtaaaaggcgggggaaagctggattggagactactctgggga

SEQ ID NO: 349334 - DNA, 2081 bp, Homo sapiens
cgccccttcccatcgtgtacggtcccgcgtggctgcgcgcggcgctctgggagtacgacatggcgcgcgagctgcgggcgctgctgctgtggggccgccgcctgcggcctttgctgcgggcgccggcgctggcggccgtgccgggaggaaaaccaattctgtgtcctcggaggaccacagcccagttgggccccaggcgaaacccagcctggagcttgcaggcaggacgactgttcagcacgcagaccgccgaggacaaggaggaacccctgcactcgattatcagcagcacagagagcgtgcagggttccacttccaaacatgagttccaggccgagacaaagaagcttttggacattgttgcccggtccctgtactcagaaaaagagtattcccgctcggcagccccggggagcctgggttaccagtggctttcagatggttctggagtgtttgaaatcgccgaagcttcgggagttagaaccgggacaaaaatcatcatccacctgaaatccgactgcaaggagttttccagcgaggcccgggtgcgagatgtggtaacgaagtacagcaacttcgtcagcttccccttgtacttgaatggaaggcggatgaacaccttgcaggccatctggatgatggaccccaaggatgtccgtgagtggcaacatgaggagttctaccgctacgtcgcgcaggctcacgacaagccccgctacaccctgcactataagacggacgcaccgctcaacatccgcagcatcttctacgtgcccgacatgaaaccgtccatgtttgatgtgagccgggagctgggctccagcgttgcactgtacagccgcaaagtcctcatccagaccaaggccacggacatcctgcccaagtggctgcgcttcatccgaggtgtggtggacagtgaggacattcccctgaacctcagccgggagctgctgcaggagagcgcactcatcaggaaactccgggacgttttacagcagaggctgatcaaattcttcattgaccagagtaaaaaagatgctgagaagtatgcaaagttttttgaagattacggcctgttcatgcgggagggcattgtgaccgccaccgagcaggaggtcaaggaggacatagcaaagctgctgcgctacgagtcctcggcgctgccctccgggcagctaaccagcctctcagaatacgccagccgcatgcgggccggcacccgcaacatctactacctgtgcgcccccaaccgtcacctggcagagcactcaccctactatgaggccatgaagaagaaagacacagaggttctcttctgctttgagcagtttgatgagctcaccctgctgcaccttcgtgagtttgacaagaagaagctgatctctgtggagacggacatagtcgtggatcactacaaggaggagaagtttgaggacaggtccccagccgccgagtgcctatcagagaaggagacggaggagctcatggcctggatgagaaatgtgctggggtcgcgtgtcaccaacgtgaaggtgaccctccgactggacacccaccctgccatggtcaccgtgctggagatgggggctgcccgccacttcctgcgcatgcagcagctggccaagacccaggaggagcgcgcacagctcctgcagcccacgctggagatcaaccccaggcacgcgctcatcaagaagctgaatcagctgcgcgcaagcgagcctggcctggctcagctgctggtggatcagatatacgagaacgccatgattgctgctggacttgttgacgaccctagggccatggtgggccgcttgaatgagctgcttgtcaaggccctggagcgacactgacagccagggggccagaaggactgacaccacagatgacagccccacctccttgagctttatttacctaaatttaaaggtatttcttaacccgaacaaaaaaaaaggggggcgcaaaattcctgggggccaggttaagggtccagcttctggtcaaagggcccaaggggcgaaaaagcagaccggcgggtaaaaggcgggggaaagctggattggagactactctgggga

SEQ ID NO: 349335 - DNA, 1493 bp, Homo sapiens
gtgaacacgacgccctccccgccgatctccgtttccaggccatctggatgatggaccccaaggatgtccgtgagtggcaacatgaggagttctaccgctacgtcgcgcaggctcacgacaagccccgctacaccctgcactataagacggacgcaccgctcaacatccgcagcatcttctacgtgcccgacatgaaaccgtccatgtttgatgtgagccgggagctgggctccagcgttgcactgtacagccgcaaagtcctcatccagaccaaggccacggacatcctgcccaagtggctgcgcttcatccgaggtgtggtggacagtgaggacattcccctgaacctcagccgggagctgctgcaggagagcgcactcatcaggaaactccgggacgttttacagcagaggctgatcaaattcttcattgaccagagtaaaaaagatgctgagaagtatgcaaagttttttgaagattacggcctgttcatgcgggagggcattgtgaccgccaccgagcaggaggtcaaggaggacatagcaaagctgctgcgctacgagtcctcggcgctgccctccgggcagctaaccagcctctcagaatacgccagccgcatgcgggccggcacccgcaacatctactacctgtgcgcccccaaccgtcacctggcagagcactcaccctactatgaggccatgaagaagaaagacacagaggttctcttctgctttgagcagtttgatgagctcaccctgctgcaccttcgtgagtttgacaagaagaagctgatctctgtggagacggacatagtcgtggatcactacaaggaggagaagtttgaggacaggtccccagccgccgagtgcctatcagagaaggagacggaggagctcatggcctggatgagaaatgtgctggggtcgcgtgtcaccaacgtgaaggtgaccctccgactggacacccaccctgccatggtcaccgtgctggagatgggggctgcccgccacttcctgcgcatgcagcagctggccaagacccaggaggagcgcgcacagctcctgcagcccacgctggagatcaaccccaggcacgcgctcatcaagaagctgaatcagctgcgcgcaagcgagcctggcctggctcagctgctggtggatcagatatacgagaacgccatgattgctgctggacttgttgacgaccctagggccatggtgggccgcttgaatgagctgcttgtcaaggccctggagcgacactgacagccagggggccagaaggactgacaccacagatgacagccccacctccttgagctttatttacctaaatttaaaggtatttcttaacccgaacaaaaaaaaaggggggcgcaaaattcctgggggccaggttaagggtccagcttctggtcaaagggcccaaggggcgaaaaagcagaccggcgggtaaaaggcgggggaaagctggattggagactactctgggga

SEQ ID NO: 349336 - DNA, 1358 bp, Homo sapiens
  misc_feature (30)..(31): n is a, c, g, or t
  misc_feature (33)..(33): n is a, c, g, or t
  misc_feature (35)..(35): n is a, c, g, or t
ggacgcgtgggtcgacccacgcgtccggannangngtcggcttctacgtgcccgacatgaaaccgtccatgtttgatgtgagccgggagctgggctccagcgttgcactgtacagccgcaaagtcctcatccagaccaaggccacggacatcctgcccaagtggctgcgcttcatccgaggtgtggtggacagtgaggacattcccctgaacctcagccgggagctgctgcaggagagcgcactcatcaggaaactccgggacgttttacagcagaggctgatcaaattcttcattgaccagagtaaaaaagatgctgagaagtatgcaaagttttttgaagattacggcctgttcatgcgggagggcattgtgaccgccaccgagcaggaggtcaaggaggacatagcaaagctgctgcgctacgagtcctcggcgctgccctccgggcagctaaccagcctctcagaatacgccagccgcatgcgggccggcacccgcaacatctactacctgtgcgcccccaaccgtcacctggcagagcactcaccctactatgaggccatgaagaagaaagacacagaggttctcttctgctttgagcagtttgatgagctcaccctgctgcaccttcgtgagtttgacaagaagaagctgatctctgtggagacggacatagtcgtggatcactacaaggaggagaagtttgaggacaggtccccagccgccgagtgcctatcagagaaggagacggaggagctcatggcctggatgagaaatgtgctggggtcgcgtgtcaccaacgtgaaggtgaccctccgactggacacccaccctgccatggtcaccgtgctggagatgggggctgcccgccacttcctgcgcatgcagcagctggccaagacccaggaggagcgcgcacagctcctgcagcccacgctggagatcaaccccaggcacgcgctcatcaagaagctgaatcagctgcgcgcaagcgagcctggcctggctcagctgctggtggatcagatatacgagaacgccatgattgctgctggacttgttgacgaccctagggccatggtgggccgcttgaatgagctgcttgtcaaggccctggagcgacactgacagccagggggccagaaggactgacaccacagatgacagccccacctccttgagctttatttacctaaatttaaaggtatttcttaacccgaacaaaaaaaaaggggggcgcaaaattcctgggggccaggttaagggtccagcttctggtcaaagggcccaaggggcgaaaaagcagaccggcgggtaaaaggcgggggaaagctggattggagactactctgggga

SEQ ID NO: 349337 - DNA, 1978 bp, Homo sapiens
attttttccataaacattttttgtccattttttattgagatacaacttacatagcatcagattcacagaattcaccttttaacacgtaaaattcagtggcatttagtgcattcacagtgtggtgtggctgcctccactgtaaccccagaacatttcatcccaggagcccatcccgtgctggtgtcccttctccccagcagcaggaggagggtgaccacgtgtgtggggtcccaaggaggccgtgttctggttgtttgccgacttcggcagcttctgacacaggcctcttcattctcctttatcttcatttgagttaacagcacacaggtaagagtcagagacatttctaggtctttgtaggtgtgcacgtgtgacatgtcttatcaatgcagacccaccatgtgtgcaggggtggcctgggccctgctggttgggtgtccagctccttgcttttccctctttctgttttccccctgcgtccttccagctgcagctcccatgagctctagaggtcacagctgcgttcagctgatggggaggagggcaaacccctcccctaagggcccttctccaaatcccactgaaacccactgggcaaagccagtctctgccatagccagctgtgaggagggccgggaaccgtggacttcacccgtgtccgtgtgcccaccagagactgactctgtcactgagggcagagggaagacgctgggtccaggccgggctctgctgttgggtggggtcccctcccagggcgtggtgcgcgtagctccctggagagcccctgggccacctggggcaggaggtgcttcctaagcccccagagctcccaaaaggggcctgatgggcagagcaaggcctgctctcggacaacccccgagtccactaccgtccctcgggtcagggccagcctggagtgccaggaggccatgggcatcggagggtttgcgcccagttagttgggcaacattgagcccatgggcctggaataagtggtgacctgccccgtcccttctaggaggacatagcaaagctgctgcgctacgagtcctcggcgctgccctccgggcagctaaccagcctctcagaatacgccagccgcatgcgggccggcacccgcaacatctactacctgtgcgcccccaaccgtcacctggcagagcactcaccctactatgaggccatgaagaagaaagacacagaggttctcttctgctttgagcagtttgatgagctcaccctgctgcaccttcgtgagtttgacaagaagaagctgatctctgtggagacggacatagtcgtggatcactacaaggaggagaagtttgaggacaggtccccagccgccgagtgcctatcagagaaggagacggaggagctcatggcctggatgagaaatgtgctggggtcgcgtgtcaccaacgtgaaggtgaccctccgactggacacccaccctgccatggtcaccgtgctggagatgggggctgcccgccacttcctgcgcatgcagcagctggccaagacccaggaggagcgcgcacagctcctgcagcccacgctggagatcaaccccaggcacgcgctcatcaagaagctgaatcagctgcgcgcaagcgagcctggcctggctcagctgctggtggatcagatatacgagaacgccatgattgctgctggacttgttgacgaccctagggccatggtgggccgcttgaatgagctgcttgtcaaggccctggagcgacactgacagccagggggccagaaggactgacaccacagatgacagccccacctccttgagctttatttacctaaatttaaaggtatttcttaacccgaacaaaaaaaaaggggggcgcaaaattcctgggggccaggttaagggtccagcttctggtcaaagggcccaaggggcgaaaaagcagaccggcgggtaaaaggcgggggaaagctggattggagactactctgggga

SEQ ID NO: 349338 - DNA, 839 bp, Homo sapiens
  misc_feature (768)..(768): n is a, c, g, or t
  misc_feature (778)..(778): n is a, c, g, or t
  misc_feature (788)..(788): n is a, c, g, or t
  misc_feature (818)..(818): n is a, c, g, or t
  misc_feature (825)..(825): n is a, c, g, or t
cgccccttcccatcgtgtacggtcccgcgtggctgcgcgcggcgctctgggagtacgacatggcgcgcgagctgcgggcgctgctgctgtggggccgccgcctgcggcctttgctgcgggcgccggcgctggcggccgtgccgggaggaaaaccaattctgtgtcctcggaggaccacagcccagttgggccccaggcgaaacccagcctggagcttgcaggcaggacgactgttcagcacgcagaccgccgaggacaaggaggaacccctgcactcgattatcagcagcacagagagcgtgcagggttccacttccaaacatgagttccaggccgagacaaagaagcttttggacattgttgcccggtccctgtactcagaaaaagaggtgtttatacgggagctgatctccaatgccagcgatgccttggaaaaactgcgtcacaaactggtgtctgacggccaagcactgccagaaatggagattcacttgcagaccaatgccgagaaaggcaccatcaccatccaggatactggtatcgggatgacacaggaagagctggtgtccaacctggggacgattgccagatcggggtcaaaggccttcctggatgctctgcagaaccaggctgaggccagcagcaagatcatcggccagtttggagtgggtttctactcagctttcatggtggctgacagagtggaggtctattcccgctcggcagccccggggagcctgggttaccagtggctttcagatggttctnggaatttttnaaattccccnaaactttccgggattttaaaacccgggaancaaaatntcctccccccccct

SEQ ID NO: 349339 - DNA, 1152 bp, Homo sapiens
attttttccataaacattttttgtccattttttattgagatacaacttacatagcatcagattcacagaattcaccttttaacacgtaaaattcagtggcatttagtgcattcacagtgtggtgtggctgcctccacttgcactcagccacatgtggatttctttatgcgtggagtgcttctgccttgaaggcagtcagagccttccttagacccaggtgtcgtagtaactgtcatgcaggcctaggaaccccaactgccccggtgttccccagtgtggcccgcttggctcccccagccctcctgccgccctcatcctttcttctgtggtggctggaggcccccggggtctgatggagctgctcttggccacctgcaggttctcttctgctttgagcagtttgatgagctcaccctgctgcaccttcgtgagtttgacaagaagaagctgatctctgtggagacggacatagtcgtggatcactacaaggaggagaagtttgaggacaggtccccagccgccgagtgcctatcagagaaggagacggaggagctcatggcctggatgagaaatgtgctggggtcgcgtgtcaccaacgtgaaggtgaccctccgactggacacccaccctgccatggtcaccgtgctggagatgggggctgcccgccacttcctgcgcatgcagcagctggccaagacccaggaggagcgcgcacagctcctgcagcccacgctggagatcaaccccaggcacgcgctcatcaagaagctgaatcagctgcgcgcaagcgagcctggcctggctcagctgctggtggatcagatatacgagaacgccatgattgctgctggacttgttgacgaccctagggccatggtgggccgcttgaatgagctgcttgtcaaggccctggagcgacactgacagccagggggccagaaggactgacaccacagatgacagccccacctccttgagctttatttacctaaatttaaaggtatttcttaacccgaacaaaaaaaaaggggggcgcaaaattcctgggggccaggttaagggtccagcttctggtcaaagggcccaaggggcgaaaaagcagaccggcgggtaaaaggcgggggaaagctggattggagactactctgggga

SEQ ID NO: 349340 - DNA, 1101 bp, Homo sapiens
attttttccataaacattttttgtccattttttattgagatacaacttacatagcatcagattcacagaattcaccttttaacacgtaaaattcagtggcatttagtgcattcacagtgtggagtgcttctgccttgaaggcagtcagagccttccttagacccaggtgtcgtagtaactgtcatgcaggcctaggaaccccaactgccccggtgttccccagtgtggcccgcttggctcccccagccctcctgccgccctcatcctttcttctgtggtggctggaggcccccggggtctgatggagctgctcttggccacctgcaggttctcttctgctttgagcagtttgatgagctcaccctgctgcaccttcgtgagtttgacaagaagaagctgatctctgtggagacggacatagtcgtggatcactacaaggaggagaagtttgaggacaggtccccagccgccgagtgcctatcagagaaggagacggaggagctcatggcctggatgagaaatgtgctggggtcgcgtgtcaccaacgtgaaggtgaccctccgactggacacccaccctgccatggtcaccgtgctggagatgggggctgcccgccacttcctgcgcatgcagcagctggccaagacccaggaggagcgcgcacagctcctgcagcccacgctggagatcaaccccaggcacgcgctcatcaagaagctgaatcagctgcgcgcaagcgagcctggcctggctcagctgctggtggatcagatatacgagaacgccatgattgctgctggacttgttgacgaccctagggccatggtgggccgcttgaatgagctgcttgtcaaggccctggagcgacactgacagccagggggccagaaggactgacaccacagatgacagccccacctccttgagctttatttacctaaatttaaaggtatttcttaacccgaacaaaaaaaaaggggggcgcaaaattcctgggggccaggttaagggtccagcttctggtcaaagggcccaaggggcgaaaaagcagaccggcgggtaaaaggcgggggaaagctggattggagactactctgggga

SEQ ID NO: 349341 - DNA, 2182 bp, Homo sapiens
ttttttttttgaggcggaatcttgctctgctgcccagcctggacgtgcagtaatactatctcggctcactgcaacctctgcttcctgggttcaagcaattcttctgcctcagcctcccgagtagctgggattacaggcacgcaccaccacacccggctaatttttgtatttttagtagagacagggtttcaccatgttggtcacactggtctcaaactcgtgaccttgtgatccgcctgcctcggcctcccaaagtgctgggattacaggcgtgagccatcgcacccagcctattttttaagtttctcacagacacaaggtctccaagtcctgagcccaagcaatcttcccgcaaatgctgggattacaagtgtgagccaccgcaccccgccactcatttcttggaatctttgactttccattcgtattcatttcctgagactggtgaaactaccacaagtttggttgcttaaaataacagaaatggatcctctcaaaattccggagactggacgtctgaagtcagggagtcagtaggaccttgcgcctcctggaggctccgggcggttgggggatgctccttgccctccagtttctgcaggctgccagcaatccttggctttccttagttgtggctgcatcaccccagtctctgcctcttcttcttaagatctgtgcacctgcatttggggtcctcccagagagcagggaggatgtccttatctcaacagcctttactcacatctgcaagtccttttttgctacaaaaatcaacattcagaggttccagggctagggcacagctatcttttgagccacccctgggtcttgcccacttggaaggggctgtgctggccctccaaggacagccctgcacgtagcatctgtggtccccctgggggaggagggcctggaaggcttggcagaagtccaggcgggattcaggtatgagaactgcaggaaatgaatacaaatggggtctgcaggaggcctcaacggcaagagtcagcaggggccaaggtcgaaagtcaggaaagtgctcggtctggccagctggccatgaagcagaaggcaggcccagtggggactagaaacaggaaggtaaaccaccctccacaagactggcaccccattccataaagacacgccaacagacgcctctggctggcagcactggtgcactcatctgtccctcctattgagacggcgtctaccagatggaaacaccaccactcctcaggctgccagaggccccattgcaggcttttccaaaggtttcagcaatggttcttccctgtttttaatctctaagtctaggacagcctccagcacgtcaaaacccagcccccaagcaaggccaccggagtattcggtgtagggactagtcctctgcctttggtgtttgcctttcctggacacacatctgacagcgacccatcacggggaagggagtaaagctagagggcggccactgtcctccaccaagaaactgcctggtgcagcttccggcggggcacagggacaccaattatagctcacagagcaagtgcccaaccccctacgtgtgctcagcacgtgggacgagggttcccctctggtctgtcatcccctcctggctcttgaccaaatgctgccccatctgctttcaggaactcccaggcatagtgcccctgcttcctctacctgccagaaggaaggctggaacttgggcctcgcttgtacaaatggcgagtgctgcctgctgtgtggctgccctcaggacgggctttggtgagggcagcacagccctggaggagcctggtctgacatggggcccgtctgggatcactgttgggccttcaaccgtctggagcctctatgtcttcctctgatagattcccagaacaatcatttcaccttctaagaagccatcctgcccctgcagcctgtggcttgtggagtctccagcactctcacttctccctcgtggatctcttttctgtctgtgtcagtcaatgctgccatgtaacagccacctgcaaactcagtgtatacacatgcatttctctcacactgccaggtctgctggggtggctctgctgcctgggcctcgtcctggggctgggctggagagactgcagctccctgggcaccctcttcccacagtgtggaaggtggaggctcccagggcacaagcagaaca

SEQ ID NO: 349342 - DNA, 1947 bp, Homo sapiens
ttttttttttgaggcggaatcttgctctgctgcccagcctggacgtgcagtaatactatctcggctcactgcaacctctgcttcctgggttcaagcaattcttctgcctcagcctcccgagtagctgggattacagtgtgagccaccgcaccccgccactcatttcttggaatctttgactttccattcgtattcatttcctgagactggtgaaactaccacaagtttggttgcttaaaataacagaaatggatcctctcaaaattccggagactggacgtctgaagtcagggagtcagtaggaccttgcgcctcctggaggctccgggcggttgggggatgctccttgccctccagtttctgcaggctgccagcaatccttggctttccttagttgtggctgcatcaccccagtctctgcctcttcttcttaagatctgtgcacctgcatttggggtcctcccagagagcagggaggatgtccttatctcaacagcctttactcacatctgcaagtccttttttgctacaaaaatcaacattcagaggttccagggctagggcacagctatcttttgagccacccctgggtcttgcccacttggaaggggctgtgctggccctccaaggacagccctgcacgtagcatctgtggtccccctgggggaggagggcctggaaggcttggcagaagtccaggcgggattcaggtatgagaactgcaggaaatgaatacaaatggggtctgcaggaggcctcaacggcaagagtcagcaggggccaaggtcgaaagtcaggaaagtgctcggtctggccagctggccatgaagcagaaggcaggcccagtggggactagaaacaggaaggtaaaccaccctccacaagactggcaccccattccataaagacacgccaacagacgcctctggctggcagcactggtgcactcatctgtccctcctattgagacggcgtctaccagatggaaacaccaccactcctcaggctgccagaggccccattgcaggcttttccaaaggtttcagcaatggttcttccctgtttttaatctctaagtctaggacagcctccagcacgtcaaaacccagcccccaagcaaggccaccggagtattcggtgtagggactagtcctctgcctttggtgtttgcctttcctggacacacatctgacagcgacccatcacggggaagggagtaaagctagagggcggccactgtcctccaccaagaaactgcctggtgcagcttccggcggggcacagggacaccaattatagctcacagagcaagtgcccaaccccctacgtgtgctcagcacgtgggacgagggttcccctctggtctgtcatcccctcctggctcttgaccaaatgctgccccatctgctttcaggaactcccaggcatagtgcccctgcttcctctacctgccagaaggaaggctggaacttgggcctcgcttgtacaaatggcgagtgctgcctgctgtgtggctgccctcaggacgggctttggtgagggcagcacagccctggaggagcctggtctgacatggggcccgtctgggatcactgttgggccttcaaccgtctggagcctctatgtcttcctctgatagattcccagaacaatcatttcaccttctaagaagccatcctgcccctgcagcctgtggcttgtggagtctccagcactctcacttctccctcgtggatctcttttctgtctgtgtcagtcaatgctgccatgtaacagccacctgcaaactcagtgtatacacatgcatttctctcacactgccaggtctgctggggtggctctgctgcctgggcctcgtcctggggctgggctggagagactgcagctccctgggcaccctcttcccacagtgtggaaggtggaggctcccagggcacaagcagaaca

SEQ ID NO: 349343 - DNA, 2799 bp, Homo sapiens
cgccccttcccatcgtgtacggtcccgcgtggctgcgcgcggcgctctgggagtacgacatggcgcgcgagctgcgggcgctgctgctgtggggccgccgcctgcggcctttgctgcgggcgccggcgctggcggccgtgccgggaggaaaaccaattctgtgtcctcggaggaccacagcccagttgggccccaggcgaaacccagcctggagcttgcaggcaggacgactgttcagcacgcagaccgccgaggacaaggaggaacccctgcactcgattatcagcagcacagagagcgtgcagggttccacttccaaacatgagttccaggccgagacaaagaagcttttggacattgttgcccggtccctgtactcagaaaaagaggtgtttatacgggagctgatctccaatgccagcgatgccttggaaaaactgcgtcacaaactggtgtctgacggccaagcactgccagaaatggagattcacttgcagaccaatgccgagaaaggcaccatcaccatccaggatactggtatcgggatgacacaggaagagctggtgtccaacctggggacgattgccagatcggggtcaaaggccttcctggatgctctgcagaaccaggctgaggccagcagcaagatcatcggccagtttggagtgggtttctactcagctttcatggtggctgacagagtggaggtctattcccgctcggcagccccggggagcctgggttaccagtggctttcagatggttctggagtgtttgaaatcgccgaagcttcgggagttagaaccgggacaaaaatcatcatccacctgaaatccgactgcaaggagttttccagcgaggcccgggtgcgagatgtggtaacgaagtacagcaacttcgtcagcttccccttgtacttgaatggaaggcggatgaacaccttgcaggccatctggatgatggaccccaaggatgtccgtgagtggcaacatgaggagttctaccgctacgtcgcgcaggctcacgacaagccccgctacaccctgcactataagacggacgcaccgctcaacatccgcagcatcttctacgtgcccgacatgaaaccgtccatgtttgatgtgagccgggagctgggctccagcgttgcactgtacagccgcaaagtcctcatccagaccaaggccacggacatcctgcccaagtggctgcgcttcatccgaggtgtggtggacagtgaggacattcccctgaacctcagccgggagctgctgcaggagagcgcactcatcaggaaactccgggacgttttacagcagaggctgatcaaattcttcattgaccagagtaaaaaagatgctgagaagtatgcaaagttttttgaagattacggcctgttcatgcgggagggcattgtgaccgccaccgagcaggaggtcaaggaggacatagcaaagctgctgcgctacgagtcctcggcgctgccctccgggcagctaaccagcctctcagaatacgccagccgcatgcgggccggcacccgcaacatctactacctgtgcgcccccaaccgtcacctggcagagcactcaccctactatgaggccatgaagaagaaagacacagaggttctcttctgctttgagcagtttgatgagctcaccctgctgcaccttcgtgagtttgacaagaagaagctgatctctgtggagacggacatagtcgtggatcactacaaggaggagaagtttgaggacaggtccccagccgccgagtgcctatcagagaaggagacggaggagctcatggcctggatgagaaatgtgctggggtcgcgtgtcaccaacgtgaaggtgaccctccgactggacacccaccctgccatggtcaccgtgctggagatgggggctgcccgccacttcctgcgcatgcagcagctggccaagacccaggaggagcgcgcacagctcctgcagcccacgctggagatcaaccccaggcacgcgctcatcaagaagctgaatcagctgcgcgcaagcgagcctggcctggctcagctgctggtggatcagatatacgagaacgccatgattgctgctggacttgttgacgaccctagggccatggtgggccgcttgaatgagctgcttgtcaaggccctggagcgacactgacagccagggggccagaaggactgacaccacagatgacagccccacctccttgagctttatttacctaaatttaaaggtatttcttaacccgagaactcccaggcatagtgcccctgcttcctctacctgccagaaggaaggctggaacttgggcctcgcttgtacaaatggcgagtgctgcctgctgtgtggctgccctcaggacgggctttggtgagggcagcacagccctggaggagcctggtctgacatggggcccgtctgggatcactgttgggccttcaaccgtctggagcctctatgtcttcctctgatagattcccagaacaatcatttcaccttctaagaagccatcctgcccctgcagcctgtggcttgtggagtctccagcactctcacttctccctcgtggatctcttttctgtctgtgtcagtcaatgctgccatgtaacagccacctgcaaactcagtgtatacacatgcatttctctcacactgccaggtctgctggggtggctctgctgcctgggcctcgtcctggggctgggctggagagactgcagctccctgggcaccctcttcccacagtgtggaaggtggaggctcccagggcacaagcagaaca

SEQ ID NO: 349344 - DNA, 3113 bp, Homo sapiens
cgccccttcccatcgtgtacggtcccgcgtggctgcgcgcggcgctctgggagtacgacatggcgcgcgagctgcgggcgctgctgctgtggggccgccgcctgcggcctttgctgcgggcgccggcgctggcggccgtgccgggaggaaaaccaattctgtgtcctcggaggaccacagcccagttgggccccaggcgaaacccagcctggagcttgcaggcaggacgactgttcagcacgcagaccgccgaggacaaggaggaacccctgcactcgattatcagcagcacagagagcgtgcagggttccacttccaaacatgagttccaggccgagacaaagaagcttttggacattgttgcccggtccctgtactcagaaaaagaggtgtttatacgggagctgatctccaatgccagcgatgccttggaaaaactgcgtcacaaactggtgtctgacggccaagcactgccagaaatggagattcacttgcagaccaatgccgagaaaggcaccatcaccatccaggatactggtatcgggatgacacaggaagagctggtgtccaacctggggacgattgccagatcggggtcaaaggccttcctggatgctctgcagaaccaggctgaggccagcagcaagatcatcggccagtttggagtgggtttctactcagctttcatggtggctgacagagtggaggtctattcccgctcggcagccccggggagcctgggttaccagtggctttcagatggttctggagtgtttgaaatcgccgaagcttcgggagttagaaccgggacaaaaatcatcatccacctgaaatccgactgcaaggagttttccagcgaggcccgggtgcgagatgtggtaacgaagtacagcaacttcgtcagcttccccttgtacttgaatggaaggcggatgaacaccttgcaggccatctggatgatggaccccaaggatgtccgtgagtggcaacatgaggagttctaccgctacgtcgcgcaggctcacgacaagccccgctacaccctgcactataagacggacgcaccgctcaacatccgcagcatcttctacgtgcccgacatgaaaccgtccatgtttgatgtgagccgggagctgggctccagcgttgcactgtacagccgcaaagtcctcatccagaccaaggccacggacatcctgcccaagtggctgcgcttcatccgaggtgtggtggacagtgaggacattcccctgaacctcagccgggagctgctgcaggagagcgcactcatcaggaaactccgggacgttttacagcagaggctgatcaaattcttcattgaccagagtaaaaaagatgctgagaagtatgcaaagttttttgaagattacggcctgttcatgcgggagggcattgtgaccgccaccgagcaggaggtcaaggaggacatagcaaagctgctgcgctacgagtcctcggcgctgccctccgggcagctaaccagcctctcagaatacgccagccgcatgcgggccggcacccgcaacatctactacctgtgcgcccccaaccgtcacctggcagagcactcaccctactatgaggccatgaagaagaaagacacagaggtgggtgagcggtgggtggggcgggctccgggggctgcaacctggggagggtcttgaccttctcagctctgtgctgggtgaacctgcccaagactccgggcagggctgcacagtgggtcagggtcacgggcacagaggccggaccgactgtgacggctgtttcccacttggaggtcacatgtggttttttttgtttgttttttgtttttttgagatggagtcttgctctctcgcccaggctagagtgcagtggtgcgatctcggctcactgcaacttccgcctcctgggttcaggtcattctcctgcctcagcctcctgagtagctgggactacaggtgcacaccaccacacccagcaaatttttgtatttttaatagagacggcatttcaccatgttggtctcgaactcctgacctcatgatctgcctgctttggcctcccaaagtgctgggattacaggcgtgagccactgcactcagccacatgtggatttctttatgcgtggagtgcttctgccttgaaggcagtcagagccttccttagacccaggtgtcgtagtaactgtcatgcaggcctaggaaccccaactgccccggtgttccccagtgtggcccgcttggctcccccagccctcctgccgccctcatcctttcttctgtggtggctggaggcccccggggtctgatggagctgctcttggccacctgcaggttctcttctgctttgagcagtttgatgagctcaccctgctgcaccttcgtgagtttgacaagaagaagctgatctctgtggagacggacatagtcgtggatcactacaaggaggagaagtttgaggacaggtccccagccgccgagtgcctatcagagaaggagacggaggagctcatggcctggatgagaaatgtgctggggtcgcgtgtcaccaacgtgaaggtgaccctccgactggacacccaccctgccatggtcaccgtgctggagatgggggctgcccgccacttcctgcgcatgcagcagctggccaagacccaggaggagcgcgcacagctcctgcagcccacgctggagatcaaccccaggcacgcgctcatcaagaagctgaatcagctgcgcgcaagcgagcctggcctggctcagctgctggtggatcagatatacgagaacgccatgattgctgctggacttgttgacgaccctagggccatggtgggccgcttgaatgagctgcttgtcaaggccctggagcgacactgacagccagggggccagaaggactgacaccacagatgacagccccacctccttgagctttatttacctaaatttaaaggtatttcttaacccgaacaaaaaaaaaggggggcgcaaaattcctgggggccaggttaagggtccagcttctggtcaaagggcccaaggggcgaaaaagcagaccggcgggtaaaaggcgggggaaagctggattggagactactctgggga

SEQ ID NO: 349345 - DNA, 2684 bp, Homo sapiens
cgccccttcccatcgtgtacggtcccgcgtggctgcgcgcggcgctctgggagtacgacatggcgcgcgagctgcgggcgctgctgctgtggggccgccgcctgcggcctttgctgcgggcgccggcgctggcggccgtgccgggaggaaaaccaattctgtgtcctcggaggaccacagcccagttgggccccaggcgaaacccagcctggagcttgcaggcaggacgactgttcagcacgcagaccgccgaggacaaggaggaacccctgcactcgattatcagcagcacagagagcgtgcagggttccacttccaaacatgagttccaggccgagacaaagaagcttttggacattgttgcccggtccctgtactcagaaaaagaggtgtttatacgggagctgatctccaatgccagcgatgccttggaaaaactgcgtcacaaactggtgtctgacggccaagcactgccagaaatggagattcacttgcagaccaatgccgagaaaggcaccatcaccatccaggatactggtatcgggatgacacaggaagagctggtgtccaacctggggacgattgccagatcggggtcaaaggccttcctggatgctctgcagaaccaggctgaggccagcagcaagatcatcggccagtttggagtgggtttctactcagctttcatggtggctgacagagtggaggtctattcccgctcggcagccccggggagcctgggttaccagtggctttcagatggttctggagtgtttgaaatcgccgaagcttcgggagttagaaccgggacaaaaatcatcatccacctgaaatccgactgcaaggagttttccagcgaggcccgggtgcgagatgtggtaacgaagtacagcaacttcgtcagcttccccttgtacttgaatggaaggcggatgaacaccttgcaggccatctggatgatggaccccaaggatgtccgtgagtggcaacatgaggagttctaccgctacgtcgcgcaggctcacgacaagccccgctacaccctgcactataagacggacgcaccgctcaacatccgcagcatcttctacgtgcccgacatgaaaccgtccatgtttgatgtgagccgggagctgggctccagcgttgcactgtacagccgcaaagtcctcatccagaccaaggccacggacatcctgcccaagtggctgcgcttcatccgaggtgtggtggacagtgaggacattcccctgaacctcagccgggagctgctgcaggagagcgcactcatcaggaaactccgggacgttttacagcagaggctgatcaaattcttcattgaccagagtaaaaaagatgctgagaagtatgcaaagttttttgaagattacggcctgttcatgcgggagggcattgtgaccgccaccgagcaggaggtcaaggaggacatagcaaagctgctgcgctacgagtcctcggcgctgccctccgggcagctaaccagcctctcagaatacgccagccgcatgcgggccggcacccgcaacatctactacctgtgcgcccccaaccgtcacctggcagagcactcaccctactatgaggccatgaagaagaaagacacagaggttctcttctgctttgagcagtttgatgagctcaccctgctgcaccttcgtgagtttgacaagaagaagctgatctctgtggagacggacatagtcgtggatcactacaaggaggagaagtttgaggacaggtccccagccgccgagtgcctatcagagaaggagacggaggagctcatggcctggatgagaaatgtgctggggtcgcgtgtcaccaacgtgaaggtgaccctccgactggacacccaccctgccatggtcaccgtgctggagatgggggctgcccgccacttcctgcgcatgcagcagctggccaagacccaggaggagcgcgcacagctcctgcagcccacgctggagatcaaccccaggtgaggccacgctcctggctcttccagcctgtgggattccccagaatcctgtgtgtggtgttcttttgttgtggaatgtgacacagaagaaaagtgcgtgaggcctgtggacatgtgggtaactataaggagctgtatgcagtttaggctgcacccatgtgaaatggaacctggccagccccttaccatccccaggtgtcacctgggaggttagccacatcccagcctgtgaccatgtcctcgttttgctttatggctttgccacctgtgcgtgtcctggacatgctcagttttgcctgttttgagctttgtacgtggatcttggtgtttgctgaagtctcacgttgctcacttggcatgagggttgcccatgcagaggggctgccacaagttcattttcatagccgaataatgtccgctgcagaaacccacctcggcacagcagactgctccgttctgctctgctgggcctccggtggttcttggtcagaagttgtggagagccaggctgctctgagtattcttgtccacgtgtctggggcttgtgtgggtttctctgtggccccggtggtgggagctgcttccagggtgcaccgagaaccccccagccctgacagtggctgagccgtaagatttccctcgtttcttcctgttgttctttatatgccctttatctgttgtaaat

SEQ ID NO: 349346 - DNA, 2671 bp, Homo sapiens
cgccccttcccatcgtgtacggtcccgcgtggctgcgcgcggcgctctgggagtacgacatggcgcgcgagctgcgggcgctgctgctgtggggccgccgcctgcggcctttgctgcgggcgccggcgctggcggccgtgccgggaggaaaaccaattctgtgtcctcggaggaccacagcccagttgggccccaggcgaaacccagcctggagcttgcaggcaggacgactgttcagcacgcagaccgccgaggacaaggaggaacccctgcactcgattatcagcagcacagagagcgtgcagggttccacttccaaacatgagttccaggccgagacaaagaagcttttggacattgttgcccggtccctgtactcagaaaaagaggtgtttatacgggagctgatctccaatgccagcgatgccttggaaaaactgcgtcacaaactggtgtctgacggccaagcactgccagaaatggagattcacttgcagaccaatgccgagaaaggcaccatcaccatccaggatactggtatcgggatgacacaggaagagctggtgtccaacctggggacgattgccagatcggggtcaaaggccttcctggatgctctgcagaaccaggctgaggccagcagcaagatcatcggccagtttggagtgggtttctactcagctttcatggtggctgacagagtggaggtctattcccgctcggcagccccggggagcctgggttaccagtggctttcagatggttctggagtgtttgaaatcgccgaagcttcgggagttagaaccgggacaaaaatcatcatccacctgaaatccgactgcaaggagttttccagcgaggcccgggtgcgagatgtggtaacgaagtacagcaacttcgtcagcttccccttgtacttgaatggaaggcggatgaacaccttgcaggccatctggatgatggaccccaaggatgtccgtgagtggcaacatgaggagttctaccgctacgtcgcgcaggctcacgacaagccccgctacaccctgcactataagacggacgcaccgctcaacatccgcagcatcttctacgtgcccgacatgaaaccgtccatgtttgatgtgagccgggagctgggctccagcgttgcactgtacagccgcaaagtcctcatccagaccaaggccacggacatcctgcccaagtggctgcgcttcatccgaggtgtggtggacagtgaggacattcccctgaacctcagccgggagctgctgcaggagagcgcactcatcaggaaactccgggacgttttacagcagaggctgatcaaattcttcattgaccagagtaaaaaagatgctgagaagtatgcaaagttttttgaagattacggcctgttcatgcgggagggcattgtgaccgccaccgagcaggaggtcaaggaggacatagcaaagctgctgcgctacgagtcctcggcgctgccctccgggcagctaaccagcctctcagaatacgccagccgcatgcgggccggcacccgcaacatctactacctgtgcgcccccaaccgtcacctggcagagcactcaccctactatgaggccatgaagaagaaagacacagaggttctcttctgctttgagcagtttgatgagctcaccctgctgcaccttcgtgagtttgacaagaagaagctgatctctgtggagacggacatagtcgtggatcactacaaggaggagaagtttgaggacaggtccccagccgccgagtgcctatcagagaaggagacggaggagctcatggcctggatgagaaatgtgctggggtcgcgtgtcaccaacgtgaaggtgaccctccgactggacacccaccctgccatggtcaccgtgctggagatgggggctgcccgccacttcctgcgcatgcagcagctggccaatatacgagaacgccatgattgctgctggacttgttgacgaccctagggccatggtgggccgcttgaatgagctgcttgtcaaggccctggagcgacactgacagccagggggccagaaggactgacaccacagatgacagccccacctccttgagctttatttacctaaatttaaaggtatttcttaacccgagaactcccaggcatagtgcccctgcttcctctacctgccagaaggaaggctggaacttgggcctcgcttgtacaaatggcgagtgctgcctgctgtgtggctgccctcaggacgggctttggtgagggcagcacagccctggaggagcctggtctgacatggggcccgtctgggatcactgttgggccttcaaccgtctggagcctctatgtcttcctctgatagattcccagaacaatcatttcaccttctaagaagccatcctgcccctgcagcctgtggcttgtggagtctccagcactctcacttctccctcgtggatctcttttctgtctgtgtcagtcaatgctgccatgtaacagccacctgcaaactcagtgtatacacatgcatttctctcacactgccaggtctgctggggtggctctgctgcctgggcctcgtcctggggctgggctggagagactgcagctccctgggcaccctcttcccacagtgtggaaggtggaggctcccagggcacaagcagaaca

SEQ ID NO: 349347 - DNA, 4005 bp, Homo sapiens
cgccccttcccatcgtgtacggtcccgcgtggctgcgcgcggcgctctgggagtacgacatggcgcgcgagctgcgggcgctgctgctgtggggccgccgcctgcggcctttgctgcgggcgccggcgctggcggccgtgccgggaggaaaaccaattctgtgtcctcggaggaccacagcccagttgggccccaggcgaaacccagcctggagcttgcaggcaggacgactgttcagcacgcagaccgccgaggacaaggaggaacccctgcactcgattatcagcagcacagagagcgtgcagggttccacttccaaacatgagttccaggccgagacaaagaagcttttggacattgttgcccggtccctgtactcagaaaaagaggtgtttatacgggagctgatctccaatgccagcgatgccttggaaaaactgcgtcacaaactggtgtctgacggccaagcactgccagaaatggagattcacttgcagaccaatgccgagaaaggcaccatcaccatccaggatactggtatcgggatgacacaggaagagctggtgtccaacctggggacgattgccagatcggggtcaaaggccttcctggatgctctgcagaaccaggctgaggccagcagcaagatcatcggccagtttggagtgggtttctactcagctttcatggtggctgacagagtggaggtctattcccgctcggcagccccggggagcctgggttaccagtggctttcagatggttctggagtgtttgaaatcgccgaagcttcgggagttagaaccgggacaaaaatcatcatccacctgaaatccgactgcaaggagttttccagcgaggcccgggtgcgagatgtggtaacgaagtacagcaacttcgtcagcttccccttgtacttgaatggaaggcggatgaacaccttgcaggccatctggatgatggaccccaaggatgtccgtgagtggcaacatgaggagttctaccgctacgtcgcgcaggctcacgacaagccccgctacaccctgcactataagacggacgcaccgctcaacatccgcagcatcttctacgtgcccgacatgaaaccgtccatgtttgatgtgagccgggagctgggctccagcgttgcactgtacagccgcaaagtcctcatccagaccaaggccacggacatcctgcccaagtggctgcgcttcatccgaggtgtggtggacagtgaggacattcccctgaacctcagccgggagctgctgcaggagagcgcactcatcaggaaactccgggacgttttacagcagaggctgatcaaattcttcattgaccagagtaaaaaagatgctgagaagtatgcaaagttttttgaagattacggcctgttcatgcgggagggcattgtgaccgccaccgagcaggaggtcaaggaggacatagcaaagctgctgcgctacgagtcctcggcgctgccctccgggcagctaaccagcctctcagaatacgccagccgcatgcgggccggcacccgcaacatctactacctgtgcgcccccaaccgtcacctggcagagcactcaccctactatgaggccatgaagaagaaagacacagaggtgggtgagcggtgggtggggcgggctccgggggctgcaacctggggagggtcttgaccttctcagctctgtgctgggtgaacctgcccaagactccgggcagggctgcacagtgggtcagggtcacgggcacagaggccggaccgactgtgacggctgtttcccacttggaggtcacatgtggttttttttgtttgttttttgtttttttgagatggagtcttgctctctcgcccagcgtgcagtaatactatctcggctcactgcaacctctgcttcctgggttcaagcaattcttctgcctcagcctcccgagtagctgggattacaggcacgcaccaccacacccggctaatttttgtatttttagtagagacagggtttcaccatgttggtcacactggtctcaaactcgtgaccttgtgatccgcctgcctcggcctcccaaagtgctgggattacaggcgtgagccatcgcacccagcctattttttaagtttctcacagacacaaggtctccaagtcctgagcccaagcaatcttcccgcaaatgctgggattacaagtgtgagccaccgcaccccgccactcatttcttggaatctttgactttccattcgtattcatttcctgagactggtgaaactaccacaagtttggttgcttaaaataacagaaatggatcctctcaaaattccggagactggacgtctgaagtcagggagtcagtaggaccttgcgcctcctggaggctccgggcggttgggggatgctccttgccctccagtttctgcaggctgccagcaatccttggctttccttagttgtggctgcatcaccccagtctctgcctcttcttcttaagatctgtgcacctgcatttggggtcctcccagagagcagggaggatgtccttatctcaacagcctttactcacatctgcaagtccttttttgctacaaaaatcaacattcagaggttccagggctagggcacagctatcttttgagccacccctgggtcttgcccacttggaaggggctgtgctggccctccaaggacagccctgcacgtagcatctgtggtccccctgggggaggagggcctggaaggcttggcagaagtccaggcgggattcaggtatgagaactgcaggaaatgaatacaaatggggtctgcaggaggcctcaacggcaagagtcagcaggggccaaggtcgaaagtcaggaaagtgctcggtctggccagctggccatgaagcagaaggcaggcccagtggggactagaaacaggaaggtaaaccaccctccacaagactggcaccccattccataaagacacgccaacagacgcctctggctggcagcactggtgcactcatctgtccctcctattgagacggcgtctaccagatggaaacaccaccactcctcaggctgccagaggccccattgcaggcttttccaaaggtttcagcaatggttcttccctgtttttaatctctaagtctaggacagcctccagcacgtcaaaacccagcccccaagcaaggccaccggagtattcggtgtagggactagtcctctgcctttggtgtttgcctttcctggacacacatctgacagcgacccatcacggggaagggagtaaagctagagggcggccactgtcctccaccaagaaactgcctggtgcagcttccggcggggcacagggacaccaattatagctcacagagcaagtgcccaaccccctacgtgtgctcagcacgtgggacgagggttcccctctggtctgtcatcccctcctggctcttgaccaaatgctgccccatctgctttcaggaactcccaggcatagtgcccctgcttcctctacctgccagaaggaaggctggaacttgggcctcgcttgtacaaatggcgagtgctgcctgctgtgtggctgccctcaggacgggctttggtgagggcagcacagccctggaggagcctggtctgacatggggcccgtctgggatcactgttgggccttcaaccgtctggagcctctatgtcttcctctgatagattcccagaacaatcatttcaccttctaagaagccatcctgcccctgcagcctgtggcttgtggagtctccagcactctcacttctccctcgtggatctcttttctgtctgtgtcagtcaatgctgccatgtaacagccacctgcaaactcagtgtatacacatgcatttctctcacactgccaggtctgctggggtggctctgctgcctgggcctcgtcctggggctgggctggagagactgcagctccctgggcaccctcttcccacagtgtggaaggtggaggctcccagggcacaagcagaaca

SEQ ID NO: 349348 - DNA, 3333 bp, Homo sapiens
cgccccttcccatcgtgtacggtcccgcgtggctgcgcgcggcgctctgggagtacgacatggcgcgcgagctgcgggcgctgctgctgtggggccgccgcctgcggcctttgctgcgggcgccggcgctggcggccgtgccgggaggaaaaccaattctgtgtcctcggaggaccacagcccagttgggccccaggcgaaacccagcctggagcttgcaggcaggacgactgttcagcacgcagaccgccgaggacaaggaggaacccctgcactcgattatcagcagcacagagagcgtgcagggttccacttccaaacatgagttccaggccgagacaaagaagcttttggacattgttgcccggtccctgtactcagaaaaagaggtgtttatacgggagctgatctccaatgccagcgatgccttggaaaaactgcgtcacaaactggtgtctgacggccaagcactgccagaaatggagattcacttgcagaccaatgccgagaaaggcaccatcaccatccaggatactggtatcgggatgacacaggaagagctggtgtccaacctggggacgattgccagatcggggtcaaaggccttcctggatgctctgcagaaccaggctgaggccagcagcaagatcatcggccagtttggagtgggtttctactcagctttcatggtggctgacagagtggaggtctattcccgctcggcagccccggggagcctgggttaccagtggctttcagatggttctggagtgtttgaaatcgccgaagcttcgggagttagaaccgggacaaaaatcatcatccacctgaaatccgactgcaaggagttttccagcgaggcccgggtgcgagatgtggtaacgaagtacagcaacttcgtcagcttccccttgtacttgaatggaaggcggatgaacaccttgcaggccatctggatgatggaccccaaggatgtccgtgagtggcaacatgaggagttctaccgctacgtcgcgcaggctcacgacaagccccgctacaccctgcactataagacggacgcaccgctcaacatccgcagcatcttctacgtgcccgacatgaaaccgtccatgtttgatgtgagccgggagctgggctccagcgttgcactgtacagccgcaaagtcctcatccagaccaaggccacggacatcctgcccaagtggctgcgcttcatccgaggtgtggtggacagtgaggacattcccctgaacctcagccgggagctgctgcaggagagcgcactcatcaggaaactccgggacgttttacagcagaggctgatcaaattcttcattgaccagagtaaaaaagatgctgagaagtatgcaaagttttttgaagattacggcctgttcatgcgggagggcattgtgaccgccaccgagcaggaggtcaaggaggacatagcaaagctgctgcgctacgagtcctcggcgctgccctccgggcagctaaccagcctctcagaatacgccagccgcatgcgggccggcacccgcaacatctactacctgtgcgcccccaaccgtcacctggcagagcactcaccctactatgaggccatgaagaagaaagacacagaggtgggtgagcggtgggtggggcgggctccgggggctgcaacctggggagggtcttgaccttctcagctctgtgctgggtgaacctgcccaagactccgggcagggctgcacagtgggtcagggtcacgggcacagaggccggaccgactgtgacggctgtttcccacttggaggtcacatgtggttttttttgtttgttttttgtttttttgagatggagtcttgctctctcgcccaggctagagtgcagtggtgcgatctcggctcactgcaacttccgcctcctgggttcaggtcattctcctgcctcagcctcctgagtagctgggactacaggtgcacaccaccacacccagcaaatttttgtatttttaatagagacggcatttcaccatgttggtctcgaactcctgacctcatgatctgcctgctttggcctcccaaagtgctgggattacaggcgtgagccactgcactcagccacatgtggatttctttatgcgtggagtgcttctgccttgaaggcagtcagagccttccttagacccaggtgtcgtagtaactgtcatgcaggcctaggaaccccaactgccccggtgttccccagtgtggcccgcttggctcccccagccctcctgccgccctcatcctttcttctgtggtggctggaggcccccggggtctgatggagctgctcttggccacctgcaggttctcttctgctttgagcagtttgatgagctcaccctgctgcaccttcgtgagtttgacaagaagaagctgatctctgtggagacggacatagtcgtggatcactacaaggaggagaagtttgaggacaggtccccagagacccaggaggagcgcgcacagctcctgcagcccacgctggagatcaaccccaggcacgcgctcatcaagaagctgaatcagctgcgcgcaagcgagcctggcctggctcagctgctggtggatcagatatacgagaacgccatgattgctgctggacttgttgacgaccctagggccatggtgggccgcttgaatgagctgcttgtcaaggccctggagcgacactgacagccagggggccagaaggactgacaccacagatgacagccccacctccttgagctttatttacctaaatttaaaggtatttcttaacccgagaactcccaggcatagtgcccctgcttcctctacctgccagaaggaaggctggaacttgggcctcgcttgtacaaatggcgagtgctgcctgctgtgtggctgccctcaggacgggctttggtgagggcagcacagccctggaggagcctggtctgacatggggcccgtctgggatcactgttgggccttcaaccgtctggagcctctatgtcttcctctgatagattcccagaacaatcatttcaccttctaagaagccatcctgcccctgcagcctgtggcttgtggagtctccagcactctcacttctccctcgtggatctcttttctgtctgtgtcagtcaatgctgccatgtaacagccacctgcaaactcagtgtatacacatgcatttctctcacactgccaggtctgctggggtggctctgctgcctgggcctcgtcctggggctgggctggagagactgcagctccctgggcaccctcttcccacagtgtggaaggtggaggctcccagggcacaagcagaaca

SEQ ID NO: 349349 - DNA, 2098 bp, Homo sapiens
cgccccttcccatcgtgtacggtcccgcgtggctgcgcgcggcgctctgggagtacgacatggcgcgcgagctgcgggcgctgctgctgtggggccgccgcctgcggcctttgctgcgggcgccggcgctggcggccgtgccgggaggaaaaccaattctgtgtcctcggaggaccacagcccagttgggccccaggcgaaacccagcctggagcttgcaggcaggacgactgttcagcacgcagaccgccgaggacaaggaggaacccctgcactcgattatcagcagcacagagagcgtgcagggttccacttccaaacatgagttccaggccgagacaaagaagcttttggacattgttgcccggtccctgtactcagaaaaagaggtgtttatacgggagctgatctccaatgccagcgatgccttggaaaaactgcgtcacaaactggtgtctgacggccaagcactgccagaaatggagattcacttgcagaccaatgccgagaaaggcaccatcaccatccaggatactggtatcgggatgacacaggaagagctggtgtccaacctggggacgattgccagatcggggtcaaaggccttcctggatgctctgcagaaccaggctgaggccagcagcaagatcatcggccagtttggagtgggtttctactcagctttcatggtggctgacagagtggaggtctattcccgctcggcagccccggggagcctgggttaccagtggctttcagatggttctggagtgtttgaaatcgccgaagcttcgggagttagaaccgggacaaaaatcatcatccacctgaaatccgactgcaaggagttttccagcgaggcccgggtgcgagatgtggtaacgaagtacagcaacttcgtcagcttccccttgtacttgaatggaaggcggatgaacaccttgcaggccatctggatgatggaccccaaggatgtccgtgagtggcaacatgaggagttctaccgctacgtcgcgcaggctcacgacaagccccgctacaccctgcactataagacggacgcaccgctcaacatccgcagcatcttctacgtgcccgacatgaaaccgtccatgtttgatgtgagccgggagctgggctccagcgttgcactgtacagccgcaaagtcctcatccagaccaaggccacggacatcctgcccaagtggctgcgcttcatccgaggtgtggtggacagtgaggacattcccctgaacctcagccgggagctgctgcaggagagcgcactcatcaggaaactccgggacgttttacagcagaggctgatcaaattcttcattgaccagagtaaaaaagatgctgagaagtatgcaaagttttttgaagattacggcctgttcatgcgggagggcattgtgaccgccaccgagcaggaggtcaaggaggacatagcaaagctgctgcgctacgagtcctcggcgctgccctccgggcagctaaccagcctctcagaatacgccagccgcatgcgggccggcacccgcaacatctactacctgtgcgcccccaaccgtcacctggcagagcactcaccctactatgaggccatgaagaagaaagacacagaggttctcttctgctttgagcagtttgatgagctcaccctgctgcaccttcgtgagtttgacaagaagaagctgatctctgtggagacggacatagtcgtggatcactacaaggaggagaagtttgaggacaggtccccaggactgacaccacagatgacagccccacctccttgagctttatttacctaaatttaaaggtatttcttaacccgattaacccgagtgtgtgttgggctttttttctgggtcctgtggcaggatgggtcctctcttcctgcagttcaactggtgtggggaggggctgctcacttcagcatcacctccactggatagtggtcactgatggcttgggcctgcaggcaagtgggcacagggtctgggctgagcctacctgagctcctgtgtcccatcctcatgtggctgtgcaagggaggacacataccagttggtcactcaggccataggcagcc

SEQ ID NO: 349350 - DNA, 2153 bp, Homo sapiens
ctacgctagaacaggcatggattaaatcggacgagggcagcacagagagcgtgcagggttccacttccaaacatgagttccaggccgagacaaagaagcttttggacattgttgcccggtccctgtactcagaaaaagaggtgtttatacgggagctgatctccaatgccagcgatgccttggaaaaactgcgtcacaaactggtgtctgacggccaagcactgccagaaatggagattcacttgcagaccaatgccgagaaaggcaccatcaccatccaggatactggtatcgggatgacacaggaagagctggtgtccaacctggggacgattgccagatcggggtcaaaggccttcctggatgctctgcagaaccaggctgaggccagcagcaagatcatcggccagtttggagtgggtttctactcagctttcatggtggctgacagagtggaggtctattcccgctcggcagccccggggagcctgggttaccagtggctttcagatggttctggagtgtttgaaatcgccgaagcttcgggagttagaaccgggacaaaaatcatcatccacctgaaatccgactgcaaggagttttccagcgaggcccgggtgcgagatgtggtaacgaagtacagcaacttcgtcagcttccccttgtacttgaatggaaggcggatgaacaccttgcaggccatctggatgatggaccccaaggatgtccgtgagtggcaacatgaggagttctaccgctacgtcgcgcaggctcacgacaagccccgctacaccctgcactataagacggacgcaccgctcaacatccgcagcatcttctacgtgcccgacatgaaaccgtccatgtttgatgtgagccgggagctgggctccagcgttgcactgtacagccgcaaagtcctcatccagaccaaggccacggacatcctgcccaagtggctgcgcttcatccgaggtgtggtggacagtgaggacattcccctgaacctcagccgggagctgctgcaggagagcgcactcatcaggaaactccgggacgttttacagcagaggctgatcaaattcttcattgaccagagtaaaaaagatgctgagaagtatgcaaagttttttgaagattacggcctgttcatgcgggagggcattgtgaccgccaccgagcaggaggtcaaggaggacatagcaaagctgctgcgctacgagtcctcggcgctgccctccgggcagctaaccagcctctcagaatacgccagccgcatgcgggccggcacccgcaacatctactacctgtgcgcccccaaccgtcacctggcagagcactcaccctactatgaggccatgaagaagaaagacacagaggttctcttctgctttgagcagtttgatgagctcaccctgctgcaccttcgtgagtttgacaagaagaagctgatctctgtggagacggacatagtcgtggatcactacaaggaggagaagtttgaggacaggtccccagccgccgagtgcctatcagagaaggagacggaggagctcatggcctggatgagaaatgtgctggggtcgcgtgtcaccaacgtgaaggtgaccctccgactggacacccaccctgccatggtcaccgtgctggagatgggggctgcccgccacttcctgcgcatgcagcagctggccaagacccaggaggagcgcgcacagctcctgcagcccacgctggagatcaaccccaggcacgcgctcatcaagaagctgaatcagctgcgcgcaagcgagcctggcctggctcagctgctggtggatcagatatacgagaacgccatgattgctgctggacttgttgacgaccctagggccatggtgggccgcttgaatgagctgcttgtcaaggccctggagcgacactgacagccagggggccagaaggactgacaccacagatgacagccccacctccttgagctttatttacctaaatttaaaggtatttcttaacccgaacaaaaaaaaaggggggcgcaaaattcctgggggccaggttaagggtccagcttctggtcaaagggcccaaggggcgaaaaagcagaccggcgggtaaaaggcgggggaaagctggattggagactactctgggga

SEQ ID NO: 349351 - DNA, 2049 bp, Homo sapiens
  misc_feature (30)..(31): n is a, c, g, or t
  misc_feature (33)..(33): n is a, c, g, or t
  misc_feature (35)..(35): n is a, c, g, or t
ggacgcgtgggtcgacccacgcgtccggannangnggtgtttatacgggagctgatctccaatgccagcgatgccttggaaaaactgcgtcacaaactggtgtctgacggccaagcactgccagaaatggagattcacttgcagaccaatgccgagaaaggcaccatcaccatccaggatactggtatcgggatgacacaggaagagctggtgtccaacctggggacgattgccagatcggggtcaaaggccttcctggatgctctgcagaaccaggctgaggccagcagcaagatcatcggccagtttggagtgggtttctactcagctttcatggtggctgacagagtggaggtctattcccgctcggcagccccggggagcctgggttaccagtggctttcagatggttctggagtgtttgaaatcgccgaagcttcgggagttagaaccgggacaaaaatcatcatccacctgaaatccgactgcaaggagttttccagcgaggcccgggtgcgagatgtggtaacgaagtacagcaacttcgtcagcttccccttgtacttgaatggaaggcggatgaacaccttgcaggccatctggatgatggaccccaaggatgtccgtgagtggcaacatgaggagttctaccgctacgtcgcgcaggctcacgacaagccccgctacaccctgcactataagacggacgcaccgctcaacatccgcagcatcttctacgtgcccgacatgaaaccgtccatgtttgatgtgagccgggagctgggctccagcgttgcactgtacagccgcaaagtcctcatccagaccaaggccacggacatcctgcccaagtggctgcgcttcatccgaggtgtggtggacagtgaggacattcccctgaacctcagccgggagctgctgcaggagagcgcactcatcaggaaactccgggacgttttacagcagaggctgatcaaattcttcattgaccagagtaaaaaagatgctgagaagtatgcaaagttttttgaagattacggcctgttcatgcgggagggcattgtgaccgccaccgagcaggaggtcaaggaggacatagcaaagctgctgcgctacgagtcctcggcgctgccctccgggcagctaaccagcctctcagaatacgccagccgcatgcgggccggcacccgcaacatctactacctgtgcgcccccaaccgtcacctggcagagcactcaccctactatgaggccatgaagaagaaagacacagaggttctcttctgctttgagcagtttgatgagctcaccctgctgcaccttcgtgagtttgacaagaagaagctgatctctgtggagacggacatagtcgtggatcactacaaggaggagaagtttgaggacaggtccccagccgccgagtgcctatcagagaaggagacggaggagctcatggcctggatgagaaatgtgctggggtcgcgtgtcaccaacgtgaaggtgaccctccgactggacacccaccctgccatggtcaccgtgctggagatgggggctgcccgccacttcctgcgcatgcagcagctggccaagacccaggaggagcgcgcacagctcctgcagcccacgctggagatcaaccccaggcacgcgctcatcaagaagctgaatcagctgcgcgcaagcgagcctggcctggctcagctgctggtggatcagatatacgagaacgccatgattgctgctggacttgttgacgaccctagggccatggtgggccgcttgaatgagctgcttgtcaaggccctggagcgacactgacagccagggggccagaaggactgacaccacagatgacagccccacctccttgagctttatttacctaaatttaaaggtatttcttaacccgaacaaaaaaaaaggggggcgcaaaattcctgggggccaggttaagggtccagcttctggtcaaagggcccaaggggcgaaaaagcagaccggcgggtaaaaggcgggggaaagctggattggagactactctgggga

SEQ ID NO: 349352 - DNA, 1830 bp, Homo sapiens
cgccccttcccatcgtgtacggtcccgcgtggctgcgcgcggcgctctgggagtacgacatggcgcgcgagctgcgggcgctgctgctgtggggccgccgcctgcggcctttgctgcgggcgccggcgctggcggccgtgccgggaggaaaaccaattctgtgtcctcggaggaccacagcccagttgggccccaggcgaaacccagcctggagcttgcaggcaggacgactgttcagcacgcagaccgccgaggacaaggaggaacccctgcactcgattatcagcagcacagagagcgtgcagggttccacttccaaacatgagttccaggccgagacaaagaagcttttggacattgttgcccggtccctgtactcagaaaaagaggtgtttatacgggagctgatctccaatgccagcgatgccttggaaaaactgcgtcacaaactggtgtctgacggccaagcactgccagaaatggagattcacttgcagaccaatgccgagaaaggcaccatcaccatccaggatactggtatcgggatgacacaggaagagctggtgtccaacctggggacgattgccagatcggggtcaaaggccttcctggatgctctgcagaaccaggctgaggccagcagcaagatcatcggccagtttggagtgggtttctactcagctttcatggtggctgacagagtggaggtctattcccgctcggcagccccggggagcctgggttaccagtggctttcagatggttctggagtgtttgaaatcgccgaagcttcgggagttagaaccgggacaaaaatcatcatccacctgaaatccgactgcaaggagttttccagcgaggcccgggtgcgagatgtggtaacgaagtacagcaacttcgtcagcttccccttgtacttgaatggaaggcggatgaacaccttgcaggccatctggatgatggaccccaaggatgtccgtgagtggcaacatgaggagttctaccgctacgtcgcgcaggctcacgacaagccccgctacaccctgcactataagacggacgcaccgctcaacatccgcagcatcttctacgtgcccgacatgatatacgagaacgccatgattgctgctggacttgttgacgaccctagggccatggtgggccgcttgaatgagctgcttgtcaaggccctggagcgacactgacagccagggggccagaaggactgacaccacagatgacagccccacctccttgagctttatttacctaaatttaaaggtatttcttaacccgagaactcccaggcatagtgcccctgcttcctctacctgccagaaggaaggctggaacttgggcctcgcttgtacaaatggcgagtgctgcctgctgtgtggctgccctcaggacgggctttggtgagggcagcacagccctggaggagcctggtctgacatggggcccgtctgggatcactgttgggccttcaaccgtctggagcctctatgtcttcctctgatagattcccagaacaatcatttcaccttctaagaagccatcctgcccctgcagcctgtggcttgtggagtctccagcactctcacttctccctcgtggatctcttttctgtctgtgtcagtcaatgctgccatgtaacagccacctgcaaactcagtgtatacacatgcatttctctcacactgccaggtctgctggggtggctctgctgcctgggcctcgtcctggggctgggctggagagactgcagctccctgggcaccctcttcccacagtgtggaaggtggaggctcccagggcacaagcagaaca

SEQ ID NO: 349353 - DNA, 1710 bp, Homo sapiens
cgctggagtcccatgcagggtatgtcccagtgtcacatccacctggcttttcctttctttgcctgccttagttctggagtgtttgaaatcgccgaagcttcgggagttagaaccgggacaaaaatcatcatccacctgaaatccgactgcaaggagttttccagcgaggcccgggtgcgagatgtggtaacgaagtacagcaacttcgtcagcttccccttgtacttgaatggaaggcggatgaacaccttgcaggccatctggatgatggaccccaaggatgtccgtgagtggcaacatgaggagttctaccgctacgtcgcgcaggctcacgacaagccccgctacaccctgcactataagacggacgcaccgctcaacatccgcagcatcttctacgtgcccgacatgaaaccgtccatgtttgatgtgagccgggagctgggctccagcgttgcactgtacagccgcaaagtcctcatccagaccaaggccacggacatcctgcccaagtggctgcgcttcatccgaggtgtggtggacagtgaggacattcccctgaacctcagccgggagctgctgcaggagagcgcactcatcaggaaactccgggacgttttacagcagaggctgatcaaattcttcattgaccagagtaaaaaagatgctgagaagtatgcaaagttttttgaagattacggcctgttcatgcgggagggcattgtgaccgccaccgagcaggaggtcaaggaggacatagcaaagctgctgcgctacgagtcctcggcgctgccctccgggcagctaaccagcctctcagaatacgccagccgcatgcgggccggcacccgcaacatctactacctgtgcgcccccaaccgtcacctggcagagcactcaccctactatgaggccatgaagaagaaagacacagaggttctcttctgctttgagcagtttgatgagctcaccctgctgcaccttcgtgagtttgacaagaagaagctgatctctgtggagacggacatagtcgtggatcactacaaggaggagaagtttgaggacaggtccccagccgccgagtgcctatcagagaaggagacggaggagctcatggcctggatgagaaatgtgctggggtcgcgtgtcaccaacgtgaaggtgaccctccgactggacacccaccctgccatggtcaccgtgctggagatgggggctgcccgccacttcctgcgcatgcagcagctggccaagacccaggaggagcgcgcacagctcctgcagcccacgctggagatcaaccccaggcacgcgctcatcaagaagctgaatcagctgcgcgcaagcgagcctggcctggctcagctgctggtggatcagatatacgagaacgccatgattgctgctggacttgttgacgaccctagggccatggtgggccgcttgaatgagctgcttgtcaaggccctggagcgacactgacagccagggggccagaaggactgacaccacagatgacagccccacctccttgagctttatttacctaaatttaaaggtatttcttaacccgaacaaaaaaaaaggggggcgcaaaattcctgggggccaggttaagggtccagcttctggtcaaagggcccaaggggcgaaaaagcagaccggcgggtaaaaggcgggggaaagctggattggagactactctgggga

SEQ ID NO: 349354 - DNA, 1947 bp, Homo sapiens
gattattgaaatacattgtaatttacctgcttaaaggaaagactaaatattaagaagaaaataaaaatatccctagtcccagtgataaagttgttcctaattttaggccattatgtaatgctgcagtaaatatcctgatccctaaaatcccaattttgaaaaattagagtatacatatattcagtataaatcccaaattacagtgtacatatatagtatatacagtgctgctcctaatgatggaaaattgttatgtacatgtagaatgtgcattctttgcctgtatctatagacgtactgtaatttacccacattgggatttttctgggttttctttcaacacagctaactttctcatgtcattgaggattattaaaagatgcagttttttttttttatggccatttagcattacataattttagcctatattcttgaacatgaggttgttcataattgttatattttatgtgccacagtgaaaatcctggtacataaatcttggtgtgctcacatgtttcctaaggtgcagttcctataattggaacaactggctcaaaggttggaagggttttccgggcgtgggtatcttgtctctgggggcatcggttctcctactgcctccagggggtgtctgccctccaccctgctgcctcctgtccggccactgcccagggtttctgtctttctgctcagtctttttcagtttggccaataacggtaccttgttgttttcacttctttgattcttagcggggctgaacattttttcgtaccctctggccatttgtatttcatagaggctgcttgtatgtattaaatgcatttcttttctgtaggaaactccgggacgttttacagcagaggctgatcaaattcttcattgaccagagtaaaaaagatgctgagaagtatgcaaagttttttgaagattacggcctgttcatgcgggagggcattgtgaccgccaccgagcaggaggtcaaggaggacatagcaaagctgctgcgctacgagtcctcggcgctgccctccgggcagctaaccagcctctcagaatacgccagccgcatgcgggccggcacccgcaacatctactacctgtgcgcccccaaccgtcacctggcagagcactcaccctactatgaggccatgaagaagaaagacacagaggttctcttctgctttgagcagtttgatgagctcaccctgctgcaccttcgtgagtttgacaagaagaagctgatctctgtggagacggacatagtcgtggatcactacaaggaggagaagtttgaggacaggtccccagccgccgagtgcctatcagagaaggagacggaggagctcatggcctggatgagaaatgtgctggggtcgcgtgtcaccaacgtgaaggtgaccctccgactggacacccaccctgccatggtcaccgtgctggagatgggggctgcccgccacttcctgcgcatgcagcagctggccaagacccaggaggagcgcgcacagctcctgcagcccacgctggagatcaaccccaggcacgcgctcatcaagaagctgaatcagctgcgcgcaagcgagcctggcctggctcagctgctggtggatcagatatacgagaacgccatgattgctgctggacttgttgacgaccctagggccatggtgggccgcttgaatgagctgcttgtcaaggccctggagcgacactgacagccagggggccagaaggactgacaccacagatgacagccccacctccttgagctttatttacctaaatttaaaggtatttcttaacccgaacaaaaaaaaaggggggcgcaaaattcctgggggccaggttaagggtccagcttctggtcaaagggcccaaggggcgaaaaagcagaccggcgggtaaaaggcgggggaaagctggattggagactactctgggga

SEQ ID NO: 349355 - DNA, 1605 bp, Homo sapiens
cagtatcacttctttgcacccatgaatgtgagctatttaggtctttaacatcctttggtaccttacattctctgtagggttctggtaccatttttaaagaattattctttgatgtgtcttatggggtattttaaaatttcattttctaacttgtatatgaactaacttgtatatgaagtttcttttttgggggaaattttgaatgtagcaattttttaaaaaatgaagttacataaacaagttaccaaaaatagaaaacagcaaaaaggaaatcaaaatccatagacttaccacccccccacaatgtagcctaagtagtattttaatttttgagatggagtcttgctctctcgcccaggctagagtgcagtggtgcgatctcggctcactgcaacttccgcctcctgggttcaggtcattctcctgcctcagcctcctgagtagctgggactacaggtgcacaccaccacacccagcaaatttttgtatttttaatagagacggcatttcaccatgttggtctcgaactcctgacctcatgatctgcctgctttggcctcccaaagtgctgggattacaggcgtgagccactgcactcagccacatgtggatttctttatgcgtggagtgcttctgccttgaaggcagtcagagccttccttagacccaggtgtcgtagtaactgtcatgcaggcctaggaaccccaactgccccggtgttccccagtgtggcccgcttggctcccccagccctcctgccgccctcatcctttcttctgtggtggctggaggcccccggggtctgatggagctgctcttggccacctgcaggttctcttctgctttgagcagtttgatgagctcaccctgctgcaccttcgtgagtttgacaagaagaagctgatctctgtggagacggacatagtcgtggatcactacaaggaggagaagtttgaggacaggtccccagccgccgagtgcctatcagagaaggagacggaggagctcatggcctggatgagaaatgtgctggggtcgcgtgtcaccaacgtgaaggtgaccctccgactggacacccaccctgccatggtcaccgtgctggagatgggggctgcccgccacttcctgcgcatgcagcagctggccaagacccaggaggagcgcgcacagctcctgcagcccacgctggagatcaaccccaggcacgcgctcatcaagaagctgaatcagctgcgcgcaagcgagcctggcctggctcagctgctggtggatcagatatacgagaacgccatgattgctgctggacttgttgacgaccctagggccatggtgggccgcttgaatgagctgcttgtcaaggccctggagcgacactgacagccagggggccagaaggactgacaccacagatgacagccccacctccttgagctttatttacctaaatttaaaggtatttcttaacccgaacaaaaaaaaaggggggcgcaaaattcctgggggccaggttaagggtccagcttctggtcaaagggcccaaggggcgaaaaagcagaccggcgggtaaaaggcgggggaaagctggattggagactactctgggga

SEQ ID NO: 349356 - DNA, 851 bp, Homo sapiens
tcgtcatagctgactctagaggatacaccttatgctctgacccaccctatgaggccatgaagaagaaagacacagaggttctcttctgctttgagcagtttgatgagctcaccctgctgcaccttcgtgagtttgacaagaagaagctgatctctgtggagacggacatagtcgtggatcactacaaggaggagaagtttgaggacaggtccccagccgccgagtgcctatcagagaaggagacggaggagctcatggcctggatgagaaatgtgctggggtcgcgtgtcaccaacgtgaaggtgaccctccgactggacacccaccctgccatggtcaccgtgctggagatgggggctgcccgccacttcctgcgcatgcagcagctggccaagacccaggaggagcgcgcacagctcctgcagcccacgctggagatcaaccccaggcacgcgctcatcaagaagctgaatcagctgcgcgcaagcgagcctggcctggctcagctgctggtggatcagatatacgagaacgccatgattgctgctggacttgttgacgaccctagggccatggtgggccgcttgaatgagctgcttgtcaaggccctggagcgacactgacagccagggggccagaaggactgacaccacagatgacagccccacctccttgagctttatttacctaaatttaaaggtatttcttaacccgaacaaaaaaaaaggggggcgcaaaattcctgggggccaggttaagggtccagcttctggtcaaagggcccaaggggcgaaaaagcagaccggcgggtaaaaggcgggggaaagctggattggagactactctgggga

SEQ ID NO: 349357 - DNA, 1018 bp, Homo sapiens
gaggaaaatgaagaacagagttttaaagtagaagtgtcctacatggaaatttataatgaaaaagttcgagaccttcttgatcccaaaggaagccgtcagacgttgaaagtcagagagcatagtgtgttgggaccttatgtcgacggactttctaaactggctgtcacaagctacaaggatattgagtcgttgatgtctgagggtaacaaatctcgcacagttgctgcaaccaacatgaacgaggagagtagccgatcccatgcagttttcaaaatcaccctcacacatactctctacgatgtgaaagaagaagctgatctctgtggagacggacatagtcgtggatcactacaaggaggagaagtttgaggacaggtccccagccgccgagtgcctatcagagaaggagacggaggagctcatggcctggatgagaaatgtgctggggtcgcgtgtcaccaacgtgaaggtgaccctccgactggacacccaccctgccatggtcaccgtgctggagatgggggctgcccgccacttcctgcgcatgcagcagctggccaagacccaggaggagcgcgcacagctcctgcagcccacgctggagatcaaccccaggcacgcgctcatcaagaagctgaatcagctgcgcgcaagcgagcctggcctggctcagctgctggtggatcagatatacgagaacgccatgattgctgctggacttgttgacgaccctagggccatggtgggccgcttgaatgagctgcttgtcaaggccctggagcgacactgacagccagggggccagaaggactgacaccacagatgacagccccacctccttgagctttatttacctaaatttaaaggtatttcttaacccgaacaaaaaaaaaggggggcgcaaaattcctgggggccaggttaagggtccagcttctggtcaaagggcccaaggggcgaaaaagcagaccggcgggtaaaaggcgggggaaagctggattggagactactctgggga

SEQ ID NO: 349358 - DNA, 342 bp, Homo sapiens
aataatagcccatttagaattgtccccataatatatgcaaaggaggaattttatacttttttaatgtgtgtttctcatgtgtgtatgtatatgcacacaaaatctagatacttcttttagcagaaattctccttagttggttgatgtgaaataaaggatattttcctaaatcacatttataactgaaggtttggaaaacgttgtctgtatatgtttgtattttttcagtgattagacactgatataaatgctataggggtagggggaagaaaggataggagatttattttttatttgtttgactgtgtggattaatgctgctgtaaatttatattcactaac

SEQ ID NO: 349359 - DNA, 595 bp, Homo sapiens
agacctcctcattataacctgaatggggggacaaccagtaagctacccttttaccatctttggacaagtagcatccgtactatacttcacaaaaatcctaatcctaataccaactatctccctaattgaaaacaaaattctcaaatgggcctaaaaaaaaaaaaaaaaaaaaaaaaaaaacaataaaaaaaaaaaactcgctcaggcagaagtggagacctttctagacatcattgtcagccttgctacttgaaggtacaccccatagggtcggaggtgctgtccccactgccccacgttgtccctgagatttaacccctccactgctgggggtgagctgtactcttctgactgccccctcctgtgtaacgactacaaaataaaacttggttctgaatatttttaaatttaaaccccgagttgttgaccgccttaatctcgtgtccatagagcaaaacgtctgctcagatggatgcgaggcacagcgtccgcccacgctgctgtttttaatccatctcagtagagttgaacccattcgtggtattacagccatttctcggggaatgtgtttgtttataactcactaatgcttaca

SEQ ID NO: 349360 - DNA, 344 bp, Homo sapiens
tgcctgccagctgtgtgagatgaaaaagcttgccagccatcttctcagatgccctcacagtacaaagaaggaagatatttttttgtctgttttccacagggagtgcctggcaacattggtgctcccggacccaaaggagcaaaaggagattccagaacaatcacaaccaaaggtgagcggggacagcccggcgtcccaggtgtgcccgggatgaaaggtgacgatggcagcccaggccgcgatgggctcgatggattccccggcctcccaggccctcccgtgagtagccacaaactgcggcagctccgtcctctcttcttcatccttcaggttctccaaacacc

SEQ ID NO: 349361 - DNA, 6263 bp, Homo sapiens
  misc_feature (1383)..(1383): n is a, c, g, or t
  misc_feature (1776)..(1776): n is a, c, g, or t
gagtgtggctgcagtgcgccgggacaccagggctccgcgctccgcactcaagaggctcccgcgtcccaacccctcgcgcccgcgcgttcgcggatccaggccgaggaccgaaaggggccgcccgagcccccggggccggcgcccagagagcccagcaaggccggccgccctgccggtgtgccgccggcgggtgcttctggaagggccaatgcgttcgggcagcagccctgaagccgagcccgaggctaagtgggactgaccggggcccagagtggacgaaccgccagcatggggagagaccagcgcgcggtggccggccctgccctacggcggtggctgctgctggggacagtgaccgtggggttcctcgcccagagcgtcttggcgggtgtgaagaagtttgatgtgccgtgtggaggaagagattgcagtgggggctgccagtgctaccctgagaaaggtggacgtggtcagcctgggccagtgggcccccaggggtacaatgggccaccaggattacaaggattcccgggactgcagggacgtaaaggagacaagggtgaaaggggagcccccggagtaacaggacccaagggcgacgtgggagcaagaggcgtttctggattccctggtgccgatggaattcctggacacccggggcaaggtgggcccaggggaaggccgggctacgatggctgcaacggaacccagggagactcaggtccacaggggccccccggctctgaggggttcaccgggcctcccgggccccaaggaccaaaagggcagaaaggtgagccttatgcactgcctaaagaggagcgcgacagatatcggggtgaacctggagagcctggattggtcggtttccagggacctcccggccgccctgggcatgtgggacagatgggtccagttggagctccagggagaccaggaccacctggaccccctggaccaaaaggacagcaaggcaacagaggacttggtttctacggagttaagggtgaaaagggtgacgtagggcagccgggacccaacgggattccatcagacaccctccaccccatcatcgcgcccacaggagtcaccttccacccagatcagtacaagggtgaaaaaggcagtgagggggaaccaggaataagaggcatttccttgaagggagaagaaggaatcatgggctttcctggactgaggggttaccctggcttgagtggtgaaaaaggatcaccaggacagaagggaagccgaggcctggatggctatcaagggcctgatggaccccggggacccaagggagaagccggagacccagggccccctggactacctgcctactcccctcacccttccctagcaaaaggtgccagaggtgacccnggattcccaggggcccaaggggagccaggaagccagggtgagccaggagacccgggcctcccaggtccccctggcctctccatcggagatggagatcagaggagaggcctgccgggtgagatgggacccaagggcttcatcggagaccccggcatccctgcgctctacgggggcccacctggacctgatggaaagcgagggcctccaggaccccccgggctccctggaccacctggacctgatggcttcctgtttgggctgaaaggagcaaaaggaagagcaggcttccctgggcttcccggctcccctggagcccgcggaccaaaggggtggaaaggtgacgctggggaatgcagatgtacagaaggcgacgaagctatcaaaggtcttccnggactgccaggacccaagggcttcgcaggcatcaacggggagccggggaggaaaggggacagaggagaccccggccaacacggcctccctgggttcccagggctcaagggagtgcctggcaacattggtgctcccggacccaaaggagcaaaaggagattccagaacaatcacaaccaaaggtgagcggggacagcccggcgtcccaggtgtgcccgggatgaaaggtgacgatggcagcccaggccgcgatgggctcgatggattccccggcctcccaggccctcccggtgatggcatcaagggccctccaggggacccaggctatccaggaatacctggaacgaagggtactccaggagaaatgggccccccaggactgggccttcccggcctcaaaggccaacgtggtttccctggagacgccggcttacctggaccaccaggcttcctgggccctcctggccccgcagggaccccaggacaaatagattgtgacacagatgtgaaaagggccgttggaggtgacagacaggaggccatccagccaggttgcataggagggcccaagggattgccaggcctgccaggacccccaggccccacaggtgccaaaggcctccgaggaatcccaggcttcgcaggagctgatggaggaccagggtccaggggcttgccaggagacgcaggtcgtgaagggttcccaggacccccagggttcataggaccccgaggatccaaaggtgcagtgggcctccctggcccagatggatccccaggtcccatcggcctgccagggccagatgggccccctggggaaaggggcctccctggagaagtcctgggagctcagcccgggccacggggagatgctggtgtgcctggacagcctgggcttaaaggccttcccggagacagaggcccccctggattcagaggaagccaagggatgcctgggatgccagggctgaagggccagccaggcctcccaggaccttccggccagccaggcctgtatgggcctccaggactgcatggattcccaggagctcctggccaagaggggcccttggggctgccaggaatcccaggccgtgaaggtctgcctggtgatagaggggaccctggggacacaggcgctcctggccctgtgggcatgaaaggtctctctggtgacagaggagatgctggcttcacaggggagcaaggccatccaggaagccctggatttaaaggaattgatggaatgcctgggacccccgggctaaaaggagatagaggctcacctgggatggatggtttccaaggcatgcctggactcaaagggagacccgggtttccagggagcaaaggcgaggctggatttttcggaatacccggtctgaagggtctggctggtgagccaggttttaaaggcagccgaggggaccctgggcccccaggaccacctcctgtcatcctgccaggaatgaaagacattaaaggagagaaaggagatgaagggcctatggggctgaaaggatacctgggcgcaaaaggtatccaaggaatgccaggcatcccagggctgtcaggaatccctgggctgcctgggaggcccggccacatcaaaggagtcaagggagacatcggagtccccggcatccccggtttgccaggattccctggggtggctggcccccctggaattacgggattcccaggattcataggaagccggggtgacaaaggtgccccagggagagcaggcctgtatggcgagattggcgcgactggtgatttcggtgacatcggggacactataaatttaccaggaagaccaggcctgaagggggagcggggcaccactggaataccaggtctgaagggattctttggagagaagggaacagaaggtgacatcggcttccctgggataacaggcgtgactggagtccaaggccctcctggacttaaaggacaaacaggctttccagggctgactgggcctccagggtcgcagggagagctggggcggattggactgcctggtggcaaaggagatgatggctggccgggagctccgggcttaccaggttttccgggactccgtgggatccgcggcttacacggcttgccaggcaccaagggctttccaggatccccaggttctgacatccacggagacccaggcttcccaggccctcctggggaaagaggtgacccaggagaggccaacacccttccaggccctgtgggagtcccaggacagaaaggagaccaaggagctccaggggaacgaggcccacctgggagcccaggacttcaggggttcccaggcatcacacccccttccaacatctctggggcacctggtgacaaaggggcgccagggatatttggcctgaaaggttatcggggcccaccagggccaccaggttctgctgctcttcctggaagcaaaggtgacacagggaacccaggagctccaggaaccccagggaccaaaggatgggccggggactccgggccccagggcaggcctggtgtgtttggtctcccaggagaaaaagggcccaggggtgaacaaggcttcatggggaacactggacccaccggggcggtgggcgacagaggccccaagggacccaagggagacccaggattccctggtgcccccgggactgtgggagcccccgggattgcaggaatcccccagaagattgccgtccaaccagggacagtgggtccccaggggaggcgaggcccccctggggcaccgggggagatggggccccagggcccccccggagaaccaggttttcgtggggctccagggaaagctgggccccaaggaagaggtggtgtgtctgctgttcccggcttccggggagatgaaggacccataggccaccaggggccgattggccaagaaggtgcaccaggccgtccagggagcccgggcctgccgggtatgccaggccgcagcgtcagcatcggctacctcctggtgaagcacagccagacggaccaggagcccatgtgcccggtgggcatgaacaaactctggagtggatacagcctgctgtacttcgagggccaggagaaggcgcacaaccaggacctggggctggcgggctcctgcctggcgcggttcagcaccatgcccttcctgtactgcaaccctggtgatgtctgctactatgccagccggaacgacaagtcctactggctctctaccactgcgccgctgcccatgatgcccgtggccgaggacgagatcaagccctacatcagccgctgttctgtgtgtgaggccccggccatcgccatcgcggtccacagtcaggatgtctccatcccacactgcccagctgggtggcggagtttgtggatcggatattccttcctcatgcacacggcggcgggagacgaaggcggtggccaatcactggtgtcaccgggcagctgtctagaggacttccgcgccacaccattcatcgaatgcaatggaggccgcggcacctgccactactacgccaacaagtacagcttctggctgaccaccattcccgagcagagcttccagggctcgccctccgccgacacgctcaaggccggcctcatccgcacacacatcagccgctgccaggtgtgcatgaagaacctgtgagccggcgcgtgccaggaagggccattttggtgcttattcttaacttattacctcaggtgccaacccaaaaattggttttatttttttcttaaaaaaaaaaaagtctaccaaaggaatttgcatccagcagcagcacttagacctgccagccactgtcaccgagcgggtgcaagcactcggggtccctggagggcaagccctgcccacagaaagccaggagcagccctggcccccatcagccctgctagacgcaccgcctgaaggcacagctaaccacttcgcacacacccatgtaaccactgcactttccaatgccacagacaactcacattgttcaactcccttctcggggtgggacagacgagacaacagcacacaggcagccagccgtggccagaggctcgaggggctcaggggctcaggcacccgtccccacacgagggccccgtgggtgggcctggccctgctttctacgccaatgttatgccagctccatgttctcccaaataccgttgatgtgaattattttaaaggcaaaaccgtgctctttattttaaaaaacactgataatcacactgcggtaggtcattcttttgccacatccctatagaccactgggtttggcaaaactcaggcagaagtggagacctttctagacatcattgtcagccttgctacttgaaggtacaccccatagggtcggaggtgctgtccccactgccccacgttgtccctgagatttaacccctccactgctgggggtgagctgtactcttctgactgccccctcctgtgtaacgactacaaaataaaacttggttctgaatatttttaaa

SEQ ID NO: 349362 - DNA, 6814 bp, Homo sapiens
  misc_feature (1383)..(1383): n is a, c, g, or t
  misc_feature (1776)..(1776): n is a, c, g, or t
  misc_feature (6273)..(6273): n is a, c, g, or t
  misc_feature (6281)..(6281): n is a, c, g, or t
  misc_feature (6283)..(6283): n is a, c, g, or t
  misc_feature (6288)..(6288): n is a, c, g, or t
  misc_feature (6305)..(6305): n is a, c, g, or t
gagtgtggctgcagtgcgccgggacaccagggctccgcgctccgcactcaagaggctcccgcgtcccaacccctcgcgcccgcgcgttcgcggatccaggccgaggaccgaaaggggccgcccgagcccccggggccggcgcccagagagcccagcaaggccggccgccctgccggtgtgccgccggcgggtgcttctggaagggccaatgcgttcgggcagcagccctgaagccgagcccgaggctaagtgggactgaccggggcccagagtggacgaaccgccagcatggggagagaccagcgcgcggtggccggccctgccctacggcggtggctgctgctggggacagtgaccgtggggttcctcgcccagagcgtcttggcgggtgtgaagaagtttgatgtgccgtgtggaggaagagattgcagtgggggctgccagtgctaccctgagaaaggtggacgtggtcagcctgggccagtgggcccccaggggtacaatgggccaccaggattacaaggattcccgggactgcagggacgtaaaggagacaagggtgaaaggggagcccccggagtaacaggacccaagggcgacgtgggagcaagaggcgtttctggattccctggtgccgatggaattcctggacacccggggcaaggtgggcccaggggaaggccgggctacgatggctgcaacggaacccagggagactcaggtccacaggggccccccggctctgaggggttcaccgggcctcccgggccccaaggaccaaaagggcagaaaggtgagccttatgcactgcctaaagaggagcgcgacagatatcggggtgaacctggagagcctggattggtcggtttccagggacctcccggccgccctgggcatgtgggacagatgggtccagttggagctccagggagaccaggaccacctggaccccctggaccaaaaggacagcaaggcaacagaggacttggtttctacggagttaagggtgaaaagggtgacgtagggcagccgggacccaacgggattccatcagacaccctccaccccatcatcgcgcccacaggagtcaccttccacccagatcagtacaagggtgaaaaaggcagtgagggggaaccaggaataagaggcatttccttgaagggagaagaaggaatcatgggctttcctggactgaggggttaccctggcttgagtggtgaaaaaggatcaccaggacagaagggaagccgaggcctggatggctatcaagggcctgatggaccccggggacccaagggagaagccggagacccagggccccctggactacctgcctactcccctcacccttccctagcaaaaggtgccagaggtgacccnggattcccaggggcccaaggggagccaggaagccagggtgagccaggagacccgggcctcccaggtccccctggcctctccatcggagatggagatcagaggagaggcctgccgggtgagatgggacccaagggcttcatcggagaccccggcatccctgcgctctacgggggcccacctggacctgatggaaagcgagggcctccaggaccccccgggctccctggaccacctggacctgatggcttcctgtttgggctgaaaggagcaaaaggaagagcaggcttccctgggcttcccggctcccctggagcccgcggaccaaaggggtggaaaggtgacgctggggaatgcagatgtacagaaggcgacgaagctatcaaaggtcttccnggactgccaggacccaagggcttcgcaggcatcaacggggagccggggaggaaaggggacagaggagaccccggccaacacggcctccctgggttcccagggctcaagggagtgcctggcaacattggtgctcccggacccaaaggagcaaaaggagattccagaacaatcacaaccaaaggtgagcggggacagcccggcgtcccaggtgtgcccgggatgaaaggtgacgatggcagcccaggccgcgatgggctcgatggattccccggcctcccaggccctcccggtgatggcatcaagggccctccaggggacccaggctatccaggaatacctggaacgaagggtactccaggagaaatgggccccccaggactgggccttcccggcctcaaaggccaacgtggtttccctggagacgccggcttacctggaccaccaggcttcctgggccctcctggccccgcagggaccccaggacaaatagattgtgacacagatgtgaaaagggccgttggaggtgacagacaggaggccatccagccaggttgcataggagggcccaagggattgccaggcctgccaggacccccaggccccacaggtgccaaaggcctccgaggaatcccaggcttcgcaggagctgatggaggaccagggtccaggggcttgccaggagacgcaggtcgtgaagggttcccaggacccccagggttcataggaccccgaggatccaaaggtgcagtgggcctccctggcccagatggatccccaggtcccatcggcctgccagggccagatgggccccctggggaaaggggcctccctggagaagtcctgggagctcagcccgggccacggggagatgctggtgtgcctggacagcctgggcttaaaggccttcccggagacagaggcccccctggattcagaggaagccaagggatgcctgggatgccagggctgaagggccagccaggcctcccaggaccttccggccagccaggcctgtatgggcctccaggactgcatggattcccaggagctcctggccaagaggggcccttggggctgccaggaatcccaggccgtgaaggtctgcctggtgatagaggggaccctggggacacaggcgctcctggccctgtgggcatgaaaggtctctctggtgacagaggagatgctggcttcacaggggagcaaggccatccaggaagccctggatttaaaggaattgatggaatgcctgggacccccgggctaaaaggagatagaggctcacctgggatggatggtttccaaggcatgcctggactcaaagggagacccgggtttccagggagcaaaggcgaggctggatttttcggaatacccggtctgaagggtctggctggtgagccaggttttaaaggcagccgaggggaccctgggcccccaggaccacctcctgtcatcctgccaggaatgaaagacattaaaggagagaaaggagatgaagggcctatggggctgaaaggatacctgggcgcaaaaggtatccaaggaatgccaggcatcccagggctgtcaggaatccctgggctgcctgggaggcccggccacatcaaaggagtcaagggagacatcggagtccccggcatccccggtttgccaggattccctggggtggctggcccccctggaattacgggattcccaggattcataggaagccggggtgacaaaggtgccccagggagagcaggcctgtatggcgagattggcgcgactggtgatttcggtgacatcggggacactataaatttaccaggaagaccaggcctgaagggggagcggggcaccactggaataccaggtctgaagggattctttggagagaagggaacagaaggtgacatcggcttccctgggataacaggcgtgactggagtccaaggccctcctggacttaaaggacaaacaggctttccagggctgactgggcctccagggtcgcagggagagctggggcggattggactgcctggtggcaaaggagatgatggctggccgggagctccgggcttaccaggttttccgggactccgtgggatccgcggcttacacggcttgccaggcaccaagggctttccaggatccccaggttctgacatccacggagacccaggcttcccaggccctcctggggaaagaggtgacccaggagaggccaacacccttccaggccctgtgggagtcccaggacagaaaggagaccaaggagctccaggggaacgaggcccacctgggagcccaggacttcaggggttcccaggcatcacacccccttccaacatctctggggcacctggtgacaaaggggcgccagggatatttggcctgaaaggttatcggggcccaccagggccaccaggttctgctgctcttcctggaagcaaaggtgacacagggaacccaggagctccaggaaccccagggaccaaaggatgggccggggactccgggccccagggcaggcctggtgtgtttggtctcccaggagaaaaagggcccaggggtgaacaaggcttcatggggaacactggacccaccggggcggtgggcgacagaggccccaagggacccaagggagacccaggattccctggtgcccccgggactgtgggagcccccgggattgcaggaatcccccagaagattgccgtccaaccagggacagtgggtccccaggggaggcgaggcccccctggggcaccgggggagatggggccccagggcccccccggagaaccaggttttcgtggggctccagggaaagctgggccccaaggaagaggtggtgtgtctgctgttcccggcttccggggagatgaaggacccataggccaccaggggccgattggccaagaaggtgcaccaggccgtccagggagcccgggcctgccgggtatgccaggccgcagcgtcagcatcggctacctcctggtgaagcacagccagacggaccaggagcccatgtgcccggtgggcatgaacaaactctggagtggatacagcctgctgtacttcgagggccaggagaaggcgcacaaccaggacctggggctggcgggctcctgcctggcgcggttcagcaccatgcccttcctgtactgcaaccctggtgatgtctgctactatgccagccggaacgacaagtcctactggctctctaccactgcgccgctgcccatgatgcccgtggccgaggacgagatcaagccctacatcagccgctgttctgtgtgtgaggccccggccatcgccatcgcggtccacagtcaggatgtctccatcccacactgcccagctgggtggcggagtttgtggatcggatattccttcctcatgcacacggcggcgggagacgaaggcggtggccaatcactggtgtcaccgggcagctgtctagaggacttccgcgccacaccattcatcgaatgcaatggaggccgcggcacctgccactactacgccaacaagtacagcttctggctgaccaccattcccgagcagagcttccagggctcgccctccgccgacacgctcaaggccggcctcatccgcacacacatcagccgctgccaggtgtgcatgaagaacctgtgagccggcgcgtgccaggaagggccattttggtgcttattcttaacttattacctcaggtgccaacccaaaaattggttttatttttttcttaaaaaaaaaaaagtctaccaaaggaatttgcatccagcagcagcacttagacctgccagccactgtcaccgagcgggtgcaagcactcggggtccctggagggcaagccctgcccacagaaagccaggagcagccctggcccccatcagccctgctagacgcaccgcctgaaggcacagctaaccacttcgcacacacccatgtaaccactgcactttccaatgccacagacaactcacattgttcaactcccttctcggggtgggacagacgagacaacagcacacaggcagccagccgtggccagaggctcgaggggctcaggggctcaggcacccgtccccacacgagggccccgtgggtgggcctggccctgctttctacgccaatgttatgccagctccatgttctcccaaataccgttgatgtgaattattttaaaggcaaaaccgtgctctttattttaaaaaacactgataatcacactgcggtaggtcattcttttgccacatccctatagaccactgggtttggcaaaactcaggcagaagtggagacctttctagacatcattgtcagccttgctacttgaaggtacaccccatagggtcggaggtgctgtccccactgccccacgttgtccctgagatttaacccctccactgctgggggtgagctgtactcttctgactgccccctcctgtgtaacgactacaaaataaaacttggttctgaatatttttaaaaaaaaaaaanaaaaaaananaaaanaaaaaaaaaaaaaaaanaaaaaaaaaaaaaaagaaaaaaaaaaaaaaaaaaaaaaaaataaaaaaaaaaaaaaaaaaaaaaaaaaaaacattttggcccccttggcccaagccatttttaaactggacaagttttatcctggggcccaaattcggggctaattggccaaattccccttaagggggggggtttaaaattaaagggcccggtttttaaaaaggttgaacctgggaaaaccctgggggtccccaacttaaaccctttggaagaaaatccctttttgccaagtggggtaaaaaccaaaaggccctacccgaatggcctttcaaaaaatttgccacccctaaagggcaatggaaatttgaagggtaaaatttttgttaaaaatccgggtaaatttttggaaaaccacttattttttaccaaagggcccaaatcggaaaaccccttataaataaaagaattcccgcaaagggtttagggttgtccaatttgaaacaggtcccttttacgggcccccgtgggg

SEQ ID NO: 349363 - DNA, 1573 bp, Homo sapiens
gggaaacctgcttagctgcagcattcgttgtggccaggagataaaggctatcttagtctccagaagcaataaagctacatggaagggagaagggccaggactccttctggggtggctccttggggtcaaagagcgaccccttggaggccatcagagttttcttggggccagtgctgttaagaccccactaagggctggcgggctcctgcctggcgcggttcagcaccatgcccttcctgtactgcaaccctggtgatgtctgctactatgccagccggaacgacaagtcctactggctctctaccactgcgccgctgcccatgatgcccgtggccgaggacgagatcaagccctacatcagccgctgttctgtgtgtgaggccccggccatcgccatcgcggtccacagtcaggatgtctccatcccacactgcccagctgggtggcggagtttgtggatcggatattccttcctcatgcacacggcggcgggagacgaaggcggtggccaatcactggtgtcaccgggcagctgtctagaggacttccgcgccacaccattcatcgaatgcaatggaggccgcggcacctgccactactacgccaacaagtacagcttctggctgaccaccattcccgagcagagcttccagggctcgccctccgccgacacgctcaaggccggcctcatccgcacacacatcagccgctgccaggtgtgcatgaagaacctgtgagccggcgcgtgccaggaagggccattttggtgcttattcttaacttattacctcaggtgccaacccaaaaattggttttatttttttcttaaaaaaaaaaaagtctaccaaaggaatttgcatccagcagcagcacttagacctgccagccactgtcaccgagcgggtgcaagcactcggggtccctggagggcaagccctgcccacagaaagccaggagcagccctggcccccatcagccctgctagacgcaccgcctgaaggcacagctaaccacttcgcacacacccatgtaaccactgcactttccaatgccacagacaactcacattgttcaactcccttctcggggtgggacagacgagacaacagcacacaggcagccagccgtggccagaggctcgaggggctcaggggctcaggcacccgtccccacacgagggccccgtgggtgggcctggccctgctttctacgccaatgttatgccagctccatgttctcccaaataccgttgatgtgaattattttaaaggcaaaaccgtgctctttattttaaaaaacactgataatcacactgcggtaggtcattcttttgccacatccctatagaccactgggtttggcaaaactcaggcagaagtggagacctttctagacatcattgtcagccttgctacttgaaggtacaccccatagggtcggaggtgctgtccccactgccccacgttgtccctgagatttaacccctccactgctgggggtgagctgtactcttctgactgccccctcctgtgtaacgactacaaaataaaacttggttctgaatatttttaaa

SEQ ID NO: 349364 - DNA, 1160 bp, Homo sapiens
gatgtatctagaggatcccacagccgatgggttcggattttgtggatcggatattccttcctcatgcacacggcggcgggagacgaaggcggtggccaatcactggtgtcaccgggcagctgtctagaggacttccgcgccacaccattcatcgaatgcaatggaggccgcggcacctgccactactacgccaacaagtacagcttctggctgaccaccattcccgagcagagcttccagggctcgccctccgccgacacgctcaaggccggcctcatccgcacacacatcagccgctgccaggtgtgcatgaagaacctgtgagccggcgcgtgccaggaagggccattttggtgcttattcttaacttattacctcaggtgccaacccaaaaattggttttatttttttcttaaaaaaaaaaaagtctaccaaaggaatttgcatccagcagcagcacttagacctgccagccactgtcaccgagcgggtgcaagcactcggggtccctggagggcaagccctgcccacagaaagccaggagcagccctggcccccatcagccctgctagacgcaccgcctgaaggcacagctaaccacttcgcacacacccatgtaaccactgcactttccaatgccacagacaactcacattgttcaactcccttctcggggtgggacagacgagacaacagcacacaggcagccagccgtggccagaggctcgaggggctcaggggctcaggcacccgtccccacacgagggccccgtgggtgggcctggccctgctttctacgccaatgttatgccagctccatgttctcccaaataccgttgatgtgaattattttaaaggcaaaaccgtgctctttattttaaaaaacactgataatcacactgcggtaggtcattcttttgccacatccctatagaccactgggtttggcaaaactcaggcagaagtggagacctttctagacatcattgtcagccttgctacttgaaggtacaccccatagggtcggaggtgctgtccccactgccccacgttgtccctgagatttaacccctccactgctgggggtgagctgtactcttctgactgccccctcctgtgtaacgactacaaaataaaacttggttctgaatatttttaaa

SEQ ID NO: 349365 - DNA, 977 bp, Homo sapiens
gcactcggggtccctggagggcaagccctgaccaccattcccgagcagagcttccagggctcgccctccgccgacacgctcaaggccggcctcatccgcacacacatcagccgctgccaggtgtgcatgaagaacctgtgagccggcgcgtgccaggaagggccattttggtgcttattcttaacttattacctcaggtgccaacccaaaaattggttttatttttttcttaaaaaaaaaaaagtctaccaaaggaatttgcatccagcagcagcacttagacctgccagccactgtcaccgagcgggtgcaagcactcggggtccctggagggcaagccctgcccacagaaagccaggagcagccctggcccccatcagccctgctagacgcaccgcctgaaggcacagctaaccacttcgcacacacccatgtaaccactgcactttccaatgccacagacaactcacattgttcaactcccttctcggggtgggacagacgagacaacagcacacaggcagccagccgtggccagaggctcgaggggctcaggggctcaggcacccgtccccacacgagggccccgtgggtgggcctggccctgctttctacgccaatgttatgccagctccatgttctcccaaataccgttgatgtgaattattttaaaggcaaaaccgtgctctttattttaaaaaacactgataatcacactgcggtaggtcattcttttgccacatccctatagaccactgggtttggcaaaactcaggcagaagtggagacctttctagacatcattgtcagccttgctacttgaaggtacaccccatagggtcggaggtgctgtccccactgccccacgttgtccctgagatttaacccctccactgctgggggtgagctgtactcttctgactgccccctcctgtgtaacgactacaaaataaaacttggttctgaatatttttaaa

SEQ ID NO: 349366 - DNA, 6233 bp, Homo sapiens
  misc_feature (1383)..(1383): n is a, c, g, or t
  misc_feature (1776)..(1776): n is a, c, g, or t
gagtgtggctgcagtgcgccgggacaccagggctccgcgctccgcactcaagaggctcccgcgtcccaacccctcgcgcccgcgcgttcgcggatccaggccgaggaccgaaaggggccgcccgagcccccggggccggcgcccagagagcccagcaaggccggccgccctgccggtgtgccgccggcgggtgcttctggaagggccaatgcgttcgggcagcagccctgaagccgagcccgaggctaagtgggactgaccggggcccagagtggacgaaccgccagcatggggagagaccagcgcgcggtggccggccctgccctacggcggtggctgctgctggggacagtgaccgtggggttcctcgcccagagcgtcttggcgggtgtgaagaagtttgatgtgccgtgtggaggaagagattgcagtgggggctgccagtgctaccctgagaaaggtggacgtggtcagcctgggccagtgggcccccaggggtacaatgggccaccaggattacaaggattcccgggactgcagggacgtaaaggagacaagggtgaaaggggagcccccggagtaacaggacccaagggcgacgtgggagcaagaggcgtttctggattccctggtgccgatggaattcctggacacccggggcaaggtgggcccaggggaaggccgggctacgatggctgcaacggaacccagggagactcaggtccacaggggccccccggctctgaggggttcaccgggcctcccgggccccaaggaccaaaagggcagaaaggtgagccttatgcactgcctaaagaggagcgcgacagatatcggggtgaacctggagagcctggattggtcggtttccagggacctcccggccgccctgggcatgtgggacagatgggtccagttggagctccagggagaccaggaccacctggaccccctggaccaaaaggacagcaaggcaacagaggacttggtttctacggagttaagggtgaaaagggtgacgtagggcagccgggacccaacgggattccatcagacaccctccaccccatcatcgcgcccacaggagtcaccttccacccagatcagtacaagggtgaaaaaggcagtgagggggaaccaggaataagaggcatttccttgaagggagaagaaggaatcatgggctttcctggactgaggggttaccctggcttgagtggtgaaaaaggatcaccaggacagaagggaagccgaggcctggatggctatcaagggcctgatggaccccggggacccaagggagaagccggagacccagggccccctggactacctgcctactcccctcacccttccctagcaaaaggtgccagaggtgacccnggattcccaggggcccaaggggagccaggaagccagggtgagccaggagacccgggcctcccaggtccccctggcctctccatcggagatggagatcagaggagaggcctgccgggtgagatgggacccaagggcttcatcggagaccccggcatccctgcgctctacgggggcccacctggacctgatggaaagcgagggcctccaggaccccccgggctccctggaccacctggacctgatggcttcctgtttgggctgaaaggagcaaaaggaagagcaggcttccctgggcttcccggctcccctggagcccgcggaccaaaggggtggaaaggtgacgctggggaatgcagatgtacagaaggcgacgaagctatcaaaggtcttccnggactgccaggacccaagggcttcgcaggcatcaacggggagccggggaggaaaggggacagaggagaccccggccaacacggcctccctgggttcccagggctcaagggagtgcctggcaacattggtgctcccggacccaaaggagcaaaaggagattccagaacaatcacaaccaaaggtgagcggggacagcccggcgtcccaggtgtgcccgggatgaaaggtgacgatggcagcccaggccgcgatgggctcgatggattccccggcctcccaggccctcccggtgatggcatcaagggccctccaggggacccaggctatccaggaatacctggaacgaagggtactccaggagaaatgggccccccaggactgggccttcccggcctcaaaggccaacgtggtttccctggagacgccggcttacctggaccaccaggcttcctgggccctcctggccccgcagggaccccaggacaaatagattgtgacacagatgtgaaaagggccgttggaggtgacagacaggaggccatccagccaggttgcataggagggcccaagggattgccaggcctgccaggacccccaggccccacaggtgccaaaggcctccgaggaatcccaggcttcgcaggagctgatggaggaccagggtccaggggcttgccaggagacgcaggtcgtgaagggttcccaggacccccagggttcataggaccccgaggatccaaaggtgcagtgggcctccctggcccagatggatccccaggtcccatcggcctgccagggccagatgggccccctggggaaaggggcctccctggagaagtcctgggagctcagcccgggccacggggagatgctggtgtgcctggacagcctgggcttaaaggccttcccggagacagaggcccccctggattcagaggaagccaagggatgcctgggatgccagggctgaagggccagccaggcctcccaggaccttccggccagccaggcctgtatgggcctccaggactgcatggattcccaggagctcctggccaagaggggcccttggggctgccaggaatcccaggccgtgaaggtctgcctggtgatagaggggaccctggggacacaggcgctcctggccctgtgggcatgaaaggtctctctggtgacagaggagatgctggcttcacaggggagcaaggccatccaggaagccctggatttaaaggaattgatggaatgcctgggacccccgggctaaaaggagatagaggctcacctgggatggatggtttccaaggcatgcctggactcaaagggagacccgggtttccagggagcaaaggcgaggctggatttttcggaatacccggtctgaagggtctggctggtgagccaggttttaaaggcagccgaggggaccctgggcccccaggaccacctcctgtcatcctgccaggaatgaaagacattaaaggagagaaaggagatgaagggcctatggggctgaaaggatacctgggcgcaaaaggtatccaaggaatgccaggcatcccagggctgtcaggaatccctgggctgcctgggaggcccggccacatcaaaggagtcaagggagacatcggagtccccggcatccccggtttgccaggattccctggggtggctggcccccctggaattacgggattcccaggattcataggaagccggggtgacaaaggtgccccagggagagcaggcctgtatggcgagattggcgcgactggtgatttcggtgacatcggggacactataaatttaccaggaagaccaggcctgaagggggagcggggcaccactggaataccaggtctgaagggattctttggagagaagggaacagaaggtgacatcggcttccctgggataacaggcgtgactggagtccaaggccctcctggacttaaaggacaaacaggctttccagggctgactgggcctccagggtcgcagggagagctggggcggattggactgcctggtggcaaaggagatgatggctggccgggagctccgggcttaccaggttttccgggactccgtgggatccgcggcttacacggcttgccaggcaccaagggctttccaggatccccaggttctgacatccacggagacccaggcttcccaggccctcctggggaaagaggtgacccaggagaggccaacacccttccaggccctgtgggagtcccaggacagaaaggagaccaaggagctccaggggaacgaggcccacctgggagcccaggacttcaggggttcccaggcatcacacccccttccaacatctctggggcacctggtgacaaaggggcgccagggatatttggcctgaaaggttatcggggcccaccagggccaccaggttctgctgctcttcctggaagcaaaggtgacacagggaacccaggagctccaggaaccccagggaccaaaggatgggccggggactccgggccccagggcaggcctggtgtgtttggtctcccaggagaaaaagggcccaggggtgaacaaggcttcatggggaacactggacccaccggggcggtgggcgacagaggccccaagggacccaagggagacccaggattccctggtgcccccgggactgtgggagcccccgggattgcaggaatcccccagaagattgccgtccaaccagggacagtgggtccccaggggaggcgaggcccccctggggcaccgggggagatggggccccagggcccccccggagaaccaggttttcgtggggctccagggaaagctgggccccaaggaagaggtggtgtgtctgctgttcccggcttccggggagatgaaggacccataggccaccaggggccgattggccaagaaggtgcaccaggccgtccagggagcccgggcctgccgggtatgccaggccgcagcgtcagcatcggctacctcctggtgaagcacagccagacggaccaggagcccatgtgcccggtgggcatgaacaaactctggagtggatacagcctgctgtacttcgagggccaggagaaggcgcacaaccaggacctggggctggcgggctcctgcctggcgcggttcagcaccatgcccttcctgtactgcaaccctggtgatgtctgctactatgccagccggaacgacaagtcctactggctctctaccactgcgccgctgcccatgatgcccgtggccgaggacgagatcaagccctacatcagccgctgttctgtgtgtgaggccccggccatcgccatcgcggtccacagtcaggatgtctccatcccacactgcccagctgggtggcggagtttgtggatcggatattccttcctcatgcacacggcggcgggagacgaaggcggtggccaatcactggtgtcaccgggcagctgtctagaggacttccgcgccacaccattcatcgaatgcaatggaggccgcggcacctgccactactacgccaacaagtacagcttctggctgaccaccattcccgagcagagcttccagggctcgccctccgccgacacgctcaaggccggcctcatccgcacacacatcagccgctgccaggtgtgcatgaagaacctgtgagccggcgcgtgccaggaagggccattttggtgcttattcttaacttattacctcaggtgccaacccaaaaattggttttatttttttcttaaaaaaaaaaaagtctaccaaaggaatttgcatccagcagcagcacttagacctgccagccactgtcaccgagcgggtgcaagcactcggggtccctggagggcaagccctgcccacagaaagccaggagcagccctggcccccatcagccctgctagacgcaccgcctgaaggcacagctaaccacttcgcacacacccatgtaaccactgcactttccaatgccacagacaactcacattgttcaactcccttctcggggtgggacagacgagacaacagcacacaggcagccagccgtggccagaggctcgaggggctcaggggctcaggcacccgtccccacacgagggccccgtgggtgggcctggccctgctttctacgccaatgttatgccagctccatgttctcccaaataccgttgatgtgaattattttaaaggcaaaaccgtgctctttattttaaaaaacactgataatcacactgcggtaggtcattcttttgccacatccctatagaccactgggtttggcaaaactcaggcagaagtggagacttgaaggtacaccccatagggtcggaggtgctgtccccactgccccacgttgtccctgagatttaacccctccactgctgggggtgagctgtactcttctgactgccccctcctgtgtaacgactacaaaataaaacttggttctgaatatttttaaa

SEQ ID NO: 349367 - DNA, 3679 bp, Homo sapiens
  misc_feature (1383)..(1383): n is a, c, g, or t
  misc_feature (1776)..(1776): n is a, c, g, or t
gagtgtggctgcagtgcgccgggacaccagggctccgcgctccgcactcaagaggctcccgcgtcccaacccctcgcgcccgcgcgttcgcggatccaggccgaggaccgaaaggggccgcccgagcccccggggccggcgcccagagagcccagcaaggccggccgccctgccggtgtgccgccggcgggtgcttctggaagggccaatgcgttcgggcagcagccctgaagccgagcccgaggctaagtgggactgaccggggcccagagtggacgaaccgccagcatggggagagaccagcgcgcggtggccggccctgccctacggcggtggctgctgctggggacagtgaccgtggggttcctcgcccagagcgtcttggcgggtgtgaagaagtttgatgtgccgtgtggaggaagagattgcagtgggggctgccagtgctaccctgagaaaggtggacgtggtcagcctgggccagtgggcccccaggggtacaatgggccaccaggattacaaggattcccgggactgcagggacgtaaaggagacaagggtgaaaggggagcccccggagtaacaggacccaagggcgacgtgggagcaagaggcgtttctggattccctggtgccgatggaattcctggacacccggggcaaggtgggcccaggggaaggccgggctacgatggctgcaacggaacccagggagactcaggtccacaggggccccccggctctgaggggttcaccgggcctcccgggccccaaggaccaaaagggcagaaaggtgagccttatgcactgcctaaagaggagcgcgacagatatcggggtgaacctggagagcctggattggtcggtttccagggacctcccggccgccctgggcatgtgggacagatgggtccagttggagctccagggagaccaggaccacctggaccccctggaccaaaaggacagcaaggcaacagaggacttggtttctacggagttaagggtgaaaagggtgacgtagggcagccgggacccaacgggattccatcagacaccctccaccccatcatcgcgcccacaggagtcaccttccacccagatcagtacaagggtgaaaaaggcagtgagggggaaccaggaataagaggcatttccttgaagggagaagaaggaatcatgggctttcctggactgaggggttaccctggcttgagtggtgaaaaaggatcaccaggacagaagggaagccgaggcctggatggctatcaagggcctgatggaccccggggacccaagggagaagccggagacccagggccccctggactacctgcctactcccctcacccttccctagcaaaaggtgccagaggtgacccnggattcccaggggcccaaggggagccaggaagccagggtgagccaggagacccgggcctcccaggtccccctggcctctccatcggagatggagatcagaggagaggcctgccgggtgagatgggacccaagggcttcatcggagaccccggcatccctgcgctctacgggggcccacctggacctgatggaaagcgagggcctccaggaccccccgggctccctggaccacctggacctgatggcttcctgtttgggctgaaaggagcaaaaggaagagcaggcttccctgggcttcccggctcccctggagcccgcggaccaaaggggtggaaaggtgacgctggggaatgcagatgtacagaaggcgacgaagctatcaaaggtcttccnggactgccaggacccaagggcttcgcaggcatcaacggggagccggggaggaaaggggacagaggagaccccggccaacacggcctccctgggttcccagggctcaagggagtgcctggcaacattggtgctcccggacccaaaggagcaaaaggagattccagaacaatcacaaccaaaggtgagcggggacagcccggcgtcccaggtgtgcccgggatgaaaggtgacgatggcagcccaggccgcgatgggctcgatggattccccggcctcccaggccctcccggtgatggcatcaagggccctccaggggacccaggctatccaggaatacctggaacgaagggtactccaggagaaatgggccccccaggactgggccttcccggcctcaaaggccaacgtggtttccctggagacgccggcttacctggaccaccaggcttcctgggccctcctggccccgcagggaccccaggacaaatagattgtgacacagatgtgaaaagggccgttggaggtgacagacaggaggccatccagccaggttgcataggagggcccaagggattgccaggcctgccaggacccccaggccccacaggtgccaaaggcctccgaggaatcccaggcttcgcaggagctgatggaggaccagggtccaggggcttgccaggagacgcaggtcgtgaagggttcccaggacccccagggttcataggaccccgaggatccaaaggtgcagtgggcctccctggcccagatggatccccaggtcccatcggcctgccagggccagatgggccccctggggaaaggggcctccctggagaagtcctgggagctcagcccgggccacggggagatgctggtgtgcctggacagcctgggcttaaaggccttcccggagacagaggcccccctggattcagaggaagccaagggatgcctgggatgccagggctgaagggccagccaggcctcccaggaccttccggccagccaggcctgtatgggcctccaggactgcatggattcccaggagctcctggccaagaggggcccttggggctgccaggaatcccaggccgtgaaggtctgcctggtgatagaggggaccctggggacacaggcgctcctggccctgtgggcatgaaaggtctctctggtgacagaggagatgctggcttcacaggggagcaaggccatccaggaagccctggatttaaaggaattgatggaatgcctgggacccccgggctaaaaggagatagaggctcacctgggatggatggtttccaaggcatgcctggactcaaagggagacccgggtttccagggagcaaaggcgaggctggatttttcggaatacccggtctgaagggtctggctggtgagccaggttttaaaggcagccgaggggaccctgggcccccaggaccacctcctgtcatcctgcagaggctcgaggggctcaggggctcaggcacccgtccccacacgagggccccgtgggtgggcctggccctgctttctacgccaatgttatgccagctccatgttctcccaaataccgttgatgtgaattattttaaaggcaaaaccgtgctctttattttaaaaaacactgataatcacactgcggtaggtcattcttttgccacatccctatagaccactgggtttggcaaaactcaggcagaagtggagacctttctagacatcattgtcagccttgctacttgaaggtacaccccatagggtcggaggtgctgtccccactgccccacgttgtccctgagatttaacccctccactgctgggggtgagctgtactcttctgactgccccctcctgtgtaacgactacaaaataaaacttggttctgaatatttttaaa

SEQ ID NO: 349368 - DNA, 4479 bp, Homo sapiens
  misc_feature (1383)..(1383): n is a, c, g, or t
  misc_feature (1776)..(1776): n is a, c, g, or t
gagtgtggctgcagtgcgccgggacaccagggctccgcgctccgcactcaagaggctcccgcgtcccaacccctcgcgcccgcgcgttcgcggatccaggccgaggaccgaaaggggccgcccgagcccccggggccggcgcccagagagcccagcaaggccggccgccctgccggtgtgccgccggcgggtgcttctggaagggccaatgcgttcgggcagcagccctgaagccgagcccgaggctaagtgggactgaccggggcccagagtggacgaaccgccagcatggggagagaccagcgcgcggtggccggccctgccctacggcggtggctgctgctggggacagtgaccgtggggttcctcgcccagagcgtcttggcgggtgtgaagaagtttgatgtgccgtgtggaggaagagattgcagtgggggctgccagtgctaccctgagaaaggtggacgtggtcagcctgggccagtgggcccccaggggtacaatgggccaccaggattacaaggattcccgggactgcagggacgtaaaggagacaagggtgaaaggggagcccccggagtaacaggacccaagggcgacgtgggagcaagaggcgtttctggattccctggtgccgatggaattcctggacacccggggcaaggtgggcccaggggaaggccgggctacgatggctgcaacggaacccagggagactcaggtccacaggggccccccggctctgaggggttcaccgggcctcccgggccccaaggaccaaaagggcagaaaggtgagccttatgcactgcctaaagaggagcgcgacagatatcggggtgaacctggagagcctggattggtcggtttccagggacctcccggccgccctgggcatgtgggacagatgggtccagttggagctccagggagaccaggaccacctggaccccctggaccaaaaggacagcaaggcaacagaggacttggtttctacggagttaagggtgaaaagggtgacgtagggcagccgggacccaacgggattccatcagacaccctccaccccatcatcgcgcccacaggagtcaccttccacccagatcagtacaagggtgaaaaaggcagtgagggggaaccaggaataagaggcatttccttgaagggagaagaaggaatcatgggctttcctggactgaggggttaccctggcttgagtggtgaaaaaggatcaccaggacagaagggaagccgaggcctggatggctatcaagggcctgatggaccccggggacccaagggagaagccggagacccagggccccctggactacctgcctactcccctcacccttccctagcaaaaggtgccagaggtgacccnggattcccaggggcccaaggggagccaggaagccagggtgagccaggagacccgggcctcccaggtccccctggcctctccatcggagatggagatcagaggagaggcctgccgggtgagatgggacccaagggcttcatcggagaccccggcatccctgcgctctacgggggcccacctggacctgatggaaagcgagggcctccaggaccccccgggctccctggaccacctggacctgatggcttcctgtttgggctgaaaggagcaaaaggaagagcaggcttccctgggcttcccggctcccctggagcccgcggaccaaaggggtggaaaggtgacgctggggaatgcagatgtacagaaggcgacgaagctatcaaaggtcttccnggactgccaggacccaagggcttcgcaggcatcaacggggagccggggaggaaaggggacagaggagaccccggccaacacggcctccctgggttcccagggctcaagggagtgcctggcaacattggtgctcccggacccaaaggagcaaaaggagattccagaacaatcacaaccaaaggtgagcggggacagcccggcgtcccaggtgtgcccgggatgaaaggtgacgatggcagcccaggccgcgatgggctcgatggattccccggcctcccaggccctcccggtgatggcatcaagggccctccaggggacccaggctatccaggaatacctggaacgaagggtactccaggagaaatgggccccccaggactgggccttcccggcctcaaaggccaacgtggtttccctggagacgccggcttacctggaccaccaggcttcctgggccctcctggccccgcagggaccccaggacaaatagattgtgacacagatgtgaaaagggccgttggaggtgacagacaggaggccatccagccaggttgcataggagggcccaagggattgccaggcctgccaggacccccaggccccacaggtgccaaaggcctccgaggaatcccaggcttcgcaggagctgatggaggaccagggtccaggggcttgccaggagacgcaggtcgtgaagggttcccaggacccccagggttcataggaccccgaggatccaaaggtgcagtgggcctccctggcccagatggatccccaggtcccatcggcctgccagggccagatgggccccctggggaaaggggcctccctggagaagtcctgggagctcagcccgggccacggggagatgctggtgtgcctggacagcctgggcttaaaggccttcccggagacagaggcccccctggattcagaggaagccaagggatgcctgggatgccagggctgaagggccagccaggcctcccaggaccttccggccagccaggcctgtatgggcctccaggactgcatggattcccaggagctcctggccaagaggggcccttggggctgccaggaatcccaggccgtgaaggtctgcctggtgatagaggggaccctggggacacaggcgctcctggccctgtgggcatgaaaggtctctctggtgacagaggagatgctggcttcacaggggagcaaggccatccaggaagccctggatttaaaggaattgatggaatgcctgggacccccgggctaaaaggagatagaggctcacctgggatggatggtttccaaggcatgcctggactcaaagggagacccgggtttccagggagcaaaggcgaggctggatttttcggaatacccggtctgaagggtctggctggtgagccaggttttaaaggcagccgaggggaccctgggcccccaggaccacctcctgtcatcctgccaggaatgaaagacattaaaggagagaaaggagatgaagggcctatggggctgaaaggatacctgggcgcaaaaggtatccaaggaatgccaggcatcccagggctgtcaggaatccctgggctgcctgggaggcccggccacatcaaaggagtcaagggagacatcggagtccccggcatccccggtttgccaggattccctggggtggctggcccccctggaattacgggattcccaggattcataggaagccggggtgacaaaggtgccccagggagagcaggcctgtatggcgagattggcgcgactggtgatttcggtgacatcggggacactataaatttaccaggaagaccaggcctgaagggggagcggggcaccactggaataccaggtctgaagggattctttggagagaagggaacagaaggtgacatcggcttccctgggataacaggcgtgactggagtccaaggccctcctggacttaaaggacaaacaggctttccagggctgactgggcctccagggtcgcagggagagctggggcggattggactgcctggtggcaaaggagatgatggctggccgggagctccgggcttaccaggttttccgggactccgtgggatccgcggcttacacggcttgccaggcaccaagggctttccaggatccccaggttctgacatccacggagacccaggcttcccaggccctcctggggaaagaggtgacccaggagaggccaacacccttccaggccctgtgggagtcccaggacagaaaggagaccaaggagctccaggggaacgaggcccacctgggagcccaggacttcaggggttcccaggcatcacacccccttccaacatctctggggcacctggtgacaaaggggcgccagggatatttggcctgaaaggttatcggggcccaccagggccaccaggttctgctgctcttcctggaagcaaaggtgacacagggaacccaggagctccaggaaccccagggaccaaaggatgggccggggactccgggccccagggcaggcctggtgtgtttggtctcccaggagaaaaagggcccaggggtgaacaaggcttcatggggaacactgccccacgttgtccctgagatttaacccctccactgctgggggtgagctgtactcttctgactgccccctcctgtgtaacgactacaaaataaaacttggttctgaatatttttaaa

SEQ ID NO: 349369 - DNA, 629 bp, Homo sapiens
gattatgctggtaaagccatgctccatctcctgtgtaattttaagaatgcctcaggatcttgatcccacttgtttaaaatttctattcttttctgcagctgagctgggaacaacagttttggaacccatcaagtaggaagtttgcacaactataatgtttcagtaagaattgtgtaggctgaaccagttgatatatctattcagttagggaacaaacaagattaatgtttcctcaaaaattgatgtgggcctggccctgctttctacgccaatgttatgccagctccatgttctcccaaataccgttgatgtgaattattttaaaggcaaaaccgtgctctttattttaaaaaacactgataatcacactgcggtaggtcattcttttgccacatccctatagaccactgggtttggcaaaactcaggcagaagtggagacctttctagacatcattgtcagccttgctacttgaaggtacaccccatagggtcggaggtgctgtccccactgccccacgttgtccctgagatttaacccctccactgctgggggtgagctgtactcttctgactgccccctcctgtgtaacgactacaaaataaaacttggttctgaatatttttaaa

SEQ ID NO: 349370 - DNA, 2845 bp, Homo sapiens
  misc_feature (1383)..(1383): n is a, c, g, or t
  misc_feature (1776)..(1776): n is a, c, g, or t
gagtgtggctgcagtgcgccgggacaccagggctccgcgctccgcactcaagaggctcccgcgtcccaacccctcgcgcccgcgcgttcgcggatccaggccgaggaccgaaaggggccgcccgagcccccggggccggcgcccagagagcccagcaaggccggccgccctgccggtgtgccgccggcgggtgcttctggaagggccaatgcgttcgggcagcagccctgaagccgagcccgaggctaagtgggactgaccggggcccagagtggacgaaccgccagcatggggagagaccagcgcgcggtggccggccctgccctacggcggtggctgctgctggggacagtgaccgtggggttcctcgcccagagcgtcttggcgggtgtgaagaagtttgatgtgccgtgtggaggaagagattgcagtgggggctgccagtgctaccctgagaaaggtggacgtggtcagcctgggccagtgggcccccaggggtacaatgggccaccaggattacaaggattcccgggactgcagggacgtaaaggagacaagggtgaaaggggagcccccggagtaacaggacccaagggcgacgtgggagcaagaggcgtttctggattccctggtgccgatggaattcctggacacccggggcaaggtgggcccaggggaaggccgggctacgatggctgcaacggaacccagggagactcaggtccacaggggccccccggctctgaggggttcaccgggcctcccgggccccaaggaccaaaagggcagaaaggtgagccttatgcactgcctaaagaggagcgcgacagatatcggggtgaacctggagagcctggattggtcggtttccagggacctcccggccgccctgggcatgtgggacagatgggtccagttggagctccagggagaccaggaccacctggaccccctggaccaaaaggacagcaaggcaacagaggacttggtttctacggagttaagggtgaaaagggtgacgtagggcagccgggacccaacgggattccatcagacaccctccaccccatcatcgcgcccacaggagtcaccttccacccagatcagtacaagggtgaaaaaggcagtgagggggaaccaggaataagaggcatttccttgaagggagaagaaggaatcatgggctttcctggactgaggggttaccctggcttgagtggtgaaaaaggatcaccaggacagaagggaagccgaggcctggatggctatcaagggcctgatggaccccggggacccaagggagaagccggagacccagggccccctggactacctgcctactcccctcacccttccctagcaaaaggtgccagaggtgacccnggattcccaggggcccaaggggagccaggaagccagggtgagccaggagacccgggcctcccaggtccccctggcctctccatcggagatggagatcagaggagaggcctgccgggtgagatgggacccaagggcttcatcggagaccccggcatccctgcgctctacgggggcccacctggacctgatggaaagcgagggcctccaggaccccccgggctccctggaccacctggacctgatggcttcctgtttgggctgaaaggagcaaaaggaagagcaggcttccctgggcttcccggctcccctggagcccgcggaccaaaggggtggaaaggtgacgctggggaatgcagatgtacagaaggcgacgaagctatcaaaggtcttccnggactgccaggacccaagggcttcgcaggcatcaacggggagccggggaggaaaggggacagaggagaccccggccaacacggcctccctgggttcccagggctcaagggagtgcctggcaacattggtgctcccggacccaaaggagcaaaaggagattccagaacaatcacaaccaaaggtgagcggggacagcccggcgtcccaggtgtgcccgggatgaaaggtgacgatggcagcccaggccgcgatgggctcgatggattccccggcctcccaggccctcccggtgatggcatcaagggccctccaggggacccaggctatccaggaatacctggaacgaagggtactccaggagaaatgggccccccaggactgggccttcccggcctcaaaggccaacgtggtttccctggagacgccggcttacctggaccaccaggcttcctgggccctcctggccccgcagggaccccaggacaaatagattgtgacacagatgtgaaaagggccgttggaggtgacagacaggaggccatccagccaggttgcataggagggcccaagggattgccaggcctgccaggacccccaggccccacaggtgccaaaggcctccgaggaatcccaggcttcgcaggagctgatggaggaccagggtccaggggcttgccaggagacgcaggtcgtgaagggttcccaggacccccagggttcataggaccccgaggatccaaaggtgcagtgggcctccctggcccagatggatccccaggtcccatcggcctgccagggccagatgggccccctggggaaaggggcctccctggagaagtcctgggagctcagcccgggccacggggagatgctggtgtgcctggacagcctgggcttaaaggccttcccggagacagaggcccccctggattcagagaatctgtacaggtggtatgaagaaaagatgggccctggccatgcttagtcagaggtgaagaaggaaaatagaaataatctggaatgcaattctattggtgtaaaaattaatacattttttaaaatgtcttaa

SEQ ID NO: 349371 - DNA, 2488 bp, Homo sapiens
  misc_feature (1383)..(1383): n is a, c, g, or t
  misc_feature (1776)..(1776): n is a, c, g, or t
gagtgtggctgcagtgcgccgggacaccagggctccgcgctccgcactcaagaggctcccgcgtcccaacccctcgcgcccgcgcgttcgcggatccaggccgaggaccgaaaggggccgcccgagcccccggggccggcgcccagagagcccagcaaggccggccgccctgccggtgtgccgccggcgggtgcttctggaagggccaatgcgttcgggcagcagccctgaagccgagcccgaggctaagtgggactgaccggggcccagagtggacgaaccgccagcatggggagagaccagcgcgcggtggccggccctgccctacggcggtggctgctgctggggacagtgaccgtggggttcctcgcccagagcgtcttggcgggtgtgaagaagtttgatgtgccgtgtggaggaagagattgcagtgggggctgccagtgctaccctgagaaaggtggacgtggtcagcctgggccagtgggcccccaggggtacaatgggccaccaggattacaaggattcccgggactgcagggacgtaaaggagacaagggtgaaaggggagcccccggagtaacaggacccaagggcgacgtgggagcaagaggcgtttctggattccctggtgccgatggaattcctggacacccggggcaaggtgggcccaggggaaggccgggctacgatggctgcaacggaacccagggagactcaggtccacaggggccccccggctctgaggggttcaccgggcctcccgggccccaaggaccaaaagggcagaaaggtgagccttatgcactgcctaaagaggagcgcgacagatatcggggtgaacctggagagcctggattggtcggtttccagggacctcccggccgccctgggcatgtgggacagatgggtccagttggagctccagggagaccaggaccacctggaccccctggaccaaaaggacagcaaggcaacagaggacttggtttctacggagttaagggtgaaaagggtgacgtagggcagccgggacccaacgggattccatcagacaccctccaccccatcatcgcgcccacaggagtcaccttccacccagatcagtacaagggtgaaaaaggcagtgagggggaaccaggaataagaggcatttccttgaagggagaagaaggaatcatgggctttcctggactgaggggttaccctggcttgagtggtgaaaaaggatcaccaggacagaagggaagccgaggcctggatggctatcaagggcctgatggaccccggggacccaagggagaagccggagacccagggccccctggactacctgcctactcccctcacccttccctagcaaaaggtgccagaggtgacccnggattcccaggggcccaaggggagccaggaagccagggtgagccaggagacccgggcctcccaggtccccctggcctctccatcggagatggagatcagaggagaggcctgccgggtgagatgggacccaagggcttcatcggagaccccggcatccctgcgctctacgggggcccacctggacctgatggaaagcgagggcctccaggaccccccgggctccctggaccacctggacctgatggcttcctgtttgggctgaaaggagcaaaaggaagagcaggcttccctgggcttcccggctcccctggagcccgcggaccaaaggggtggaaaggtgacgctggggaatgcagatgtacagaaggcgacgaagctatcaaaggtcttccnggactgccaggacccaagggcttcgcaggcatcaacggggagccggggaggaaaggggacagaggagaccccggccaacacggcctccctgggttcccagggctcaagggagtgcctggcaacattggtgctcccggacccaaaggagcaaaaggagattccagaacaatcacaaccaaaggtgagcggggacagcccggcgtcccaggtgtgcccgggatgaaaggtgacgatggcagcccaggccgcgatgggctcgatggattccccggcctcccaggccctcccggtgatggcatcaagggccctccaggggacccaggctatccaggaatacctggaacgaagggtactccaggagaaatgggccccccaggactgggccttcccggcctcaaaggccaacgtggtttccctggagacgccggcttacctggaccaccaggcttcctgggccctcctggccccgcagggaccccaggacaaatagattgtgacacagatgtgaaaagggccgttggaggtgacagacaggaggccatccagccaggttgcataggagggcccaagggattgccaggcctgccaggacccccaggccccacaggtgccaaaggcctccgaggaatcccggcggccgaaggaatcccggcggccgaaggaatcccggcggccgaaggaatcccggcggccgaaggaatcccgcggccga

SEQ ID NO: 349372 - DNA, 603 bp, Homo sapiens
gagtgtggctgcagtgcgccgggacaccagggctccgcgctccgcactcaagaggctcccgcgtcccaacccctcgcgcccgcgcgttcgcggatccaggccgaggaccgaaaggggccgcccgagcccccggggccggcgcccagagagcccagcaaggccggccgccctgccggtgtgccgccggcgggtgcttctggaagggccaatgcgttcgggcagcagccctgaagccgagcccgaggctaagtgggactgaccggggcccagagtggacgaaccgccagcatggggagagaccagcgcgcggtggccggccctgccctacggcggtggctgctgctggggacagtgaccgtggggttcctcgcccagagcgtcttggcgggtgtgaagaagtttgatgtgccgtgtggaggaagagattgcagtgggggctgccagtgctaccctgagaaaggtggacgttcctcaagagaacctggtgcctctgcgctgcccacgtcgtctgggaggaccaaaggccaggacacgtctccctacccagggttctccggcaacactgcctcggcgggcaggccttccctctgcaaggaacccacg

SEQ ID NO: 349373 - DNA, 213 bp, Homo sapiens
tggcaaaggagatgatggctggccgggagctccgggcttaccaggtaaggtcacgtaaaacacgtggtcacccagacccagagtcgtgggctgtgcaggaggcaccgctgagcaggccagcctctctcagggcgacttctaaggcccatacgagagcaaaggcaggtctgctgtggcttacggtggtctgcaccaacatagcagcacagggta

SEQ ID NO: 349374 - DNA, 261 bp, Homo sapiens
cctgatggaaagcgagggcctccaggaccccccgggctccctggaccacctggacctgatggtgagtggagggaaacaaaagggagggtgtagcctaatgttcagatgaagcccggtcccagccggatgttatttgggattctctgctaaatgactctgggaacgaatccagtaggccagtgattagggtgcagtggatccaggtagattagggtgtagtgggtgctctctggggtccacgcaggagctggggatggaagc

SEQ ID NO: 349375 - DNA, 511 bp, Homo sapiens
gcggccgcatcatctcccagcccaccctcgccaggcggctcggctatcactacccaaaatgtaatagtctgaactacagaaagcacagtctcctggcattcgacaaggatttcaaaatgagatgagcccctgcctgtcttgttctctttgggcacctgtggctggtggctgggatgccaggctctgccaccctagcatggggatgctgccccaggcactgtctgtggttccactggttgaaatagctgctctgccagcctgacggtccacgctcgggtttcttctttggaaatatgtgtactgtcaaaaactccaaaaggctattctcacatcctgtttttctcttttctttctctagggagaagccggagacccagggccccctggactacctgcctactcccctcacccttccctagcaaaaggtgtgtgaacaatttcacctgcatagttcagcatcgcatacacattctctcctgttagggacacagagctatgaactttcaagaca

SEQ ID NO: 349376 - DNA, 200 bp, Homo sapiens
tgacccctccttccacagggctggcgggctcctgcctggcgcggttcagcaccatgcccttcctgtactgcaaccctggtgatgtctgctactatgccagccggaacgacaagtcctactggctctctaccactgcgcgcgaggctttgcccatgaagaacgttgtgtaaaagaacggaccatgccatacgtccacgcct

SEQ ID NO: 349377 - DNA, 1930 bp, Homo sapiens
gagacccggaagatctttagctcccgggacgccttgatcgccttgatcacctttaattccctgaagcccaggagggagacccaggattccctggtgcccccgggactgtgggagcccccgggattgcaggaatcccccagaagattgccgtccaaccagggacagtgggtccccaggggaggcgaggcccccctggggcaccgggggagatggggccccagggcccccccggagaaccaggttttcgtggggctccagggaaagctgggccccaaggaagaggtggtgtgtctgctgttcccggcttccggggagatgaaggacccataggccaccaggggccgattggccaagaaggtgcaccaggccgtccagggagcccgggcctgccgggtatgccaggccgcagcgtcagcatcggctacctcctggtgaagcacagccagacggaccaggagcccatgtgcccggtgggcatgaacaaactctggagtggatacagcctgctgtacttcgagggccaggagaaggcgcacaaccaggacctggggctggcgggctcctgcctggcgcggttcagcaccatgcccttcctgtactgcaaccctggtgatgtctgctactatgccagccggaacgacaagtcctactggctctctaccactgcgccgctgcccatgatgcccgtggccgaggacgagatcaagccctacatcagccgctgttctgtgtgtgaggccccggccatcgccatcgcggtccacagtcaggatgtctccatcccacactgcccagctgggtggcggagtttgtggatcggatattccttcctcatgcacacggcggcgggagacgaaggcggtggccaatcactggtgtcaccgggcagctgtctagaggacttccgcgccacaccattcatcgaatgcaatggaggccgcggcacctgccactactacgccaacaagtacagcttctggctgaccaccattcccgagcagagcttccagggctcgccctccgccgacacgctcaaggccggcctcatccgcacacacatcagccgctgccaggtgtgcatgaagaacctgtgagccggcgcgtgccaggaagggccattttggtgcttattcttaacttattacctcaggtgccaacccaaaaattggttttatttttttcttaaaaaaaaaaaagtctaccaaaggaatttgcatccagcagcagcacttagacctgccagccactgtcaccgagcgggtgcaagcactcggggtccctggagggcaagccctgcccacagaaagccaggagcagccctggcccccatcagccctgctagacgcaccgcctgaaggcacagctaaccacttcgcacacacccatgtaaccactgcactttccaatgccacagacaactcacattgttcaactcccttctcggggtgggacagacgagacaacagcacacaggcagccagccgtggccagaggctcgaggggctcaggggctcaggcacccgtccccacacgagggccccgtgggtgggcctggccctgctttctacgccaatgttatgccagctccatgttctcccaaataccgttgatgtgaattattttaaaggcaaaaccgtgctctttattttaaaaaacactgataatcacactgcggtaggtcattcttttgccacatccctatagaccactgggtttggcaaaactcaggcagaagtggagacctttctagacatcattgtcagccttgctacttgaaggtacaccccatagggtcggaggtgctgtccccactgccccacgttgtccctgagatttaacccctccactgctgggggtgagctgtactcttctgactgccccctcctgtgtaacgactacaaaataaaacttggttctgaatatttttaaa

SEQ ID NO: 349378 - DNA, 6596 bp, Homo sapiens
  misc_feature (1383)..(1383): n is a, c, g, or t
  misc_feature (1776)..(1776): n is a, c, g, or t
  misc_feature (6268)..(6268): n is a, c, g, or t
gagtgtggctgcagtgcgccgggacaccagggctccgcgctccgcactcaagaggctcccgcgtcccaacccctcgcgcccgcgcgttcgcggatccaggccgaggaccgaaaggggccgcccgagcccccggggccggcgcccagagagcccagcaaggccggccgccctgccggtgtgccgccggcgggtgcttctggaagggccaatgcgttcgggcagcagccctgaagccgagcccgaggctaagtgggactgaccggggcccagagtggacgaaccgccagcatggggagagaccagcgcgcggtggccggccctgccctacggcggtggctgctgctggggacagtgaccgtggggttcctcgcccagagcgtcttggcgggtgtgaagaagtttgatgtgccgtgtggaggaagagattgcagtgggggctgccagtgctaccctgagaaaggtggacgtggtcagcctgggccagtgggcccccaggggtacaatgggccaccaggattacaaggattcccgggactgcagggacgtaaaggagacaagggtgaaaggggagcccccggagtaacaggacccaagggcgacgtgggagcaagaggcgtttctggattccctggtgccgatggaattcctggacacccggggcaaggtgggcccaggggaaggccgggctacgatggctgcaacggaacccagggagactcaggtccacaggggccccccggctctgaggggttcaccgggcctcccgggccccaaggaccaaaagggcagaaaggtgagccttatgcactgcctaaagaggagcgcgacagatatcggggtgaacctggagagcctggattggtcggtttccagggacctcccggccgccctgggcatgtgggacagatgggtccagttggagctccagggagaccaggaccacctggaccccctggaccaaaaggacagcaaggcaacagaggacttggtttctacggagttaagggtgaaaagggtgacgtagggcagccgggacccaacgggattccatcagacaccctccaccccatcatcgcgcccacaggagtcaccttccacccagatcagtacaagggtgaaaaaggcagtgagggggaaccaggaataagaggcatttccttgaagggagaagaaggaatcatgggctttcctggactgaggggttaccctggcttgagtggtgaaaaaggatcaccaggacagaagggaagccgaggcctggatggctatcaagggcctgatggaccccggggacccaagggagaagccggagacccagggccccctggactacctgcctactcccctcacccttccctagcaaaaggtgccagaggtgacccnggattcccaggggcccaaggggagccaggaagccagggtgagccaggagacccgggcctcccaggtccccctggcctctccatcggagatggagatcagaggagaggcctgccgggtgagatgggacccaagggcttcatcggagaccccggcatccctgcgctctacgggggcccacctggacctgatggaaagcgagggcctccaggaccccccgggctccctggaccacctggacctgatggcttcctgtttgggctgaaaggagcaaaaggaagagcaggcttccctgggcttcccggctcccctggagcccgcggaccaaaggggtggaaaggtgacgctggggaatgcagatgtacagaaggcgacgaagctatcaaaggtcttccnggactgccaggacccaagggcttcgcaggcatcaacggggagccggggaggaaaggggacagaggagaccccggccaacacggcctccctgggttcccagggctcaagggagtgcctggcaacattggtgctcccggacccaaaggagcaaaaggagattccagaacaatcacaaccaaaggtgagcggggacagcccggcgtcccaggtgtgcccgggatgaaaggtgacgatggcagcccaggccgcgatgggctcgatggattccccggcctcccaggccctcccggtgatggcatcaagggccctccaggggacccaggctatccaggaatacctggaacgaagggtactccaggagaaatgggccccccaggactgggccttcccggcctcaaaggccaacgtggtttccctggagacgccggcttacctggaccaccaggcttcctgggccctcctggccccgcagggaccccaggacaaatagattgtgacacagatgtgaaaagggccgttggaggtgacagacaggaggccatccagccaggttgcataggagggcccaagggattgccaggcctgccaggacccccaggccccacaggtgccaaaggcctccgaggaatcccaggcttcgcaggagctgatggaggaccagggtccaggggcttgccaggagacgcaggtcgtgaagggttcccaggacccccagggttcataggaccccgaggatccaaaggtgcagtgggcctccctggcccagatggatccccaggtcccatcggcctgccagggccagatgggccccctggggaaaggggcctccctggagaagtcctgggagctcagcccgggccacggggagatgctggtgtgcctggacagcctgggcttaaaggccttcccggagacagaggcccccctggattcagaggaagccaagggatgcctgggatgccagggctgaagggccagccaggcctcccaggaccttccggccagccaggcctgtatgggcctccaggactgcatggattcccaggagctcctggccaagaggggcccttggggctgccaggaatcccaggccgtgaaggtctgcctggtgatagaggggaccctggggacacaggcgctcctggccctgtgggcatgaaaggtctctctggtgacagaggagatgctggcttcacaggggagcaaggccatccaggaagccctggatttaaaggaattgatggaatgcctgggacccccgggctaaaaggagatagaggctcacctgggatggatggtttccaaggcatgcctggactcaaagggagacccgggtttccagggagcaaaggcgaggctggatttttcggaatacccggtctgaagggtctggctggtgagccaggttttaaaggcagccgaggggaccctgggcccccaggaccacctcctgtcatcctgccaggaatgaaagacattaaaggagagaaaggagatgaagggcctatggggctgaaaggatacctgggcgcaaaaggtatccaaggaatgccaggcatcccagggctgtcaggaatccctgggctgcctgggaggcccggccacatcaaaggagtcaagggagacatcggagtccccggcatccccggtttgccaggattccctggggtggctggcccccctggaattacgggattcccaggattcataggaagccggggtgacaaaggtgccccagggagagcaggcctgtatggcgagattggcgcgactggtgatttcggtgacatcggggacactataaatttaccaggaagaccaggcctgaagggggagcggggcaccactggaataccaggtctgaagggattctttggagagaagggaacagaaggtgacatcggcttccctgggataacaggcgtgactggagtccaaggccctcctggacttaaaggacaaacaggctttccagggctgactgggcctccagggtcgcagggagagctggggcggattggactgcctggtggcaaaggagatgatggctggccgggagctccgggcttaccaggttttccgggactccgtgggatccgcggcttacacggcttgccaggcaccaagggctttccaggatccccaggttctgacatccacggagacccaggcttcccaggccctcctggggaaagaggtgacccaggagaggccaacacccttccaggccctgtgggagtcccaggacagaaaggagaccaaggagctccaggggaacgaggcccacctgggagcccaggacttcaggggttcccaggcatcacacccccttccaacatctctggggcacctggtgacaaaggggcgccagggatatttggcctgaaaggttatcggggcccaccagggccaccaggttctgctgctcttcctggaagcaaaggtgacacagggaacccaggagctccaggaaccccagggaccaaaggatgggccggggactccgggccccagggcaggcctggtgtgtttggtctcccaggagaaaaagggcccaggggtgaacaaggcttcatggggaacactggacccaccggggcggtgggcgacagaggccccaagggacccaagggagacccaggattccctggtgcccccgggactgtgggagcccccgggattgcaggaatcccccagaagattgccgtccaaccagggacagtgggtccccaggggaggcgaggcccccctggggcaccgggggagatggggccccagggcccccccggagaaccaggttttcgtggggctccagggaaagctgggccccaaggaagaggtggtgtgtctgctgttcccggcttccggggagatgaaggacccataggccaccaggggccgattggccaagaaggtgcaccaggccgtccagggagcccgggcctgccgggtatgccaggccgcagcgtcagcatcggctacctcctggtgaagcacagccagacggaccaggagcccatgtgcccggtgggcatgaacaaactctggagtggatacagcctgctgtacttcgagggccaggagaaggcgcacaaccaggacctggggctggcgggctcctgcctggcgcggttcagcaccatgcccttcctgtactgcaaccctggtgatgtctgctactatgccagccggaacgacaagtcctactggctctctaccactgcgccgctgcccatgatgcccgtggccgaggacgagatcaagccctacatcagccgctgttctgtgtgtgaggccccggccatcgccatcgcggtccacagtcaggatgtctccatcccacactgcccagctgggtggcggagtttgtggatcggatattccttcctcatgcacacggcggcgggagacgaaggcggtggccaatcactggtgtcaccgggcagctgtctagaggacttccgcgccacaccattcatcgaatgcaatggaggccgcggcacctgccactactacgccaacaagtacagcttctggctgaccaccattcccgagcagagcttccagggctcgccctccgccgacacgctcaaggccggcctcatccgcacacacatcagccgctgccaggtgtgcatgaagaacctgtgagccggcgcgtgccaggaagggccattttggtgcttattcttaacttattacctcaggtgccaacccaaaaattggttttatttttttcttaaaaaaaaaaaagtctaccaaaggaatttgcatccagcagcagcacttagacctgccagccactgtcaccgagcgggtgcaagcactcggggtccctggagggcaagccctgcccacagaaagccaggagcagccctggcccccatcagccctgctagacgcaccgcctgaaggcacagctaaccacttcgcacacacccatgtaaccactgcactttccaatgccacagacaactcacattgttcaactcccttctcggggtgggacagacgagacaacagcacacaggcagccagccgtggccagaggctcgaggggctcaggggctcaggcacccgtccccacacgagggccccgtgggtgggcctggccctgctttctacgccaatgttatgccagctccatgttctcccaaataccgttgatgtgaattattttaaaggcaaaaccgtgctctttattttaaaaaacactgataatcacactgcggtaggtcattcttttgccacatccctatagaccactgggtttggcaaaactcaggcagaagtggagacctttctagacatcattgtcagccttgctacttgaaggtacaccccatagggtcggaggtgctgtccccactgccccacgttgtccctgagatttaacccctccactgctgggggtgagctgtactcttctgactgccccctcctgtgtaacgactacaaaataaaacttggttctgaatatttttaaaacaanacaaacacaaggggggcgccaaaaaaaacccccgcggggccacggaatagcgatcacagcttcgtgtacgaggggcccataaggagagggataaaaagcaagcgagggcgccgtaaacaccatggcggtgaacagcgcactggcaatgggaagaacacctgtggggggcaagtgaacccccagaataacgcaggcaaacaaaaggcgcgggagacaccacagctgagcggtgccggtaaaacagcacacagaaagaaagagagacagacacagagcaaagacaagatacagaaaaagagaagacaaagcggcagtagaccacaaccaa

SEQ ID NO: 349379 - DNA, 6530 bp, Homo sapiens
  misc_feature (1383)..(1383): n is a, c, g, or t
  misc_feature (1776)..(1776): n is a, c, g, or t
gagtgtggctgcagtgcgccgggacaccagggctccgcgctccgcactcaagaggctcccgcgtcccaacccctcgcgcccgcgcgttcgcggatccaggccgaggaccgaaaggggccgcccgagcccccggggccggcgcccagagagcccagcaaggccggccgccctgccggtgtgccgccggcgggtgcttctggaagggccaatgcgttcgggcagcagccctgaagccgagcccgaggctaagtgggactgaccggggcccagagtggacgaaccgccagcatggggagagaccagcgcgcggtggccggccctgccctacggcggtggctgctgctggggacagtgaccgtggggttcctcgcccagagcgtcttggcgggtgtgaagaagtttgatgtgccgtgtggaggaagagattgcagtgggggctgccagtgctaccctgagaaaggtggacgtggtcagcctgggccagtgggcccccaggggtacaatgggccaccaggattacaaggattcccgggactgcagggacgtaaaggagacaagggtgaaaggggagcccccggagtaacaggacccaagggcgacgtgggagcaagaggcgtttctggattccctggtgccgatggaattcctggacacccggggcaaggtgggcccaggggaaggccgggctacgatggctgcaacggaacccagggagactcaggtccacaggggccccccggctctgaggggttcaccgggcctcccgggccccaaggaccaaaagggcagaaaggtgagccttatgcactgcctaaagaggagcgcgacagatatcggggtgaacctggagagcctggattggtcggtttccagggacctcccggccgccctgggcatgtgggacagatgggtccagttggagctccagggagaccaggaccacctggaccccctggaccaaaaggacagcaaggcaacagaggacttggtttctacggagttaagggtgaaaagggtgacgtagggcagccgggacccaacgggattccatcagacaccctccaccccatcatcgcgcccacaggagtcaccttccacccagatcagtacaagggtgaaaaaggcagtgagggggaaccaggaataagaggcatttccttgaagggagaagaaggaatcatgggctttcctggactgaggggttaccctggcttgagtggtgaaaaaggatcaccaggacagaagggaagccgaggcctggatggctatcaagggcctgatggaccccggggacccaagggagaagccggagacccagggccccctggactacctgcctactcccctcacccttccctagcaaaaggtgccagaggtgacccnggattcccaggggcccaaggggagccaggaagccagggtgagccaggagacccgggcctcccaggtccccctggcctctccatcggagatggagatcagaggagaggcctgccgggtgagatgggacccaagggcttcatcggagaccccggcatccctgcgctctacgggggcccacctggacctgatggaaagcgagggcctccaggaccccccgggctccctggaccacctggacctgatggcttcctgtttgggctgaaaggagcaaaaggaagagcaggcttccctgggcttcccggctcccctggagcccgcggaccaaaggggtggaaaggtgacgctggggaatgcagatgtacagaaggcgacgaagctatcaaaggtcttccnggactgccaggacccaagggcttcgcaggcatcaacggggagccggggaggaaaggggacagaggagaccccggccaacacggcctccctgggttcccagggctcaagggagtgcctggcaacattggtgctcccggacccaaaggagcaaaaggagattccagaacaatcacaaccaaaggtgagcggggacagcccggcgtcccaggtgtgcccgggatgaaaggtgacgatggcagcccaggccgcgatgggctcgatggattccccggcctcccaggccctcccggtgatggcatcaagggccctccaggggacccaggctatccaggaatacctggaacgaagggtactccaggagaaatgggccccccaggactgggccttcccggcctcaaaggccaacgtggtttccctggagacgccggcttacctggaccaccaggcttcctgggccctcctggccccgcagggaccccaggacaaatagattgtgacacagatgtgaaaagggccgttggaggtgacagacaggaggccatccagccaggttgcataggagggcccaagggattgccaggcctgccaggacccccaggccccacaggtgccaaaggcctccgaggaatcccaggcttcgcaggagctgatggaggaccagggtccaggggcttgccaggagacgcaggtcgtgaagggttcccaggacccccagggttcataggaccccgaggatccaaaggtgcagtgggcctccctggcccagatggatccccaggtcccatcggcctgccagggccagatgggccccctggggaaaggggcctccctggagaagtcctgggagctcagcccgggccacggggagatgctggtgtgcctggacagcctgggcttaaaggccttcccggagacagaggcccccctggattcagaggaagccaagggatgcctgggatgccagggctgaagggccagccaggcctcccaggaccttccggccagccaggcctgtatgggcctccaggactgcatggattcccaggagctcctggccaagaggggcccttggggctgccaggaatcccaggccgtgaaggtctgcctggtgatagaggggaccctggggacacaggcgctcctggccctgtgggcatgaaaggtctctctggtgacagaggagatgctggcttcacaggggagcaaggccatccaggaagccctggatttaaaggaattgatggaatgcctgggacccccgggctaaaaggagatagaggctcacctgggatggatggtttccaaggcatgcctggactcaaagggagacccgggtttccagggagcaaaggcgaggctggatttttcggaatacccggtctgaagggtctggctggtgagccaggttttaaaggcagccgaggggaccctgggcccccaggaccacctcctgtcatcctgccaggaatgaaagacattaaaggagagaaaggagatgaagggcctatggggctgaaaggatacctgggcgcaaaaggtatccaaggaatgccaggcatcccagggctgtcaggaatccctgggctgcctgggaggcccggccacatcaaaggagtcaagggagacatcggagtccccggcatccccggtttgccaggattccctggggtggctggcccccctggaattacgggattcccaggattcataggaagccggggtgacaaaggtgccccagggagagcaggcctgtatggcgagattggcgcgactggtgatttcggtgacatcggggacactataaatttaccaggaagaccaggcctgaagggggagcggggcaccactggaataccaggtctgaagggattctttggagagaagggaacagaaggtgacatcggcttccctgggataacaggcgtgactggagtccaaggccctcctggacttaaaggacaaacaggctttccagggctgactgggcctccagggtcgcagggagagctggggcggattggactgcctggtggcaaaggagatgatggctggccgggagctccgggcttaccaggttttccgggactccgtgggatccgcggcttacacggcttgccaggcaccaagggctttccaggatccccaggttctgacatccacggagacccaggcttcccaggccctcctggggaaagaggtgacccaggagaggccaacacccttccaggccctgtgggagtcccaggacagaaaggagaccaaggagctccaggggaacgaggcccacctgggagcccaggacttcaggggttcccaggcatcacacccccttccaacatctctggggcacctggtgacaaaggggcgccagggatatttggcctgaaaggttatcggggcccaccagggccaccaggttctgctgctcttcctggaagcaaaggtgacacagggaacccaggagctccaggaaccccagggaccaaaggatgggccggggactccgggccccagggcaggcctggtgtgtttggtctcccaggagaaaaagggcccaggggtgaacaaggcttcatggggaacactggacccaccggggcggtgggcgacagaggccccaagggacccaagggagacccaggattccctggtgcccccgggactgtgggagcccccgggattgcaggaatcccccagaagattgccgtccaaccagggacagtgggtccccaggggaggcgaggcccccctggggcaccgggggagatggggccccagggcccccccggagaaccaggttttcgtggggctccagggaaagctgggccccaaggaagaggtggtgtgtctgctgttcccggcttccggggagatgaaggacccataggccaccaggggccgattggccaagaaggtgcaccaggccgtccagggagcccgggcctgccgggtatgccaggccgcagcgtcagcatcggctacctcctggtgaagcacagccagacggaccaggagcccatgtgcccggtgggcatgaacaaactctggagtggatacagcctgctgtacttcgagggccaggagaaggcgcacaaccaggacctggggctggcgggctcctgcctggcgcggttcagcaccatgcccttcctgtactgcaaccctggtgatgtctgctactatgccagccggaacgacaagtcctactggctctctaccactgcgccgctgcccatgatgcccgtggccgaggacgagatcaagccctacatcagccgctgttctgtgtgtgaggccccggccatcgccatcgcggtccacagtcaggatgtctccatcccacactgcccagctgggtggcggagtttgtggatcggatattccttcctcatgcacacggcggcgggagacgaaggcggtggccaatcactggtgtcaccgggcagctgtctagaggacttccgcgccacaccattcatcgaatgcaatggaggccgcggcacctgccactactacgccaacaagtacagcttctggctgaccaccattcccgagcagagcttccagggctcgccctccgccgacacgctcaaggccggcctcatccgcacacacatcagccgctgccaggtgtgcatgaagaacctgtgagccggcgcgtgccaggaagggccattttggtgcttattcttaacttattacctcaggtgccaacccaaaaattggttttatttttttcttaaaaaaaaaaaagtctaccaaaggaatttgcatccagcagcagcacttagacctgccagccactgtcaccgagcgggtgcaagcactcggggtccctggagggcaagccctgcccacagaaagccaggagcagccctggcccccatcagccctgctagacgcaccgcctgaaggcacagctaaccacttcgcacacacccatgtaaccactgcactttccaatgccacagacaactcacattgttcaactcccttctcggggtgggacagacgagacaacagcacacaggcagccagccgtggccagaggctcgaggggctcaggggctcaggcacccgtccccacacgagggccccgtgggtgggcctggccctgctttctacgccaatgttatgccagctccatgttctcccaaataccgttgatgtgaattattttaaaggcaaaaccgtgctctttattttaaaaaacactgataatcacactgcggtaggtcattcttttgccacatccctatagaccactgggtttggcaaaactcaggcagaagtggagacctttctagacatcattgtcagccttgctacttgaaggtacaccccatagggtcggaggtgctgtccccactgccccacgttgtccctgagatttaacccctccactgctgggggtgagctgtactcttctgactgccccctcctgtgtaacgactacaaaataaaacttggttctgaatatttttaaagttagtcgttacacaggaggaagcagcactaggacatagatattcattccgtcataacaggcaatcttaggcactctatactacaagagatggtttcaattgtacctgttcttaccaaggactaatcaaaatgagttcggaggcgagccagttcaaatttctccctctgtaataaaagttccccaaaaaaagggggcccagggcgtcacagaaaacacaaacaacacaacaccacacaaaaaaaaaacaccctctcctgcgggagag

SEQ ID NO: 349380 - DNA, 6451 bp, Homo sapiens
  misc_feature (1383)..(1383): n is a, c, g, or t
  misc_feature (1776)..(1776): n is a, c, g, or t
gagtgtggctgcagtgcgccgggacaccagggctccgcgctccgcactcaagaggctcccgcgtcccaacccctcgcgcccgcgcgttcgcggatccaggccgaggaccgaaaggggccgcccgagcccccggggccggcgcccagagagcccagcaaggccggccgccctgccggtgtgccgccggcgggtgcttctggaagggccaatgcgttcgggcagcagccctgaagccgagcccgaggctaagtgggactgaccggggcccagagtggacgaaccgccagcatggggagagaccagcgcgcggtggccggccctgccctacggcggtggctgctgctggggacagtgaccgtggggttcctcgcccagagcgtcttggcgggtgtgaagaagtttgatgtgccgtgtggaggaagagattgcagtgggggctgccagtgctaccctgagaaaggtggacgtggtcagcctgggccagtgggcccccaggggtacaatgggccaccaggattacaaggattcccgggactgcagggacgtaaaggagacaagggtgaaaggggagcccccggagtaacaggacccaagggcgacgtgggagcaagaggcgtttctggattccctggtgccgatggaattcctggacacccggggcaaggtgggcccaggggaaggccgggctacgatggctgcaacggaacccagggagactcaggtccacaggggccccccggctctgaggggttcaccgggcctcccgggccccaaggaccaaaagggcagaaaggtgagccttatgcactgcctaaagaggagcgcgacagatatcggggtgaacctggagagcctggattggtcggtttccagggacctcccggccgccctgggcatgtgggacagatgggtccagttggagctccagggagaccaggaccacctggaccccctggaccaaaaggacagcaaggcaacagaggacttggtttctacggagttaagggtgaaaagggtgacgtagggcagccgggacccaacgggattccatcagacaccctccaccccatcatcgcgcccacaggagtcaccttccacccagatcagtacaagggtgaaaaaggcagtgagggggaaccaggaataagaggcatttccttgaagggagaagaaggaatcatgggctttcctggactgaggggttaccctggcttgagtggtgaaaaaggatcaccaggacagaagggaagccgaggcctggatggctatcaagggcctgatggaccccggggacccaagggagaagccggagacccagggccccctggactacctgcctactcccctcacccttccctagcaaaaggtgccagaggtgacccnggattcccaggggcccaaggggagccaggaagccagggtgagccaggagacccgggcctcccaggtccccctggcctctccatcggagatggagatcagaggagaggcctgccgggtgagatgggacccaagggcttcatcggagaccccggcatccctgcgctctacgggggcccacctggacctgatggaaagcgagggcctccaggaccccccgggctccctggaccacctggacctgatggcttcctgtttgggctgaaaggagcaaaaggaagagcaggcttccctgggcttcccggctcccctggagcccgcggaccaaaggggtggaaaggtgacgctggggaatgcagatgtacagaaggcgacgaagctatcaaaggtcttccnggactgccaggacccaagggcttcgcaggcatcaacggggagccggggaggaaaggggacagaggagaccccggccaacacggcctccctgggttcccagggctcaagggagtgcctggcaacattggtgctcccggacccaaaggagcaaaaggagattccagaacaatcacaaccaaaggtgagcggggacagcccggcgtcccaggtgtgcccgggatgaaaggtgacgatggcagcccaggccgcgatgggctcgatggattccccggcctcccaggccctcccggtgatggcatcaagggccctccaggggacccaggctatccaggaatacctggaacgaagggtactccaggagaaatgggccccccaggactgggccttcccggcctcaaaggccaacgtggtttccctggagacgccggcttacctggaccaccaggcttcctgggccctcctggccccgcagggaccccaggacaaatagattgtgacacagatgtgaaaagggccgttggaggtgacagacaggaggccatccagccaggttgcataggagggcccaagggattgccaggcctgccaggacccccaggccccacaggtgccaaaggcctccgaggaatcccaggcttcgcaggagctgatggaggaccagggtccaggggcttgccaggagacgcaggtcgtgaagggttcccaggacccccagggttcataggaccccgaggatccaaaggtgcagtgggcctccctggcccagatggatccccaggtcccatcggcctgccagggccagatgggccccctggggaaaggggcctccctggagaagtcctgggagctcagcccgggccacggggagatgctggtgtgcctggacagcctgggcttaaaggccttcccggagacagaggcccccctggattcagaggaagccaagggatgcctgggatgccagggctgaagggccagccaggcctcccaggaccttccggccagccaggcctgtatgggcctccaggactgcatggattcccaggagctcctggccaagaggggcccttggggctgccaggaatcccaggccgtgaaggtctgcctggtgatagaggggaccctggggacacaggcgctcctggccctgtgggcatgaaaggtctctctggtgacagaggagatgctggcttcacaggggagcaaggccatccaggaagccctggatttaaaggaattgatggaatgcctgggacccccgggctaaaaggagatagaggctcacctgggatggatggtttccaaggcatgcctggactcaaagggagacccgggtttccagggagcaaaggcgaggctggatttttcggaatacccggtctgaagggtctggctggtgagccaggttttaaaggcagccgaggggaccctgggcccccaggaccacctcctgtcatcctgccaggaatgaaagacattaaaggagagaaaggagatgaagggcctatggggctgaaaggatacctgggcgcaaaaggtatccaaggaatgccaggcatcccagggctgtcaggaatccctgggctgcctgggaggcccggccacatcaaaggagtcaagggagacatcggagtccccggcatccccggtttgccaggattccctggggtggctggcccccctggaattacgggattcccaggattcataggaagccggggtgacaaaggtgccccagggagagcaggcctgtatggcgagattggcgcgactggtgatttcggtgacatcggggacactataaatttaccaggaagaccaggcctgaagggggagcggggcaccactggaataccaggtctgaagggattctttggagagaagggaacagaaggtgacatcggcttccctgggataacaggcgtgactggagtccaaggccctcctggacttaaaggacaaacaggctttccagggctgactgggcctccagggtcgcagggagagctggggcggattggactgcctggtggcaaaggagatgatggctggccgggagctccgggcttaccaggttttccgggactccgtgggatccgcggcttacacggcttgccaggcaccaagggctttccaggatccccaggttctgacatccacggagacccaggcttcccaggccctcctggggaaagaggtgacccaggagaggccaacacccttccaggccctgtgggagtcccaggacagaaaggagaccaaggagctccaggggaacgaggcccacctgggagcccaggacttcaggggttcccaggcatcacacccccttccaacatctctggggcacctggtgacaaaggggcgccagggatatttggcctgaaaggttatcggggcccaccagggccaccaggttctgctgctcttcctggaagcaaaggtgacacagggaacccaggagctccaggaaccccagggaccaaaggatgggccggggactccgggccccagggcaggcctggtgtgtttggtctcccaggagaaaaagggcccaggggtgaacaaggcttcatggggaacactggacccaccggggcggtgggcgacagaggccccaagggacccaagggagacccaggattccctggtgcccccgggactgtgggagcccccgggattgcaggaatcccccagaagattgccgtccaaccagggacagtgggtccccaggggaggcgaggcccccctggggcaccgggggagatggggccccagggcccccccggagaaccaggttttcgtggggctccagggaaagctgggccccaaggaagaggtggtgtgtctgctgttcccggcttccggggagatgaaggacccataggccaccaggggccgattggccaagaaggtgcaccaggccgtccagggagcccgggcctgccgggtatgccaggccgcagcgtcagcatcggctacctcctggtgaagcacagccagacggaccaggagcccatgtgcccggtgggcatgaacaaactctggagtggatacagcctgctgtacttcgagggccaggagaaggcgcacaaccaggacctggggctggcgggctcctgcctggcgcggttcagcaccatgcccttcctgtactgcaaccctggtgatgtctgctactatgccagccggaacgacaagtcctactggctctctaccactgcgccgctgcccatgatgcccgtggccgaggacgagatcaagccctacatcagccgctgttctgtgtgtgaggccccggccatcgccatcgcggtccacagtcaggatgtctccatcccacactgcccagctgggtggcggagtttgtggatcggatattccttcctcatgcacacggcggcgggagacgaaggcggtggccaatcactggtgtcaccgggcagctgtctagaggacttccgcgccacaccattcatcgaatgcaatggaggccgcggcacctgccactactacgccaacaagtacagcttctggctgaccaccattcccgagcagagcttccagggctcgccctccgccgacacgctcaaggccggcctcatccgcacacacatcagccgctgccaggtgtgcatgaagaacctgtgagccggcgcgtgccaggaagggccattttggtgcttattcttaacttattacctcaggtgccaacccaaaaattggttttatttttttcttaaaaaaaaaaaagtctaccaaaggaatttgcatccagcagcagcacttagacctgccagccactgtcaccgagcgggtgcaagcactcggggtccctggagggcaagccctgcccacagaaagccaggagcagccctggcccccatcagccctgctagacgcaccgcctgaaggcacagctaaccacttcgcacacacccatgtaaccactgcactttccaatgccacagacaactcacattgttcaactcccttctcggggtgggacagacgagacaacagcacacaggcagccagccgtggccagaggctcgaggggctcaggggctcaggcacccgtccccacacgagggccccgtgggtgggcctggccctgctttctacgccaatgttatgccagctccatgttctcccaaataccgttgatgtgaattattttaaaggcaaaaccgtgctctttattttaaaaaacactgataatcacactgcggtaggtcattcttttgccacatccctatagaccactgggtttggcaaaactcaggcagaagtggagacctttctagacatcattgtcagccttgctacttgaaggtacaccccatagggtcggaggtgctgtccccactgccccacgttgtccctgagatttaacccctccactgctgggggtgagctgtactcttctgactgccccctcctgtgtaacgactacaaaataaaacttggttctgaatatttttaaatttaaaccccgagttgttgaccgccttaatctcgtgtccatagagcaaaacgtctgctcagatggatgcgaggcacagcgtccgcccacgctgctgtttttaatccatctcagtagagttgaacccattcgtggtattacagccatttctcggggaatgtgtttgtttataactcactaatgcttaca

SEQ ID NO: 349381 - DNA, 6761 bp, Homo sapiens
  misc_feature (1383)..(1383): n is a, c, g, or t
  misc_feature (1776)..(1776): n is a, c, g, or t
gagtgtggctgcagtgcgccgggacaccagggctccgcgctccgcactcaagaggctcccgcgtcccaacccctcgcgcccgcgcgttcgcggatccaggccgaggaccgaaaggggccgcccgagcccccggggccggcgcccagagagcccagcaaggccggccgccctgccggtgtgccgccggcgggtgcttctggaagggccaatgcgttcgggcagcagccctgaagccgagcccgaggctaagtgggactgaccggggcccagagtggacgaaccgccagcatggggagagaccagcgcgcggtggccggccctgccctacggcggtggctgctgctggggacagtgaccgtggggttcctcgcccagagcgtcttggcgggtgtgaagaagtttgatgtgccgtgtggaggaagagattgcagtgggggctgccagtgctaccctgagaaaggtggacgtggtcagcctgggccagtgggcccccaggggtacaatgggccaccaggattacaaggattcccgggactgcagggacgtaaaggagacaagggtgaaaggggagcccccggagtaacaggacccaagggcgacgtgggagcaagaggcgtttctggattccctggtgccgatggaattcctggacacccggggcaaggtgggcccaggggaaggccgggctacgatggctgcaacggaacccagggagactcaggtccacaggggccccccggctctgaggggttcaccgggcctcccgggccccaaggaccaaaagggcagaaaggtgagccttatgcactgcctaaagaggagcgcgacagatatcggggtgaacctggagagcctggattggtcggtttccagggacctcccggccgccctgggcatgtgggacagatgggtccagttggagctccagggagaccaggaccacctggaccccctggaccaaaaggacagcaaggcaacagaggacttggtttctacggagttaagggtgaaaagggtgacgtagggcagccgggacccaacgggattccatcagacaccctccaccccatcatcgcgcccacaggagtcaccttccacccagatcagtacaagggtgaaaaaggcagtgagggggaaccaggaataagaggcatttccttgaagggagaagaaggaatcatgggctttcctggactgaggggttaccctggcttgagtggtgaaaaaggatcaccaggacagaagggaagccgaggcctggatggctatcaagggcctgatggaccccggggacccaagggagaagccggagacccagggccccctggactacctgcctactcccctcacccttccctagcaaaaggtgccagaggtgacccnggattcccaggggcccaaggggagccaggaagccagggtgagccaggagacccgggcctcccaggtccccctggcctctccatcggagatggagatcagaggagaggcctgccgggtgagatgggacccaagggcttcatcggagaccccggcatccctgcgctctacgggggcccacctggacctgatggaaagcgagggcctccaggaccccccgggctccctggaccacctggacctgatggcttcctgtttgggctgaaaggagcaaaaggaagagcaggcttccctgggcttcccggctcccctggagcccgcggaccaaaggggtggaaaggtgacgctggggaatgcagatgtacagaaggcgacgaagctatcaaaggtcttccnggactgccaggacccaagggcttcgcaggcatcaacggggagccggggaggaaaggggacagaggagaccccggccaacacggcctccctgggttcccagggctcaagggagtgcctggcaacattggtgctcccggacccaaaggagcaaaaggagattccagaacaatcacaaccaaaggtgagcggggacagcccggcgtcccaggtgtgcccgggatgaaaggtgacgatggcagcccaggccgcgatgggctcgatggattccccggcctcccaggccctcccggtgatggcatcaagggccctccaggggacccaggctatccaggaatacctggaacgaagggtactccaggagaaatgggccccccaggactgggccttcccggcctcaaaggccaacgtggtttccctggagacgccggcttacctggaccaccaggcttcctgggccctcctggccccgcagggaccccaggacaaatagattgtgacacagatgtgaaaagggccgttggaggtgacagacaggaggccatccagccaggttgcataggagggcccaagggattgccaggcctgccaggacccccaggccccacaggtgccaaaggcctccgaggaatcccaggcttcgcaggagctgatggaggaccagggtccaggggcttgccaggagacgcaggtcgtgaagggttcccaggacccccagggttcataggaccccgaggatccaaaggtgcagtgggcctccctggcccagatggatccccaggtcccatcggcctgccagggccagatgggccccctggggaaaggggcctccctggagaagtcctgggagctcagcccgggccacggggagatgctggtgtgcctggacagcctgggcttaaaggccttcccggagacagaggcccccctggattcagaggaagccaagggatgcctgggatgccagggctgaagggccagccaggcctcccaggaccttccggccagccaggcctgtatgggcctccaggactgcatggattcccaggagctcctggccaagaggggcccttggggctgccaggaatcccaggccgtgaaggtctgcctggtgatagaggggaccctggggacacaggcgctcctggccctgtgggcatgaaaggtctctctggtgacagaggagatgctggcttcacaggggagcaaggccatccaggaagccctggatttaaaggaattgatggaatgcctgggacccccgggctaaaaggagatagaggctcacctgggatggatggtttccaaggcatgcctggactcaaagggagacccgggtttccagggagcaaaggcgaggctggatttttcggaatacccggtctgaagggtctggctggtgagccaggttttaaaggcagccgaggggaccctgggcccccaggaccacctcctgtcatcctgccaggaatgaaagacattaaaggagagaaaggagatgaagggcctatggggctgaaaggatacctgggcgcaaaaggtatccaaggaatgccaggcatcccagggctgtcaggaatccctgggctgcctgggaggcccggccacatcaaaggagtcaagggagacatcggagtccccggcatccccggtttgccaggattccctggggtggctggcccccctggaattacgggattcccaggattcataggaagccggggtgacaaaggtgccccagggagagcaggcctgtatggcgagattggcgcgactggtgatttcggtgacatcggggacactataaatttaccaggaagaccaggcctgaagggggagcggggcaccactggaataccaggtctgaagggattctttggagagaagggaacagaaggtgacatcggcttccctgggataacaggcgtgactggagtccaaggccctcctggacttaaaggacaaacaggctttccagggctgactgggcctccagggtcgcagggagagctggggcggattggactgcctggtggcaaaggagatgatggctggccgggagctccgggcttaccaggttttccgggactccgtgggatccgcggcttacacggcttgccaggcaccaagggctttccaggatccccaggttctgacatccacggagacccaggcttcccaggccctcctggggaaagaggtgacccaggagaggccaacacccttccaggccctgtgggagtcccaggacagaaaggagaccaaggagctccaggggaacgaggcccacctgggagcccaggacttcaggggttcccaggcatcacacccccttccaacatctctggggcacctggtgacaaaggggcgccagggatatttggcctgaaaggttatcggggcccaccagggccaccaggttctgctgctcttcctggaagcaaaggtgacacagggaacccaggagctccaggaaccccagggaccaaaggatgggccggggactccgggccccagggcaggcctggtgtgtttggtctcccaggagaaaaagggcccaggggtgaacaaggcttcatggggaacactggacccaccggggcggtgggcgacagaggccccaagggacccaagggagacccaggattccctggtgcccccgggactgtgggagcccccgggattgcaggaatcccccagaagattgccgtccaaccagggacagtgggtccccaggggaggcgaggcccccctggggcaccgggggagatggggccccagggcccccccggagaaccaggttttcgtggggctccagggaaagctgggccccaaggaagaggtggtgtgtctgctgttcccggcttccggggagatgaaggacccataggccaccaggggccgattggccaagaaggtgcaccaggccgtccagggagcccgggcctgccgggtatgccaggccgcagcgtcagcatcggctacctcctggtgaagcacagccagacggaccaggagcccatgtgcccggtgggcatgaacaaactctggagtggatacagcctgctgtacttcgagggccaggagaaggcgcacaaccaggacctggggctggcgggctcctgcctggcgcggttcagcaccatgcccttcctgtactgcaaccctggtgatgtctgctactatgccagccggaacgacaagtcctactggctctctaccactgcgccgctgcccatgatgcccgtggccgaggacgagatcaagccctacatcagccgctgttctgtgtgtgaggccccggccatcgccatcgcggtccacagtcaggatgtctccatcccacactgcccagctgggtggcggagtttgtggatcggatattccttcctcatgcacacggcggcgggagacgaaggcggtggccaatcactggtgtcaccgggcagctgtctagaggacttccgcgccacaccattcatcgaatgcaatggaggccgcggcacctgccactactacgccaacaagtacagcttctggctgaccaccattcccgagcagagcttccagggctcgccctccgccgacacgctcaaggccggcctcatccgcacacacatcagccgctgccaggtgtgcatgaagaacctgtgagccggcgcgtgccaggaagggccattttggtgcttattcttaacttattacctcaggtgccaacccaaaaattggttttatttttttcttaaaaaaaaaaaagtctaccaaaggaatttgcatccagcagcagcacttagacctgccagccactgtcaccgagcgggtgcaagcactcggggtccctggagggcaagccctgcccacagaaagccaggagcagccctggcccccatcagccctgctagacgcaccgcctgaaggcacagctaaccacttcgcacacacccatgtaaccactgcactttccaatgccacagacaactcacattgttcaactcccttctcggggtgggacagacgagacaacagcacacaggcagccagccgtggccagaggctcgaggggctcaggggctcaggcacccgtccccacacgagggccccgtgggtgggcctggccctgctttctacgccaatgttatgccagctccatgttctcccaaataccgttgatgtgaattattttaaaggcaaaaccgtgctctttattttaaaaaacactgataatcacactgcggtaggtcattcttttgccacatccctatagaccactgggtttggcaaaactcaggcagaagtggagacctttctagacatcattgtcagccttgctacttgaaggtacaccccatagggtcggaggtgctgtccccactgccccacgttgtccctgagatttaacccctccactgctgggggtgagctgtactcttctgactgccccctcctgtgtaacgactacaaaataaaacttggttctgaatatttttaaaaaaagaaaaaaaaaaaaaaaaaaaaaaaaataaaaaaaaaaaaaaaaaaaaaaaaaaaaacattttggcccccttggcccaagccatttttaaactggacaagttttatcctggggcccaaattcggggctaattggccaaattccccttaagggggggggtttaaaattaaagggcccggtttttaaaaaggttgaacctgggaaaaccctgggggtccccaacttaaaccctttggaagaaaatccctttttgccaagtggggtaaaaaccaaaaggccctacccgaatggcctttcaaaaaatttgccacccctaaagggcaatggaaatttgaagggtaaaatttttgttaaaaatccgggtaaatttttggaaaaccacttattttttaccaaagggcccaaatcggaaaaccccttataaataaaagaattcccgcaaagggtttagggttgtccaatttgaaacaggtcccttttacgggcccccgtgggg

SEQ ID NO: 349382 - DNA, 738 bp, Homo sapiens
tcaacacaccttagttacaggctgagccacacccctcttgccactgctggctgatgattcgaatttgcatccagcagcagcacttagacctgccagccactgtcaccgagcgggtgcaagcactcggggtccctggagggcaagccctgcccacagaaagccaggagcagccctggcccccatcagccctgctagacgcaccgcctgaaggcacagctaaccacttcgcacacacccatgtaaccactgcactttccaatgccacagacaacagcacacaggcagccagccgtggccagaggctcgaggggctcaggggctcaggcacccgtccccacacgagggccccgtgggtgggcctggccctgctttctacgccaatgttatgccagctccatgttctcccaaataccgttgatgtgaattattttaaaggcaaaaccgtgctctttattttaaaaaacactgataatcacactgcggtaggtcattcttttgccacatccctatagaccactgggtttggcaaaactcaggcagaagtggagacctttctagacatcattgtcagccttgctacttgaaggtacaccccatagggtcggaggtgctgtccccactgccccacgttgtccctgagatttaacccctccactgctgggggtgagctgtactcttctgactgccccctcctgtgtaacgactacaaaataaaacttggttctgaatatttttaaa

SEQ ID NO: 349383 - DNA, 2571 bp, Homo sapiens
  misc_feature (1383)..(1383): n is a, c, g, or t
  misc_feature (1776)..(1776): n is a, c, g, or t
gagtgtggctgcagtgcgccgggacaccagggctccgcgctccgcactcaagaggctcccgcgtcccaacccctcgcgcccgcgcgttcgcggatccaggccgaggaccgaaaggggccgcccgagcccccggggccggcgcccagagagcccagcaaggccggccgccctgccggtgtgccgccggcgggtgcttctggaagggccaatgcgttcgggcagcagccctgaagccgagcccgaggctaagtgggactgaccggggcccagagtggacgaaccgccagcatggggagagaccagcgcgcggtggccggccctgccctacggcggtggctgctgctggggacagtgaccgtggggttcctcgcccagagcgtcttggcgggtgtgaagaagtttgatgtgccgtgtggaggaagagattgcagtgggggctgccagtgctaccctgagaaaggtggacgtggtcagcctgggccagtgggcccccaggggtacaatgggccaccaggattacaaggattcccgggactgcagggacgtaaaggagacaagggtgaaaggggagcccccggagtaacaggacccaagggcgacgtgggagcaagaggcgtttctggattccctggtgccgatggaattcctggacacccggggcaaggtgggcccaggggaaggccgggctacgatggctgcaacggaacccagggagactcaggtccacaggggccccccggctctgaggggttcaccgggcctcccgggccccaaggaccaaaagggcagaaaggtgagccttatgcactgcctaaagaggagcgcgacagatatcggggtgaacctggagagcctggattggtcggtttccagggacctcccggccgccctgggcatgtgggacagatgggtccagttggagctccagggagaccaggaccacctggaccccctggaccaaaaggacagcaaggcaacagaggacttggtttctacggagttaagggtgaaaagggtgacgtagggcagccgggacccaacgggattccatcagacaccctccaccccatcatcgcgcccacaggagtcaccttccacccagatcagtacaagggtgaaaaaggcagtgagggggaaccaggaataagaggcatttccttgaagggagaagaaggaatcatgggctttcctggactgaggggttaccctggcttgagtggtgaaaaaggatcaccaggacagaagggaagccgaggcctggatggctatcaagggcctgatggaccccggggacccaagggagaagccggagacccagggccccctggactacctgcctactcccctcacccttccctagcaaaaggtgccagaggtgacccnggattcccaggggcccaaggggagccaggaagccagggtgagccaggagacccgggcctcccaggtccccctggcctctccatcggagatggagatcagaggagaggcctgccgggtgagatgggacccaagggcttcatcggagaccccggcatccctgcgctctacgggggcccacctggacctgatggaaagcgagggcctccaggaccccccgggctccctggaccacctggacctgatggcttcctgtttgggctgaaaggagcaaaaggaagagcaggcttccctgggcttcccggctcccctggagcccgcggaccaaaggggtggaaaggtgacgctggggaatgcagatgtacagaaggcgacgaagctatcaaaggtcttccnggactgccaggacccaagggcttcgcaggcatcaacggggagccggggaggaaaggggacagaggagaccccggccaacacggcctccctgggttcccagggctcaagggagtgcctggcaacattggtgctcccggacccaaaggagcaaaaggagattccagaacaatcacaaccaaaggtgagcggggacagcccggcgtcccaggtgtgcccgggatgaaaggtgacgatggcagcccaggccgcgatgggctcgatggattccccggcctcccaggccctcccggtgatggcatcaagggccctccaggggacccaggctatccaggaatacctggaacgaagggtactccaggagaaatgggccccccaggactgggccttcccggcctcaaaggccaacgtggtttccctggagacgccggcttacctggaccaccaggcttcctgggccctcctggccccgcagggaccccaggacaaatagattgtgacacagatgtgaaaagggccgttggaggtgacagacaggaggccatccagccaggttgcataggagggcccaagggattgccaggcctgccaggacccccaggccccacaggtgccaaaggcctccgaggaatcccaggcttcgcaggagctgatggaggaccagggtccaggggcttgccaggagacgcaggtcgtgaagggttcccaggacccccagggttcataggaccccgaggatccaaaggtgcaccaaacttcagggaagccatgcgcattggagcagaggtttaccacaac

SEQ ID NO: 349384 - DNA, 2719 bp, Homo sapiens
  misc_feature (1383)..(1383): n is a, c, g, or t
  misc_feature (1776)..(1776): n is a, c, g, or t
gagtgtggctgcagtgcgccgggacaccagggctccgcgctccgcactcaagaggctcccgcgtcccaacccctcgcgcccgcgcgttcgcggatccaggccgaggaccgaaaggggccgcccgagcccccggggccggcgcccagagagcccagcaaggccggccgccctgccggtgtgccgccggcgggtgcttctggaagggccaatgcgttcgggcagcagccctgaagccgagcccgaggctaagtgggactgaccggggcccagagtggacgaaccgccagcatggggagagaccagcgcgcggtggccggccctgccctacggcggtggctgctgctggggacagtgaccgtggggttcctcgcccagagcgtcttggcgggtgtgaagaagtttgatgtgccgtgtggaggaagagattgcagtgggggctgccagtgctaccctgagaaaggtggacgtggtcagcctgggccagtgggcccccaggggtacaatgggccaccaggattacaaggattcccgggactgcagggacgtaaaggagacaagggtgaaaggggagcccccggagtaacaggacccaagggcgacgtgggagcaagaggcgtttctggattccctggtgccgatggaattcctggacacccggggcaaggtgggcccaggggaaggccgggctacgatggctgcaacggaacccagggagactcaggtccacaggggccccccggctctgaggggttcaccgggcctcccgggccccaaggaccaaaagggcagaaaggtgagccttatgcactgcctaaagaggagcgcgacagatatcggggtgaacctggagagcctggattggtcggtttccagggacctcccggccgccctgggcatgtgggacagatgggtccagttggagctccagggagaccaggaccacctggaccccctggaccaaaaggacagcaaggcaacagaggacttggtttctacggagttaagggtgaaaagggtgacgtagggcagccgggacccaacgggattccatcagacaccctccaccccatcatcgcgcccacaggagtcaccttccacccagatcagtacaagggtgaaaaaggcagtgagggggaaccaggaataagaggcatttccttgaagggagaagaaggaatcatgggctttcctggactgaggggttaccctggcttgagtggtgaaaaaggatcaccaggacagaagggaagccgaggcctggatggctatcaagggcctgatggaccccggggacccaagggagaagccggagacccagggccccctggactacctgcctactcccctcacccttccctagcaaaaggtgccagaggtgacccnggattcccaggggcccaaggggagccaggaagccagggtgagccaggagacccgggcctcccaggtccccctggcctctccatcggagatggagatcagaggagaggcctgccgggtgagatgggacccaagggcttcatcggagaccccggcatccctgcgctctacgggggcccacctggacctgatggaaagcgagggcctccaggaccccccgggctccctggaccacctggacctgatggcttcctgtttgggctgaaaggagcaaaaggaagagcaggcttccctgggcttcccggctcccctggagcccgcggaccaaaggggtggaaaggtgacgctggggaatgcagatgtacagaaggcgacgaagctatcaaaggtcttccnggactgccaggacccaagggcttcgcaggcatcaacggggagccggggaggaaaggggacagaggagaccccggccaacacggcctccctgggttcccagggctcaaggtgaggagcaatttcatcatgaagctggcaagacactctgaggcctccccaggtgtcccgttcttgccttttatctcctaagtttacacagcttcagaccggcaacactcatggacccaaggcatggctaaaccattctaaaaacccacataccccaaggcggactttctacatgtccactggtgagactgagaaggggcgctgctgtgggaaccgcagccgacagctcttgaaagagttcaatagggggtcaccacgtgacccagaaatgccactcctggtgtatccccaagagacttgaaagcacgtgtccacacaaacacacatacaccaatgttcacagcagcattcttcaaaataggcagaaggtgaaactatccaaatgtgcgtcacctgatgaatggatcagctaaatctatacagcatctataccacagaatagccctgaccttcacgtgggagcaaggtgctgagccataccacactgtggatgaacctggaacatgttatgccatggggattgagacccacacagaaggacacatgctatcacatggtctctcattctattcttatgaaatgtccacacaggcaacctagaaacaggaagtcgattggtggctgccacaggtggaggtgggggtgggggtggggagtacctgcttaatgggaatggggtttctttttgatataatgaagatgttctgaaattagataagagtgatggttgcacaaccttgtgaaaatactaaaaatcactgaattttatgctttaaaacagtgaactttgtgctatatgaattatatctcaaaaaaacctatcatttttaatgta

SEQ ID NO: 349385 - DNA, 654 bp, Homo sapiens
gagtgtggctgcagtgcgccgggacaccagggctccgcgctccgcactcaagaggctcccgcgtcccaacccctcgcgcccgcgcgttcgcggatccaggccgaggaccgaaaggggccgcccgagcccccggggccggcgcccagagagcccagcaaggccggccgccctgccggtgtgccgccggcgggtgcttctggaagggccaatgcgttcgggcagcagccctgaagccgagcccgaggctaagtgggactgaccggggcccagagtggacgaaccgccagcatggggagagaccagcgcgcggtggccggccctgccctacggcggtggctgctgctggggacagtgaccgtggggttcctcgcccagagcgtcttggcgggtgtgaagaagtttgatgtgccgtgtggaggaagagattgcagtgggggctgccagtgctaccctgagaaaggtggacgtggtcagcctgggccagtgggcccccaggggtacaatgggccaccaggattacaaggaatcgagcagtccctgtcctcagggatccagcgctggacgtagttggggccgttgtcccgaggccacacgatcacagtgtctctggatgccagggaggggtcctctgggaagaagttgaatggccggagc

SEQ ID NO: 349386 - DNA, 335 bp, Homo sapiens
catcaagggccctccaggggacccaggctatccaggaatacctggaacgaagggtactccaggagaaatgggccccccaggactgggccttcccggcctcaaaggccaacgtggtttccctggagacgccggcttacctggaccaccaggcttcctgggccctcctggccccgcagggaccccaggacaaataggtatgaaggaatcctcccttttacctttcacagtcctgagacattccacgctttcctttgtcagtgtagacgtttcccagtagagtcagatgaggatgctgttttgcctcatctgttctcgcacgtacaagggatgaccca

SEQ ID NO: 349387 - DNA, 3535 bp, Homo sapiens
ggaaaggtgtacgcaggcgcagtggcgtctaaatttgggcccactaaatgcgtcggagcatctccgcgcccaggcggctcctcctcactgcggcaacccgggaaaacttgtgaactaatcagaaaaagtggaaggcgggagatcttggggcgctgtccaatggcgcggaagagaacaaatgagctggccaatcgggaacggcacgggggcgggctcgctcggcgcgaagttcgggcccgggaattccgaaggaggggtaggcgctgcccgcgcgcagaggccgcgcccctcctggccccggcttcttggctgtcaaacagatgcagcaacgtcggctcctgccgaggagcccaaggggtcccgggatccgccgcacaggctggcactgcttgaagaggaggctactcggagactgcgccgcgcggtggattcattgccctcggaggttcaaccagttatgagtgagggattggccagaagatcggggcgcaggcaagcaggagtgctctattaggataagcaagtttgacaggaagaagctgctcttctccgaattacacagaggtgatgtgttcgtattgcacgtagacgtgtgtataacaggacctccttccccgcgccccgccaccccgacacacacaggagctgcctaaagtatccttgccttgcagattggaggctccccaaatattttgtgatctgaggatccagctcaagtgaggtgccataggacgtgttcctgagtttgcattgcacggagaccttcctggaatttttcatttgcaagtcggcttaaccaattttgcattgagtcctaggctgcttgcactctgaatttgggctattcaggtagtgtgctcaaagttgaaaccgcatacagcacaactcaagtttgcatcagactgggaagcgaacttaagccagcggtgcgtggcccaggagtgggaaaggaaatggatgcctgaagtggaagaggtggtgcagagggggcaccgcccatgctgccctgcttccaactgctgcgcatagggggcggcaggggcggtgatctctacaccttccacccccccgccggggctggctgcacctatcgcttgggccacagggccgacctgtgtgatgtggccctgcggccccagcaggagcctggcctcatctctgggatccacgccgaactgcatgccgagccccggggtgatgactggagggtcagcctggaagaccacagcagccaaggtactttggtcaataatgtccgactcccaagaggtcacaggctggaattgagtgatggagacctcctgacctttggccctgaagggcccccaggaaccagcccctcggagttctacttcatgttccaacaagtacgagtcaagcctcaggactttgctgccattaccatcccacggtctaggggagaagcccgggttggggctggtttccggcctatgctgccctcccagggggctccacagcggcctctcagcaccttctcccctgcccccaaggccacactgatcctaaactccataggcagcctcagcaagctccggccccagcccctcaccttctcccctagttggggtggaccaaagagcctgcctgttcccgccccacctggggaagtggggaccacgccttctgctccaccccaacgcaatcggaggaaatctgttcaccgagtgttggcggaactggatgatgagagtgagcctcctgagaacccgccaccggtccttatggagcccaggaagaaactccgtgtagacaaagccccactgactcccactggaaatcgacgtggccgtcctcggaagtacccagtgagcgctcccatggctccccctgcagttgggggcggggagccctgtgcagctccttgttgctgcctgccccaggaagagacagtggcctgggttcagtgtgatggctgtgacgtctggttccatgtggcctgtgttggctgcagcatccaggctgccagggaggccgacttccgatgcccagggtgccgggctggcattcagacctaaggtccaccgccaaggcaccatcggacacacctgcccatgagtagacacagcagcgagcaaataggtctgataaataccccccttcccttccctccccaagagggaatgactacagggaagaaggatggattgatgtggactcattcagggcctggagcagaccctggtggccaagacagaagagatggtttcctgccaaagatattgccacctccaggaaattgccagtgagctggaagttcccactattacaagccataaggccatgttgccatggacaccagaatatctgtagtcagagcacctatcagttgcaaaagccatgcctgcaaccgatggaaaatgtaagagggagttcttaaggttcttggtggcatcacccaaggcattctgggaaaacctagggcctggccccaaaacttccctactctgtggctagtcctgctgccaacaaaatcgtagcgacctggcttttcacagctttgcttttatttccaagtcaaggacaagccgcttcattcactcctgggcatttactcttcttgtgggtctgtgatattccttgctttccagggagaatgtgcttggcaaggtctggagaactaattcagaatcttaggggaaggggagagatggaaatacaaacctgcttactggaaaggtgcaaatatatgggttgagctggaggtaggaatacaggtaattaaggtttctagtttaagggaaaacagatctattgccatttaaataaggtaactgggatttggttaagttcacaaagatagcagaagatttatttacaggcttcacctgtactgtcagggcaagagaaagcctggtaaaccagctacagcagtttaccagtgtgatggctgtgacacagctccactccacgggtggacacagcagagggcaactgggctggcctggttcagtgtgaatcaaaccgcttaacccacacatggtacatgtgattttcttttgtgagccttacaccaagccaaactattgtcaaagcatcatttctatagaaataaagccttatcttgacctgttctattaaaacctgccacatccgccctttcctacctagatttaatgagcccaagtttttttacatggaagaaatgactctggggcaaagacccctaatgaactagtggcagagccaggaataaaacttgagtaactaatgagtcacttatgggcagagtatgcaaaaaccttaagtggaaaccaaatagaccctggtatcaagaaagcacaaagtattaatagaagtttctggttggggtgatctaggttcaacagaaataagatgatttctaagtataaagccatttaagaattccagagtagggtgggaaagcaaaaagccagctctgaacaggtaacagctacatggtgactgagtctatgggcaaaagttcttgcatcacaggcttttgggaactagcctatcacagggccctgtacaaataaacttggctgcaatccca

SEQ ID NO: 349388 - DNA, 3709 bp, Homo sapiens
ggaaaggtgtacgcaggcgcagtggcgtctaaatttgggcccactaaatgcgtcggagcatctccgcgcccaggcggctcctcctcactgcggcaacccgggaaaacttgtgaactaatcagaaaaagtggaaggcgggagatcttggggcgctgtccaatggcgcggaagagaacaaatgagctggccaatcgggaacggcacgggggcgggctcgctcggcgcgaagttcgggcccgggaattccgaaggaggggtaggcgctgcccgcgcgcagaggccgcgcccctcctggccccggcttcttggctgtcaaacagatgcagcaacgtcggctcctgccgaggagcccaaggggtcccgggatccgccgcacaggctggcactgcttgaagaggaggctactcggagactgcgccgcgcgggtagatccgaaacggggctggggcggagtgggaaaaggccgggtatgccttgcatgatcgcggggagctccttcctgtttttatcccacctagagaagccgggaagtaggggtttaggtccaatttgttggagtacttaaggactcgtttgcactttcttttgggggatgacagtggattcattgccctcggaggttcaaccagttatgagtgagggattggccagaagatcggggcgcaggcaagcaggagtgctctattaggataagcaagtttgacaggaagaagctgctcttctccgaattacacagaggtgatgtgttcgtattgcacgtagacgtgtgtataacaggacctccttccccgcgccccgccaccccgacacacacaggagctgcctaaagtatccttgccttgcagattggaggctccccaaatattttgtgatctgaggatccagctcaagtgaggtgccataggacgtgttcctgagtttgcattgcacggagaccttcctggaatttttcatttgcaagtcggcttaaccaattttgcattgagtcctaggctgcttgcactctgaatttgggctattcaggtagtgtgctcaaagttgaaaccgcatacagcacaactcaagtttgcatcagactgggaagcgaacttaagccagcggtgcgtggcccaggagtgggaaaggaaatggatgcctgaagtggaagaggtggtgcagagggggcaccgcccatgctgccctgcttccaactgctgcgcatagggggcggcaggggcggtgatctctacaccttccacccccccgccggggctggctgcacctatcgcttgggccacagggccgacctgtgtgatgtggccctgcggccccagcaggagcctggcctcatctctgggatccacgccgaactgcatgccgagccccggggtgatgactggagggtcagcctggaagaccacagcagccaaggtactttggtcaataatgtccgactcccaagaggtcacaggctggaattgagtgatggagacctcctgacctttggccctgaagggcccccaggaaccagcccctcggagttctacttcatgttccaacaagtacgagtcaagcctcaggactttgctgccattaccatcccacggtctaggggagaagcccgggttggggctggtttccggcctatgctgccctcccagggggctccacagcggcctctcagcaccttctcccctgcccccaaggccacactgatcctaaactccataggcagcctcagcaagctccggccccagcccctcaccttctcccctagttggggtggaccaaagagcctgcctgttcccgccccacctggggaagtggggaccacgccttctgctccaccccaacgcaatcggaggaaatctgttcaccgagtgttggcggaactggatgatgagagtgagcctcctgagaacccgccaccggtccttatggagcccaggaagaaactccgtgtagacaaagccccactgactcccactggaaatcgacgtggccgtcctcggaagtacccagtgagcgctcccatggctccccctgcagttgggggcggggagccctgtgcagctccttgttgctgcctgccccaggaagagacagtggcctgggttcagtgtgatggctgtgacgtctggttccatgtggcctgtgttggctgcagcatccaggctgccagggaggccgacttccgatgcccagggtgccgggctggcattcagacctaaggtccaccgccaaggcaccatcggacacacctgcccatgagtagacacagcagcgagcaaataggtctgataaataccccccttcccttccctccccaagagggaatgactacagggaagaaggatggattgatgtggactcattcagggcctggagcagaccctggtggccaagacagaagagatggtttcctgccaaagatattgccacctccaggaaattgccagtgagctggaagttcccactattacaagccataaggccatgttgccatggacaccagaatatctgtagtcagagcacctatcagttgcaaaagccatgcctgcaaccgatggaaaatgtaagagggagttcttaaggttcttggtggcatcacccaaggcattctgggaaaacctagggcctggccccaaaacttccctactctgtggctagtcctgctgccaacaaaatcgtagcgacctggcttttcacagctttgcttttatttccaagtcaaggacaagccgcttcattcactcctgggcatttactcttcttgtgggtctgtgatattccttgctttccagggagaatgtgcttggcaaggtctggagaactaattcagaatcttaggggaaggggagagatggaaatacaaacctgcttactggaaaggtgcaaatatatgggttgagctggaggtaggaatacaggtaattaaggtttctagtttaagggaaaacagatctattgccatttaaataaggtaactgggatttggttaagttcacaaagatagcagaagatttatttacaggcttcacctgtactgtcagggcaagagaaagcctggtaaaccagctacagcagtttaccagtgtgatggctgtgacacagctccactccacgggtggacacagcagagggcaactgggctggcctggttcagtgtgaatcaaaccgcttaacccacacatggtacatgtgattttcttttgtgagccttacaccaagccaaactattgtcaaagcatcatttctatagaaataaagccttatcttgacctgttctattaaaacctgccacatccgccctttcctacctagatttaatgagcccaagtttttttacatggaagaaatgactctggggcaaagacccctaatgaactagtggcagagccaggaataaaacttgagtaactaatgagtcacttatgggcagagtatgcaaaaaccttaagtggaaaccaaatagaccctggtatcaagaaagcacaaagtattaatagaagtttctggttggggtgatctaggttcaacagaaataagatgatttctaagtataaagccatttaagaattccagagtagggtgggaaagcaaaaagccagctctgaacaggtaacagctacatggtgactgagtctatgggcaaaagttcttgcatcacaggcttttgggaactagcctatcacagggccctgtacaaataaacttggctgcaatccca

SEQ ID NO: 349389 - DNA, 4100 bp, Homo sapiens
  misc_feature (4100)..(4100): n is a, c, g, or t
ggaaaggtgtacgcaggcgcagtggcgtctaaatttgggcccactaaatgcgtcggagcatctccgcgcccaggcggctcctcctcactgcggcaacccgggaaaacttgtgaactaatcagaaaaagtggaaggcgggagatcttggggcgctgtccaatggcgcggaagagaacaaatgagctggccaatcgggaacggcacgggggcgggctcgctcggcgcgaagttcgggcccgggaattccgaaggaggggtaggcgctgcccgcgcgcagaggccgcgcccctcctggccccggcttcttggctgtcaaacagatgcagcaacgtcggctcctgccgaggagcccaaggggtcccgggatccgccgcacaggctggcactgcttgaagaggaggctactcggagactgcgccgcgcggtggattcattgccctcggaggttcaaccagttatgagtgagggattggccagaagatcggggcgcaggcaagcaggagtgctctattaggataagcaagtttgacaggaagaagctgctcttctccgaattacacagaggtgatgtgttcgtattgcacgtagacgtgtgtataacaggacctccttccccgcgccccgccaccccgacacacacaggagctgcctaaagtatccttgccttgcagattggaggctccccaaatattttgtgatctgaggatccagctcaagtgaggtgccataggacgtgttcctgagtttgcattgcacggagaccttcctggaatttttcatttgcaagtcggcttaaccaattttgcattgagtcctaggctgcttgcactctgaatttgggctattcaggtagtgtgctcaaagttgaaaccgcatacagcacaactcaagtttgcatcagactgggaagcgaacttaagccagcggtgcgtggcccaggagtgggaaaggaaatggatgcctgaagtggaagaggtggtgcagagggggcaccgcccatgctgccctgcttccaactgctgcgcatagggggcggcaggggcggtgatctctacaccttccacccccccgccggggctggctgcacctatcgcttgggccacagggccgacctgtgtgatgtggccctgcggccccagcaggagcctggcctcatctctgggatccacgccgaactgcatgccgagccccggggtgatgactggagggtcagcctggaagaccacagcagccaaggtactttggtcaataatgtccgactcccaagaggtcacaggctggaattgagtgatggagacctcctgacctttggccctgaagggcccccaggaaccagcccctcggagttctacttcatgttccaacaagtacgagtcaagcctcaggactttgctgccattaccatcccacggtctaggggagaagcccgggttggggctggtttccggcctatgctgccctcccagggggctccacagcggcctctcagcaccttctcccctgcccccaaggccacactgatcctaaactccataggcagcctcagcaagctccggccccagcccctcaccttctcccctagttggggtggaccaaagagcctgcctgttcccgccccacctggggaagtggggaccacgccttctgctccaccccaacgcaatcggaggaaatctgttcaccgagtgttggcggaactggatgatgagagtgagcctcctgagaacccgccaccggtccttatggagcccaggaagaaactccgtgtagacaaagccccactgactcccactggaaatcgacgtggccgtcctcggaagtacccagtgagcgctcccatggctccccctgcagttgggggcggggagccctgtgcagctccttgttgctgcctgccccaggaagagacagtggcctgggttcagtgtgatggctgtgacgtctggttccatgtggcctgtgttggctgcagcatccaggctgccagggaggccgacttccgatgcccagggtgccgggctggcattcagacctaaggtccaccgccaaggcaccatcggacacacctgcccatgagtagacacagcagcgagcaaataggtctgataaataccccccttcccttccctccccaagagggaatgactacagggaagaaggatggattgatgtggactcattcagggcctggagcagaccctggtggccaagacagaagagatggtttcctgccaaagatattgccacctccaggaaattgccagtgagctggaagttcccactattacaagccataaggccatgttgccatggacaccagaatatctgtagtcagagcacctatcagttgcaaaagccatgcctgcaaccgatggaaaatgtaagagggagttcttaaggttcttggtggcatcacccaaggcattctgggaaaacctagggcctggccccaaaacttccctactctgtggctagtcctgctgccaacaaaatcgtagcgacctggcttttcacagctttgcttttatttccaagtcaaggacaagccgcttcattcactcctgggcatttactcttcttgtgggtctgtgatattccttgctttccagggagaatgtgcttggcaaggtctggagaactaattcagaatcttaggggaaggggagagatggaaatacaaacctgcttactggaaaggtgcaaatatatgggttgagctggaggtaggaatacaggtaattaaggtttctagtttaagggaaaacagatctattgccatttaaataaggtaactgggatttggttaagttcacaaagatagcagaagatttatttacaggcttcacctgtactgtcagggcaagagaaagcctggtaaaccagctacagcagtttaccagtgtgatggctgtgacacagctccactccacgggtggacacagcagagggcaactgggctggcctggttcagtgtgaatcaaaccgcttaacccacacatggtacatgtgattttcttttgtgagccttacaccaagccaaactattgtcaaagcatcatttctatagaaataaagccttatcttgacctgttctattaaaacctgccacatccgccctttcctacctagatttaatgagcccaagtttttttacatggaagaaatgactctggggcaaagacccctaatgaactagtggcagagccaggaataaaacttgagtaactaatgagtcacttatgggcagagtatgcaaaaaccttaagtggaaaccaaatagaccctggtatcaagaaagcacaaagtattaatagaagtttctggttggggtgatctaggttcaacagaaatataaagccatttaagaattccagagtagggtgggaaagcaaaaagccagctctgaacaggtaacagctacatggtgactgagtctatgggcaaaagttcttgcatcacaggcttttgggaactagcctatcacagggccctgtacaaataaacttggctgcaatcccaaaaaaaaaaaaaaaaaaaaaaaaaaaaaaaaaaaaaaaaaaaaaaaaaaaaaaaagagagggggggcgcgcgcgcccaagaagatatctctccccgcgggggggcccaaattgtgcgcgcgcgcccccgattttttgggacaacacagagggggcccccactaaaagaggaggagcgcgtatatattataaaaaccacaagagcggcgagggacccccgcgtcttataaaacaaacgagcgcagagagcggggaaaacaacatcgcacaacgggggagaccaaccttggggagaaggagaacacctcaaatctagcgcggggggggagagaaacacattagtggggccacacacctatctcctcttgaagagttattttaagagggcttatggggggggaaaattataaaaaatttataagaggggtgttataagcggggtgtgtataaaacaactaaggaggtgaaaatagatgtgtgggagggatgtaagaaaaaaattgtggcgcatcaaaagagaagttttgtgacttttagggaagaattttttattaccgggggggagcattgtgttatataagn

SEQ ID NO: 349390 - DNA, 3289 bp, Homo sapiens
ggaaaggtgtacgcaggcgcagtggcgtctaaatttgggcccactaaatgcgtcggagcatctccgcgcccaggcggctcctcctcactgcggcaacccgggaaaacttgtgaactaatcagaaaaagtggaaggcgggagatcttggggcgctgtccaatggcgcggaagagaacaaatgagctggccaatcgggaacggcacgggggcgggctcgctcggcgcgaagttcgggcccgggaattccgaaggaggggtaggcgctgcccgcgcgcagaggccgcgcccctcctggccccggcttcttggctgtcaaacagatgcagcaacgtcggctcctgccgaggagcccaaggggtcccgggatccgccgcacaggctggcactgcttgaagaggaggctactcggagactgcgccgcgcggattggaggctccccaaatattttgtgatctgaggatccagctcaagtgaggtgccataggacgtgttcctgagtttgcattgcacggagaccttcctggaatttttcatttgcaagtcggcttaaccaattttgcattgagtcctaggctgcttgcactctgaatttgggctattcaggtagtgtgctcaaagttgaaaccgcatacagcacaactcaagtttgcatcagactgggaagcgaacttaagccagcggtgcgtggcccaggagtgggaaaggaaatggatgcctgaagtggaagaggtggtgcagagggggcaccgcccatgctgccctgcttccaactgctgcgcatagggggcggcaggggcggtgatctctacaccttccacccccccgccggggctggctgcacctatcgcttgggccacagggccgacctgtgtgatgtggccctgcggccccagcaggagcctggcctcatctctgggatccacgccgaactgcatgccgagccccggggtgatgactggagggtcagcctggaagaccacagcagccaaggtactttggtcaataatgtccgactcccaagaggtcacaggctggaattgagtgatggagacctcctgacctttggccctgaagggcccccaggaaccagcccctcggagttctacttcatgttccaacaagtacgagtcaagcctcaggactttgctgccattaccatcccacggtctaggggagaagcccgggttggggctggtttccggcctatgctgccctcccagggggctccacagcggcctctcagcaccttctcccctgcccccaaggccacactgatcctaaactccataggcagcctcagcaagctccggccccagcccctcaccttctcccctagttggggtggaccaaagagcctgcctgttcccgccccacctggggaagtggggaccacgccttctgctccaccccaacgcaatcggaggaaatctgttcaccgagtgttggcggaactggatgatgagagtgagcctcctgagaacccgccaccggtccttatggagcccaggaagaaactccgtgtagacaaagccccactgactcccactggaaatcgacgtggccgtcctcggaagtacccagtgagcgctcccatggctccccctgcagttgggggcggggagccctgtgcagctccttgttgctgcctgccccaggaagagacagtggcctgggttcagtgtgatggctgtgacgtctggttccatgtggcctgtgttggctgcagcatccaggctgccagggaggccgacttccgatgcccagggtgccgggctggcattcagacctaaggtccaccgccaaggcaccatcggacacacctgcccatgagtagacacagcagcgagcaaataggtctgataaataccccccttcccttccctccccaagagggaatgactacagggaagaaggatggattgatgtggactcattcagggcctggagcagaccctggtggccaagacagaagagatggtttcctgccaaagatattgccacctccaggaaattgccagtgagctggaagttcccactattacaagccataaggccatgttgccatggacaccagaatatctgtagtcagagcacctatcagttgcaaaagccatgcctgcaaccgatggaaaatgtaagagggagttcttaaggttcttggtggcatcacccaaggcattctgggaaaacctagggcctggccccaaaacttccctactctgtggctagtcctgctgccaacaaaatcgtagcgacctggcttttcacagctttgcttttatttccaagtcaaggacaagccgcttcattcactcctgggcatttactcttcttgtgggtctgtgatattccttgctttccagggagaatgtgcttggcaaggtctggagaactaattcagaatcttaggggaaggggagagatggaaatacaaacctgcttactggaaaggtgcaaatatatgggttgagctggaggtaggaatacaggtaattaaggtttctagtttaagggaaaacagatctattgccatttaaataaggtaactgggatttggttaagttcacaaagatagcagaagatttatttacaggcttcacctgtactgtcagggcaagagaaagcctggtaaaccagctacagcagtttaccagtgtgatggctgtgacacagctccactccacgggtggacacagcagagggcaactgggctggcctggttcagtgtgaatcaaaccgcttaacccacacatggtacatgtgattttcttttgtgagccttacaccaagccaaactattgtcaaagcatcatttctatagaaataaagccttatcttgacctgttctattaaaacctgccacatccgccctttcctacctagatttaatgagcccaagtttttttacatggaagaaatgactctggggcaaagacccctaatgaactagtggcagagccaggaataaaacttgagtaactaatgagtcacttatgggcagagtatgcaaaaaccttaagtggaaaccaaatagaccctggtatcaagaaagcacaaagtattaatagaagtttctggttggggtgatctaggttcaacagaaataagatgatttctaagtataaagccatttaagaattccagagtagggtgggaaagcaaaaagccagctctgaacaggtaacagctacatggtgactgagtctatgggcaaaagttcttgcatcacaggcttttgggaactagcctatcacagggccctgtacaaataaacttggctgcaatccca

SEQ ID NO: 349391 - DNA, 3428 bp, Homo sapiens
ggaaaggtgtacgcaggcgcagtggcgtctaaatttgggcccactaaatgcgtcggagcatctccgcgcccaggcggctcctcctcactgcggcaacccgggaaaacttgtgaactaatcagaaaaagtggaaggcgggagatcttggggcgctgtccaatggcgcggaagagaacaaatgagctggccaatcgggaacggcacgggggcgggctcgctcggcgcgaagttcgggcccgggaattccgaaggaggggtaggcgctgcccgcgcgcagaggccgcgcccctcctggccccggcttcttggctgtcaaacagatgcagcaacgtcggctcctgccgaggagcccaaggggtcccgggatccgccgcacaggctggcactgcttgaagaggaggctactcggagactgcgccgcgcggtggattcattgccctcggaggttcaaccagttatgagtgagggattggccagaagatcggggcgcaggcaagcaggagtgctctattaggataagcaagtttgacaggaagaagctgctcttctccgaattacacagagattggaggctccccaaatattttgtgatctgaggatccagctcaagtgaggtgccataggacgtgttcctgagtttgcattgcacggagaccttcctggaatttttcatttgcaagtcggcttaaccaattttgcattgagtcctaggctgcttgcactctgaatttgggctattcaggtagtgtgctcaaagttgaaaccgcatacagcacaactcaagtttgcatcagactgggaagcgaacttaagccagcggtgcgtggcccaggagtgggaaaggaaatggatgcctgaagtggaagaggtggtgcagagggggcaccgcccatgctgccctgcttccaactgctgcgcatagggggcggcaggggcggtgatctctacaccttccacccccccgccggggctggctgcacctatcgcttgggccacagggccgacctgtgtgatgtggccctgcggccccagcaggagcctggcctcatctctgggatccacgccgaactgcatgccgagccccggggtgatgactggagggtcagcctggaagaccacagcagccaaggtactttggtcaataatgtccgactcccaagaggtcacaggctggaattgagtgatggagacctcctgacctttggccctgaagggcccccaggaaccagcccctcggagttctacttcatgttccaacaagtacgagtcaagcctcaggactttgctgccattaccatcccacggtctaggggagaagcccgggttggggctggtttccggcctatgctgccctcccagggggctccacagcggcctctcagcaccttctcccctgcccccaaggccacactgatcctaaactccataggcagcctcagcaagctccggccccagcccctcaccttctcccctagttggggtggaccaaagagcctgcctgttcccgccccacctggggaagtggggaccacgccttctgctccaccccaacgcaatcggaggaaatctgttcaccgagtgttggcggaactggatgatgagagtgagcctcctgagaacccgccaccggtccttatggagcccaggaagaaactccgtgtagacaaagccccactgactcccactggaaatcgacgtggccgtcctcggaagtacccagtgagcgctcccatggctccccctgcagttgggggcggggagccctgtgcagctccttgttgctgcctgccccaggaagagacagtggcctgggttcagtgtgatggctgtgacgtctggttccatgtggcctgtgttggctgcagcatccaggctgccagggaggccgacttccgatgcccagggtgccgggctggcattcagacctaaggtccaccgccaaggcaccatcggacacacctgcccatgagtagacacagcagcgagcaaataggtctgataaataccccccttcccttccctccccaagagggaatgactacagggaagaaggatggattgatgtggactcattcagggcctggagcagaccctggtggccaagacagaagagatggtttcctgccaaagatattgccacctccaggaaattgccagtgagctggaagttcccactattacaagccataaggccatgttgccatggacaccagaatatctgtagtcagagcacctatcagttgcaaaagccatgcctgcaaccgatggaaaatgtaagagggagttcttaaggttcttggtggcatcacccaaggcattctgggaaaacctagggcctggccccaaaacttccctactctgtggctagtcctgctgccaacaaaatcgtagcgacctggcttttcacagctttgcttttatttccaagtcaaggacaagccgcttcattcactcctgggcatttactcttcttgtgggtctgtgatattccttgctttccagggagaatgtgcttggcaaggtctggagaactaattcagaatcttaggggaaggggagagatggaaatacaaacctgcttactggaaaggtgcaaatatatgggttgagctggaggtaggaatacaggtaattaaggtttctagtttaagggaaaacagatctattgccatttaaataaggtaactgggatttggttaagttcacaaagatagcagaagatttatttacaggcttcacctgtactgtcagggcaagagaaagcctggtaaaccagctacagcagtttaccagtgtgatggctgtgacacagctccactccacgggtggacacagcagagggcaactgggctggcctggttcagtgtgaatcaaaccgcttaacccacacatggtacatgtgattttcttttgtgagccttacaccaagccaaactattgtcaaagcatcatttctatagaaataaagccttatcttgacctgttctattaaaacctgccacatccgccctttcctacctagatttaatgagcccaagtttttttacatggaagaaatgactctggggcaaagacccctaatgaactagtggcagagccaggaataaaacttgagtaactaatgagtcacttatgggcagagtatgcaaaaaccttaagtggaaaccaaatagaccctggtatcaagaaagcacaaagtattaatagaagtttctggttggggtgatctaggttcaacagaaataagatgatttctaagtataaagccatttaagaattccagagtagggtgggaaagcaaaaagccagctctgaacaggtaacagctacatggtgactgagtctatgggcaaaagttcttgcatcacaggcttttgggaactagcctatcacagggccctgtacaaataaacttggctgcaatccca

SEQ ID NO: 349392 - DNA, 3239 bp, Homo sapiens
ggaaaggtgtacgcaggcgcagtggcgtctaaatttgggcccactaaatgcgtcggagcatctccgcgcccaggcggctcctcctcactgcggcaacccgggaaaacttgtgaactaatcagaaaaagtggaaggcgggagatcttggggcgctgtccaatggcgcggaagagaacaaatgagctggccaatcgggaacggcacgggggcgggctcgctcggcgcgaagttcgggcccgggaattccgaaggaggggtaggcgctgcccgcgcgcagaggccgcgcccctcctggccccggcttcttggctgtcaaacagatgcagcaacgtcggctcctgccgaggagcccaaggggtcccgggatccgccgcacaggctggcactgcttgaagaggaggctactcggagactgcgccgcgcggattggaggctccccaaatattttgtgatctgaggatccagctcaagtgaggtgccataggacgtgttcctgagtttgcattgcacggagaccttcctggaatttttcatttgcaagtcggcttaaccaattttgcattgagtcctaggctgcttgcactctgaatttgggctattcaggtagtgtgctcaaagttgaaaccgcatacagcacaactcaagtttgcatcagactgggaagcgaacttaagccagcggtgcgtggcccaggagtgggaaaggaaatggatgcctgaagtggaagaggtggtgcagagggggcaccgcccatgctgccctgcttccaactgctgcgcatagggggcggcaggggcggtgatctctacaccttccacccccccgccggggctggctgcacctatcgcttgggccacagggccgacctgtgtgatgtggccctgcggccccagcaggagcctggcctcatctctgggatccacgccgaactgcatgccgagccccggggtgatgactggagggtcagcctggaagaccacagcagccaaggtactttggtcaataatgtccgactcccaagaggtcacaggctggaattgagtgatggagacctcctgacctttggccctgaagggcccccaggaaccagcccctcggagttctacttcatgttccaacaagtacgagtcaagcctcaggactttgctgccattaccatcccacggtctaggggagaagcccgggttggggctggtttccggcctatgctgccctcccagggggctccacagcggcctctcagcaccttctcccctgcccccaaggccacactgatcctaaactccataggcagcctcagcaagctccggccccagcccctcacctggggaagtggggaccacgccttctgctccaccccaacgcaatcggaggaaatctgttcaccgagtgttggcggaactggatgatgagagtgagcctcctgagaacccgccaccggtccttatggagcccaggaagaaactccgtgtagacaaagccccactgactcccactggaaatcgacgtggccgtcctcggaagtacccagtgagcgctcccatggctccccctgcagttgggggcggggagccctgtgcagctccttgttgctgcctgccccaggaagagacagtggcctgggttcagtgtgatggctgtgacgtctggttccatgtggcctgtgttggctgcagcatccaggctgccagggaggccgacttccgatgcccagggtgccgggctggcattcagacctaaggtccaccgccaaggcaccatcggacacacctgcccatgagtagacacagcagcgagcaaataggtctgataaataccccccttcccttccctccccaagagggaatgactacagggaagaaggatggattgatgtggactcattcagggcctggagcagaccctggtggccaagacagaagagatggtttcctgccaaagatattgccacctccaggaaattgccagtgagctggaagttcccactattacaagccataaggccatgttgccatggacaccagaatatctgtagtcagagcacctatcagttgcaaaagccatgcctgcaaccgatggaaaatgtaagagggagttcttaaggttcttggtggcatcacccaaggcattctgggaaaacctagggcctggccccaaaacttccctactctgtggctagtcctgctgccaacaaaatcgtagcgacctggcttttcacagctttgcttttatttccaagtcaaggacaagccgcttcattcactcctgggcatttactcttcttgtgggtctgtgatattccttgctttccagggagaatgtgcttggcaaggtctggagaactaattcagaatcttaggggaaggggagagatggaaatacaaacctgcttactggaaaggtgcaaatatatgggttgagctggaggtaggaatacaggtaattaaggtttctagtttaagggaaaacagatctattgccatttaaataaggtaactgggatttggttaagttcacaaagatagcagaagatttatttacaggcttcacctgtactgtcagggcaagagaaagcctggtaaaccagctacagcagtttaccagtgtgatggctgtgacacagctccactccacgggtggacacagcagagggcaactgggctggcctggttcagtgtgaatcaaaccgcttaacccacacatggtacatgtgattttcttttgtgagccttacaccaagccaaactattgtcaaagcatcatttctatagaaataaagccttatcttgacctgttctattaaaacctgccacatccgccctttcctacctagatttaatgagcccaagtttttttacatggaagaaatgactctggggcaaagacccctaatgaactagtggcagagccaggaataaaacttgagtaactaatgagtcacttatgggcagagtatgcaaaaaccttaagtggaaaccaaatagaccctggtatcaagaaagcacaaagtattaatagaagtttctggttggggtgatctaggttcaacagaaataagatgatttctaagtataaagccatttaagaattccagagtagggtgggaaagcaaaaagccagctctgaacaggtaacagctacatggtgactgagtctatgggcaaaagttcttgcatcacaggcttttgggaactagcctatcacagggccctgtacaaataaacttggctgcaatccca

SEQ ID NO: 349393 - DNA, 478 bp, Homo sapiens
tcagcaagctccggccccagcccctcaccttctcccctagttggggtggaccaaagagcctgcctgttcccgccccacctggggaagtggggaccacgccttctgctccaccccaacgcaatcggaggaaatctgttcaccgagtgttggcggaactggatgatgagagtgagcctcctgagaacccgccaccggtccttatggagcccaggaagaaactccgtgtagacaaagccccactgactcccactgggtaagtggagtcctcacttggccctctcagtgttttactgcttttcgattccttgtatccctaggctgtgaggaggtccccctgcctggggggatgggcacgggaggtggaatagatggaatggcaagacctgggttagctctgataggaaaagaaaaatatgtgcaggagaacatgagaggtggggtggggcagtgcttataaaacaaccggagtgagcatgtc

SEQ ID NO: 349394 - DNA, 410 bp, Homo sapiens
ttaagtggaaaccaaatagaccctggtatcaagaaagcacaaagtattaatagaagtttctggttggggtgatctaggttcaacagaaataagatgatttctaagtataaagccatttaagaattccagagtagggtgggaaagcaaaaagccagctctgaacaggtaacagctacatggtgactgagtctatgggcaaaagttcttgcatcacaggcttttgggaactagcctatcacagggccctgtacaaataaacttggctgcaatcccagctctccctctgatgttgtgtgaccttaaggagtgtaaatggcaccttagtttcagggtcacttgggtatgagcattggatattcccatccccacctcagtaactgaaggacaaaccaagataagtgtgtctatct

SEQ ID NO: 349395 - DNA, 4116 bp, Homo sapiens
  misc_feature (4116)..(4116): n is a, c, g, or t
ggaaaggtgtacgcaggcgcagtggcgtctaaatttgggcccactaaatgcgtcggagcatctccgcgcccaggcggctcctcctcactgcggcaacccgggaaaacttgtgaactaatcagaaaaagtggaaggcgggagatcttggggcgctgtccaatggcgcggaagagaacaaatgagctggccaatcgggaacggcacgggggcgggctcgctcggcgcgaagttcgggcccgggaattccgaaggaggggtaggcgctgcccgcgcgcagaggccgcgcccctcctggccccggcttcttggctgtcaaacagatgcagcaacgtcggctcctgccgaggagcccaaggggtcccgggatccgccgcacaggctggcactgcttgaagaggaggctactcggagactgcgccgcgcggtggattcattgccctcggaggttcaaccagttatgagtgagggattggccagaagatcggggcgcaggcaagcaggagtgctctattaggataagcaagtttgacaggaagaagctgctcttctccgaattacacagaggtgatgtgttcgtattgcacgtagacgtgtgtataacaggacctccttccccgcgccccgccaccccgacacacacaggagctgcctaaagtatccttgccttgcagattggaggctccccaaatattttgtgatctgaggatccagctcaagtgaggtgccataggacgtgttcctgagtttgcattgcacggagaccttcctggaatttttcatttgcaagtcggcttaaccaattttgcattgagtcctaggctgcttgcactctgaatttgggctattcaggtagtgtgctcaaagttgaaaccgcatacagcacaactcaagtttgcatcagactgggaagcgaacttaagccagcggtgcgtggcccaggagtgggaaaggaaatggatgcctgaagtggaagaggtggtgcagagggggcaccgcccatgctgccctgcttccaactgctgcgcatagggggcggcaggggcggtgatctctacaccttccacccccccgccggggctggctgcacctatcgcttgggccacagggccgacctgtgtgatgtggccctgcggccccagcaggagcctggcctcatctctgggatccacgccgaactgcatgccgagccccggggtgatgactggagggtcagcctggaagaccacagcagccaaggtactttggtcaataatgtccgactcccaagaggtcacaggctggaattgagtgatggagacctcctgacctttggccctgaagggcccccaggaaccagcccctcggagttctacttcatgttccaacaagtacgagtcaagcctcaggactttgctgccattaccatcccacggtctaggggagaagcccgggttggggctggtttccggcctatgctgccctcccagggggctccacagcggcctctcagcaccttctcccctgcccccaaggccacactgatcctaaactccataggcagcctcagcaagctccggccccagcccctcaccttctcccctagttggggtggaccaaagagcctgcctgttcccgccccacctggggaagtggggaccacgccttctgctccaccccaacgcaatcggaggaaatctgttcaccgagtgttggcggaactggatgatgagagtgagcctcctgagaacccgccaccggtccttatggagcccaggaagaaactccgtgtagacaaagccccactgactcccactggaaatcgacgtggccgtcctcggaagtacccagtgagcgctcccatggctccccctgcagttgggggcggggagccctgtgcagctccttgttgctgcctgccccaggaagagacagtggcctgggttcagtgtgatggctgtgacgtctggttccatgtggcctgtgttggctgcagcatccaggctgccagggaggccgacttccgatgcccagggtgccgggctggcattcagacctaaggtccaccgccaaggcaccatcggacacacctgcccatgagtagacacagcagcgagcaaataggtctgataaataccccccttcccttccctccccaagagggaatgactacagggaagaaggatggattgatgtggactcattcagggcctggagcagaccctggtggccaagacagaagagatggtttcctgccaaagatattgccacctccaggaaattgccagtgagctggaagttcccactattacaagccataaggccatgttgccatggacaccagaatatctgtagtcagagcacctatcagttgcaaaagccatgcctgcaaccgatggaaaatgtaagagggagttcttaaggttcttggtggcatcacccaaggcattctgggaaaacctagggcctggccccaaaacttccctactctgtggctagtcctgctgccaacaaaatcgtagcgacctggcttttcacagctttgcttttatttccaagtcaaggacaagccgcttcattcactcctgggcatttactcttcttgtgggtctgtgatattccttgctttccagggagaatgtgcttggcaaggtctggagaactaattcagaatcttaggggaaggggagagatggaaatacaaacctgcttactggaaaggtgcaaatatatgggttgagctggaggtaggaatacaggtaattaaggtttctagtttaagggaaaacagatctattgccatttaaataaggtaactgggatttggttaagttcacaaagatagcagaagatttatttacaggcttcacctgtactgtcagggcaagagaaagcctggtaaaccagctacagcagtttaccagtgtgatggctgtgacacagctccactccacgggtggacacagcagagggcaactgggctggcctggttcagtgtgaatcaaaccgcttaacccacacatggtacatgtgattttcttttgtgagccttacaccaagccaaactattgtcaaagcatcatttctatagaaataaagccttatcttgacctgttctattaaaacctgccacatccgccctttcctacctagatttaatgagcccaagtttttttacatggaagaaatgactctggggcaaagacccctaatgaactagtggcagagccaggaataaaacttgagtaactaatgagtcacttatgggcagagtatgcaaaaaccttaagtggaaaccaaatagaccctggtatcaagaaagcacaaagtattaatagaagtttctggttggggtgatctaggttcaacagaaataagatgatttctaagtataaagccatttaagaattccagagtagggtgggaaagcaaaaagccagctctgaacaggtaacagctacatggtgactgagtctatgggcaaaagttcttgcatcacaggcttttgggaactagcctatcacagggccctgtacaaataaacttggctgcaatcccaaaaaaaaaaaaaaaaaaaaaaaaaaaaaaaaaaaaaaaaaaaaaaaaaaaaaaaagagagggggggcgcgcgcgcccaagaagatatctctccccgcgggggggcccaaattgtgcgcgcgcgcccccgattttttgggacaacacagagggggcccccactaaaagaggaggagcgcgtatatattataaaaaccacaagagcggcgagggacccccgcgtcttataaaacaaacgagcgcagagagcggggaaaacaacatcgcacaacgggggagaccaaccttggggagaaggagaacacctcaaatctagcgcggggggggagagaaacacattagtggggccacacacctatctcctcttgaagagttattttaagagggcttatggggggggaaaattataaaaaatttataagaggggtgttataagcggggtgtgtataaaacaactaaggaggtgaaaatagatgtgtgggagggatgtaagaaaaaaattgtggcgcatcaaaagagaagttttgtgacttttagggaagaattttttattaccgggggggagcattgtgttatataagn

SEQ ID NO: 349396 - DNA, 3116 bp, Homo sapiens
ggaaaggtgtacgcaggcgcagtggcgtctaaatttgggcccactaaatgcgtcggagcatctccgcgcccaggcggctcctcctcactgcggcaacccgggaaaacttgtgaactaatcagaaaaagtggaaggcgggagatcttggggcgctgtccaatggcgcggaagagaacaaatgagctggccaatcgggaacggcacgggggcgggctcgctcggcgcgaagttcgggcccgggaattccgaaggaggggtaggcgctgcccgcgcgcagaggccgcgcccctcctggccccggcttcttggctgtcaaacagatgcagcaacgtcggctcctgccgaggagcccaaggggtcccgggatccgccgcacaggctggcactgcttgaagaggaggctactcggagactgcgccgcgcggattggaggctccccaaatattttgtgatctgaggatccagctcaagtgaggtgccataggacgtgttcctgagtttgcattgcacggagaccttcctggaatttttcatttgcaagtcggcttaaccaattttgcattgagtcctaggctgcttgcactctgaatttgggctattcaggtagtgtgctcaaagttgaaaccgcatacagcacaactcaagtttgcatcagactgggaagcgaacttaagccagcggtgcgtggcccaggagtgggaaaggaaatggatgcctgaagtggaagaggtggtgcagagggggcaccgcccatgctgccctgcttccaactgctgcgcatagggggcggcaggggcggtgatctctacaccttccacccccccgccggggctggctgcacctatcgcttgggccacagggccgacctgtgtgatgtggccctgcggccccagcaggagcctggcctcatctctgggatccacgccgaactgcatgccgagccccggggtgatgactggagggtcagcctggaagaccacagcagccaaggtactttggtcaataatgtccgactcccaagaggtcacaggctggaattgagtgatggagacctcctgacctttggccctgaagggcccccaggaaccagcccctcggagttctacttcatgttccaacaacctcagcaagctccggccccagcccctcaccttctcccctagttggggtggaccaaagagcctgcctgttcccgccccacctggggaagtggggaccacgccttctgctccaccccaacgcaatcggaggaaatctgttcaccgagtgttggcggaactggatgatgagagtgagcctcctgagaacccgccaccggtccttatggagcccaggaagaaactccgtgtagacaaagccccactgactcccactggaaatcgacgtggccgtcctcggaagtacccagtgagcgctcccatggctccccctgcagttgggggcggggagccctgtgcagctccttgttgctgcctgccccaggaagagacagtggcctgggttcagtgtgatggctgtgacgtctggttccatgtggcctgtgttggctgcagcatccaggctgccagggaggccgacttccgatgcccagggtgccgggctggcattcagacctaaggtccaccgccaaggcaccatcggacacacctgcccatgagtagacacagcagcgagcaaataggtctgataaataccccccttcccttccctccccaagagggaatgactacagggaagaaggatggattgatgtggactcattcagggcctggagcagaccctggtggccaagacagaagagatggtttcctgccaaagatattgccacctccaggaaattgccagtgagctggaagttcccactattacaagccataaggccatgttgccatggacaccagaatatctgtagtcagagcacctatcagttgcaaaagccatgcctgcaaccgatggaaaatgtaagagggagttcttaaggttcttggtggcatcacccaaggcattctgggaaaacctagggcctggccccaaaacttccctactctgtggctagtcctgctgccaacaaaatcgtagcgacctggcttttcacagctttgcttttatttccaagtcaaggacaagccgcttcattcactcctgggcatttactcttcttgtgggtctgtgatattccttgctttccagggagaatgtgcttggcaaggtctggagaactaattcagaatcttaggggaaggggagagatggaaatacaaacctgcttactggaaaggtgcaaatatatgggttgagctggaggtaggaatacaggtaattaaggtttctagtttaagggaaaacagatctattgccatttaaataaggtaactgggatttggttaagttcacaaagatagcagaagatttatttacaggcttcacctgtactgtcagggcaagagaaagcctggtaaaccagctacagcagtttaccagtgtgatggctgtgacacagctccactccacgggtggacacagcagagggcaactgggctggcctggttcagtgtgaatcaaaccgcttaacccacacatggtacatgtgattttcttttgtgagccttacaccaagccaaactattgtcaaagcatcatttctatagaaataaagccttatcttgacctgttctattaaaacctgccacatccgccctttcctacctagatttaatgagcccaagtttttttacatggaagaaatgactctggggcaaagacccctaatgaactagtggcagagccaggaataaaacttgagtaactaatgagtcacttatgggcagagtatgcaaaaaccttaagtggaaaccaaatagaccctggtatcaagaaagcacaaagtattaatagaagtttctggttggggtgatctaggttcaacagaaataagatgatttctaagtataaagccatttaagaattccagagtagggtgggaaagcaaaaagccagctctgaacaggtaacagctacatggtgactgagtctatgggcaaaagttcttgcatcacaggcttttgggaactagcctatcacagggccctgtacaaataaacttggctgcaatccca

SEQ ID NO: 349397 - DNA, 1870 bp, Homo sapiens
ggaaaggtgtacgcaggcgcagtggcgtctaaatttgggcccactaaatgcgtcggagcatctccgcgcccaggcggctcctcctcactgcggcaacccgggaaaacttgtgaactaatcagaaaaagtggaaggcgggagatcttggggcgctgtccaatggcgcggaagagaacaaatgagctggccaatcgggaacggcacgggggcgggctcgctcggcgcgaagttcgggcccgggaattccgaaggaggggtaggcgctgcccgcgcgcagaggccgcgcccctcctggccccggcttcttggctgtcaaacagatgcagcaacgtcggctcctgccgaggagcccaaggggtcccgggatccgccgcacaggctggcactgcttgaagaggaggctactcggagactgcgccgcgcggattggaggctccccaaatattttgtgatctgaggatccagctcaagtgaggtgccataggacgtgttcctgagtttgcattgcacggagaccttcctggaatttttcatttgcaagtcggcttaaccaattttgcattgagtcctaggctgcttgcactctgaatttgggctattcaggtagtgtgctcaaagttgaaaccgcatacagcacaactcaagtttgcatcagactgggaagcgaacttaagccagcggtgcgtggcccaggagtgggaaaggaaatggatgcctgaagtggaagaggtggtgcagagggggcaccgcccatgctgccctgcttccaactgctgcgcatagggggcggcaggggcggtgatctctacaccttccacccccccgccggggctggctgcacctatcgcttgggccacagggccgacctgtgtgatgtggccctgcggccccagcaggagcctggcctcatctctgggatccacgccgaactgcatgccgagccccggggtgatgactggagggtcagcctggaagaccacagcagccaaggtactttggtcaataatgtccgactcccaagaggtcacaggctggaattgagtgatggagacctcctgacctttggccctgaagggcccccaggaaccagcccctcggagttctacttcatgttccaacaagtacgagtcaagcctcaggactttgctgccattaccatcccacggtctaggggagaagcccgggttggggctggtttccggcctatgctgccctcccagggggctccacagcggcctctcagcaccttctcccctgcccccaaggccacactgatcctaaactccataggcagcctcagcaagctccggccccagcccctcaccttctcccctagttggggtggaccaaagagcctgcctgttcccgccccacctggggaagtggggaccacgccttctgctccaccccaacgcaatcggaggaaatctgttcaccgagtgttggcggaactggatgatgagagtgagcctcctgagaacccgccaccggtccttatggagcccaggaagaaactccgtgtagacaaagccccactgactcccactggaaactggcacatccaagggatgcagagcatcgtgaaaggacagaaagagagaccctggcctcgaggagaacacctgtcaggttatgaagaggcatcctaattgatttttaaattcaagagatttatcgagcaccttctataagccagcggctatacaaagtggacaaagagccctgactccagcatgacagaagtgctatttggcacttgtcttcaagttgccacttggatctcttccagtgcactttcttttttcctgcctataacttttaataataaacttccactcctgctctgaaaaataaaaaagtaaataaaata

SEQ ID NO: 349398 - DNA, 2094 bp, Homo sapiens
gcggcatactcagcggcagagacggaagaacagcgctcccgaggccgcgggagcctgcagagaggacagccggcctgcgccgggacatgcggccccaggagctccccaggctcgcgttcccgttgctgctgttgctgttgctgctgctgccgccgccgccgtgccctgcccacagcgccacgcgcttcgaccccacctgggagtccctggacgcccgccagctgcccgcgtggtttgaccaggccaagttcggcatcttcatccactggggagtgttttccgtgcccagcttcggtagcgagtggttctggtggtattggcaaaaggaaaagataccgaagtatgtggaatttatgaaagataattaccctcctagtttcaaatatgaagattttggaccactatttacagcaaaattttttaatgccaaccagtgggcagatatttttcaggcctctggtgccaaatacattgtcttaacttccaaacatcatgaaggctttaccttgtgggggtcagaatattcgtggaactggaatgccatagatgaggggcccaagagggacattgtcaaggaacttgaggtagccattaggaacagaactgacctgcgttttggactgtactattccctttttgaatggtttcatccgctcttccttgaggatgaatccagttcattccataagcggcaatttccagtttctaagacattgccagagctctatgagttagtgaacaactatcagcctgaggttctgtggtcggatggtgacggaggagcaccggatcaatactggaacagcacaggcttcttggcctggttatataatgaaagcccagttcggggcacagtagtcaccaatgatcgttggggagctggtagcatctgtaagcatggtggcttctatacctgcagtgatcgttataacccaggacatcttttgccacataaatgggaaaactgcatgacaatagacaaactgtcctggggctataggagggaagctggaatctctgactatcttacaattgaagaattggtgaagcaacttgtagagacagtttcatgtggaggaaatcttttgatgaatattgggcccacactagatggcaccatttctgtagtttttgaggagcgactgaggcaaatggggtcctggctaaaagtcaatggagaagctatttatgaaacccatacctggcgatcccagaatgacactgtcaccccagatgtgtggtacacatccaagcctaaagaaaaattagtctatgccatttttcttaaatggcccacatcaggacagctgttccttggccatcccaaagctattctgggggcaacagaggtgaaactactgggccatggacagccacttaactggatttctttggagcaaaatggcattatggtagaactgccacagctaaccattcatcagatgccgtgtaaatggggctgggctctagccctgactaatgtgatctaaagtgcagcagagtggctgatgctgcaagttatgtctaaggctaggaactatcaggtgtctataattgtagcacatggagaaagcaaatgtaaaactggataagaaaattattttggcagttcagccctttccctttttcccactaaattttttcttaaattacccatgtaaccattttaactctccagtgcactttgccattaaagtctcttcacattgatttgtttccatgtgtgactcagaggtgagaattttttcacattatagtagcaaggaattggtggtattatggaccgaactgaaaattttatgttgaagccatatcccccatgattatatagttatgcatcacttaatatggggatattttctgggaaatgcattgctagtcaattttttttgtgccaacatcatagagtgtatttacaaaatcctagatggcatagcctactacacacctaatgtgtatggtatagactgttgctcctaggctacagacatatacagcatgttactgaatactgtaggcaatagtaacagtggtatttgtatatcgaaacatatggaaacatagagaaggtacagtaaaaatactgtaaaataa

SEQ ID NO: 349399 - DNA, 857 bp, Homo sapiens
ccaggtatgatactgattatgtttttattttatctatgttctttttggtgccaattaacattattatttaaaagctcatgggctttgttttcatattgatccacctgagaagcaaagtttttggttcaaaataaccctagaatatgtagggaacttatttgaatttgcttagtatagtaagactaagaatataaaacaattacagtaataattgatcaaatttatgtattattgattagtggaggttattagaaaatctgggggaggaacgctgagtagatacttgggcagactctggtttcagagccactttctgctcctgatcctctctttagctttttctccactctgagactccattcagtcttgaaaattctccttccccaacccctgcacacttctatttccctcttgagagtaaaatagaagcaagaatatagaggcaagatacatacactcaattggatgaagagtgattgtgaatcactaaataaaggtgaaactactgggccatggacagccacttaactggatttctttggagcaaaatggcattatggtagaactgccacagctaaccattcatcagatgccgtgtaaatggggctgggctctagccctgactaatgtgatctaaagtgcagcagagtggctgatgctgcaagttatgtctaaggctaggaactatcaggtgtctataattgtagcacatggagaaagcaaatgtaaaactggataagaaaattattttggcagttcagccctttccctttttcccactaaattttttcttaaattacccatgtaaccattttaactctccagtgcactttgccattaaagtctcttcacattga

SEQ ID NO: 349400 - DNA, 2271 bp, Homo sapiens
gcggcatactcagcggcagagacggaagaacagcgctcccgaggccgcgggagcctgcagagaggacagccggcctgcgccgggacatgcggccccaggagctccccaggctcgcgttcccgttgctgctgttgctgttgctgctgctgccgccgccgccgtgccctgcccacagcgccacgcgcttcgaccccacctgggagtccctggacgcccgccagctgcccgcgtggtttgaccaggccaagttcggcatcttcatccactggggagtgttttccgtgcccagcttcggtagcgagtggttctggtggtattggcaaaaggaaaagataccgaagtatgtggaatttatgaaagataattaccctcctagtttcaaatatgaagattttggaccactatttacagcaaaattttttaatgccaaccagtgggcagatatttttcaggcctctggtgccaaatacattgtcttaacttccaaacatcatgaaggctttaccttgtgggggtcagaatattcgtggaactggaatgccatagatgaggggcccaagagggacattgtcaaggaacttgaggtagccattaggaacagaactgacctgcgttttggactgtactattccctttttgaatggtttcatccgctcttccttgaggatgaatccagttcattccataagcggcaatttccagtttctaagacattgccagagctctatgagttagtgaacaactatcagcctgaggttctgtggtcggatggtgacggaggagcaccggatcaatactggaacagcacaggcttcttggcctggttatataatgaaagcccagttcggggcacagtagtcaccaatgatcgttggggagctggtagcatctgtaagcatggtggcttctatacctgcagtgatcgttataacccaggacatcttttgccacataaatgggaaaactgcatgacaatagacaaactgtcctggggctataggagggaagctggaatctctgactatcttacaattgaagaattggtgaagcaacttgtagagacagtttcatgtggaggaaatcttttgatgaatattgggcccacactagatggcaccatttctgtagtttttgaggagcgactgaggcaaatggggtcctggctaaaagtcaatggagaagctatttatgaaacccatacctggcgatcccagaatgacactgtcaccccagatgtgtggtacacatccaagcctaaagaaaaattagtctatgccatttttcttaaatggcccacatcaggacagctgttccttggccatcccaaagctattctgggggcaacagaggtgaaactactgggccatggacagccacttaactggatttctttggagcaaaatggcattatggtagaactgccacagctaaccattcatcagatgccgtgtaaatggggctgggctctagccctgactaatgtgatctaaagtgcagcagagtggctgatgctgcaagttatgtctaaggctaggaactatcaggtgtctataattgtagcacatggagaaagcaaatgtaaaactggataagaaaattattttggcagttcagccctttccctttttcccactaaattttttcttaaattacccatgtaaccattttaactctccagtgcactttgccattaaagtctcttcacattgaaaaaaaaaaaaaaaaaaaaaaaaaaaaaaaaaaaaaaaaaaaaaaaaaaaaaaaaaaaaaaaaaaaaaaaaaaaaaaaaaaggggggcgccccccaaacccccgcaagggacgcccaccacagaccccccccccccactccgagaaaaagaggagcccccccagacagcgcgcccccatcacacaacaacacccagccaccgcggccaaccctcccaacaagcacacgtgaggccggcaacaacacagccccacacacgcgcggcacccttcaacacaacagcacgacgaacagcctacgtcgaaaagccccgaccagaagaggacgaacaaaaacagaaactatcgaccaccataccagcacagaagccacacacacaccaagccagtacgacgacggaacaagaaaacaagaacaccacaacgccgaacgcagcgacatagaacacggaaaccgacgaccgcaacagcgactcaaacagacccacacaactcccgcacgcacgacaccacccacaaacaacccccgccgacagcagagacaaccaacgcccccgggaga

SEQ ID NO: 349401 - DNA, 1792 bp, Homo sapiens
gcggcatactcagcggcagagacggaagaacagcgctcccgaggccgcgggagcctgcagagaggacagccggcctgcgccgggacatgcggccccaggagctccccaggctcgcgttcccgttgctgctgttgctgttgctgctgctgccgccgccgccgtgccctgcccacagcgccacgcgcttcgaccccacctgggagtccctggacgcccgccagctgcccgcgtggtttgaccaggccaagttcggcatcttcatccactggggagtgttttccgtgcccagcttcggtagcgagtggttctggtggtattggcaaaaggaaaagataccgaagtatgtggaatttatgaaagataattaccctcctagtttcaaatatgaagattttggaccactatttacagcaaaattttttaatgccaaccagtgggcagatatttttcaggcctctggtgccaaatacattgtcttaacttccaaacatcatgaaggctttaccttgtgggggtcagaatattcgtggaactggaatgccatagatgaggggcccaagagggacattgtcaaggaacttgaggtagccattaggaacagaactgacctgcgttttggactgtactattccctttttgaatggtttcatccgctcttccttgaggatgaatccagttcattccataagcggcaatttccagtttctaagacattgccagagctctatgagttagtgaacaactatcagcctgaggttctgtggtcggatggtgacggaggagcaccggatcaatactggaacagcacaggcttcttggcctggttatataatgaaagcccagttcggggcacagtagtcaccaatgatcgttggggagctggtagcatctgtaagcatggtggcttctatacctgcagtgatcgttataacccaggacatcttttgccacataaatgggaaaactgcatgacaatagacaaactgtcctggggctataggagggaagctggaatctctgactatcttacaattgaagaattggtgaagcaacttgtagagacagtttcatgtggaggaaatcttttgatgaatattgggcccacactagatggcaccatttctgtagtttttgaggagcgactgaggcaaatggggtcctggctaaaagtcaatggagaagctatttatgaaacccatacctggcgatcccagaatgacactgtcaccccagatgtgtggtacacatccaagcctaaagaaaaattagtctatgccatttttcttaaatggcccacatcaggacagctgttccttggccatcccaaagctattctgggggcaacagaggtaagagggaattttaccttattcctttaaattgctgattagaacatcttgatgcaaacattaacttttaaggggagccttataactgtttcacttatacttcataaaaggaattgtaaatgagctccagccaagcattgtggctcacactgtaattccagcactttgggaggctaaggcaggaggatgtcttgaggccagaagtttgagactagcctgggcaacatagcaagacccctgtctacaaaaattttttttaaagttagctgagcatggtggcacgcacctgtagtcctagttgctcgggaggctgaggcaggaggattgcttgagcccagtaggtcaagactacagtaagctatgactgcaccacttcagcctgtctctgaaaaaataaaataaaatataataaaataaaatgaatttcaccaatgacaaaaaaa

SEQ ID NO: 349402 - DNA, 1543 bp, Homo sapiens
gcggcatactcagcggcagagacggaagaacagcgctcccgaggccgcgggagcctgcagagaggacagccggcctgcgccgggacatgcggccccaggagctccccaggctcgcgttcccgttgctgctgttgctgttgctgctgctgccgccgccgccgtgccctgcccacagcgccacgcgcttcgaccccacctgggagtccctggacgcccgccagctgcccgcgtggtttgaccaggccaagttcggcatcttcatccactggggagtgttttccgtgcccagcttcggtagcgagtggttctggtggtattggcaaaaggaaaagataccgaagtatgtggaatttatgaaagataattaccctcctagtttcaaatatgaagattttggaccactatttacagcaaaattttttaatgccaaccagtgggcagatatttttcaggcctctggtgccaaatacattgtcttaacttccaaacatcatgaaggatgaatccagttcattccataagcggcaatttccagtttctaagacattgccagagctctatgagttagtgaacaactatcagcctgaggttctgtggtcggatggtgacggaggagcaccggatcaatactggaacagcacaggcttcttggcctggttatataatgaaagcccagttcggggcacagtagtcaccaatgatcgttggggagctggtagcatctgtaagcatggtggcttctatacctgcagtgatcgttataacccaggacatcttttgccacataaatgggaaaactgcatgacaatagacaaactgtcctggggctataggagggaagctggaatctctgactatcttacaattgaagaattggtgaagcaacttgtagagacagtttcatgtggaggaaatcttttgatgaatattgggcccacactagatggcaccatttctgtagtttttgaggagcgactgaggcaaatggggtcctggctaaaagtcaatggagaagctatttatgaaacccatacctggcgatcccagaatgacactgtcaccccagatgtgtggtacacatccaagcctaaagaaaaattagtctatgccatttttcttaaatggcccacatcaggacagctgttccttggccatcccaaagctattctgggggcaacagaggtgaaactactgggccatggacagccacttaactggatttctttggagcaaaatggcattatggtagaactgccacagctaaccattcatcagatgccgtgtaaatggggctgggctctagccctgactaatgtgatctaaagtgcagcagagtggctgatgctgcaagttatgtctaaggctaggaactatcaggtgtctataattgtagcacatggagaaagcaaatgtaaaactggataagaaaattattttggcagttcagccctttccctttttcccactaaattttttcttaaattacccatgtaaccattttaactctccagtgcactttgccattaaagtctcttcacattga

SEQ ID NO: 349403 - DNA, 1361 bp, Homo sapiens
ccaggtatgatactgattatgtttttattttatctatgttctttttggtgccaattaacattattatttaaaagctcatgggctttgttttcatattgatccacctgagaagcaaagtttttggttcaaaataaccctagaatatgtagggaacttatttgaatttgcttagtatagtaagactaagaatataaaacaattacagtaataattgatcaaatttatgtattattgattagtggaggttattagaaaatctgggggaggaacgctgagtagatacttgggcagactctggtttcagagccactttctgctcctgatcctctctttagctttttctccactctgagactccattcagtcttgaaaattctccttccccaacccctgcacacttctatttccctcttgagagtaaaatagaagcaagaatatagaggcaagatacatacactcaattggatgaagagtgattgtgaatcactaaataaaggtaaaaatgaacctcttgtctacaattttgtttgaactactaatcactccttcccaatagaaagtgggtgagataaagagataaatttggagacatttgcatgtatgtttttaatttcaggtgaaactactgggccatggacagccacttaactggatttctttggagcaaaatggcattatggtagaactgccacagctaaccattcatcagatgccgtgtaaatggggctgggctctagccctgactaatgtgatctaaagtgcagcagagtggctgatgctgcaagttatgtctaaggctaggaactatcaggtgtctataattgtagcacatggagaaagcaaatgtaaaactggataagaaaattattttggcagttcagccctttccctttttcccactaaattttttcttaaattacccatgtaaccattttaactctccagtgcactttgccattaaagtctcttcacattgatttgtttccatgtgtgactcagaggtgagaattttttcacattatagtagcaaggaattggtggtattatggaccgaactgaaaattttatgttgaagccatatcccccatgattatatagttatgcatcacttaatatggggatattttctgggaaatgcattgctagtcaattttttttgtgccaacatcatagagtgtatttacaaaatcctagatggcatagcctactacacacctaatgtgtatggtatagactgttgctcctaggctacagacatatacagcatgttactgaatactgtaggcaatagtaacagtggtatttgtatatcgaaacatatggaaacatagagaaggtacagtaaaaatactgtaaaataa

SEQ ID NO: 349404 - DNA, 977 bp, Homo sapiens
ccaggtatgatactgattatgtttttattttatctatgttctttttggtgccaattaacattattatttaaaagctcatgggctttgttttcatattgatccacctgagaagcaaagtttttggttcaaaataaccctagaatatgtagggaacttatttgaatttgcttagtatagtaagactaagaatataaaacaattacagtaataattgatcaaatttatgtattattgattagtggaggttattagaaaatctgggggaggaacgctgagtagatacttgggcagactctggtttcagagccactttctgctcctgatcctctctttagctttttctccactctgagactccattcagtcttgaaaattctccttccccaacccctgcacacttctatttccctcttgagagtaaaatagaagcaagaatatagaggcaagatacatacactcaattggatgaagagtgattgtgaatcactaaataaaggtaaaaatgaacctcttgtctacaattttgtttgaactactaatcactccttcccaatagaaagtgggtgagataaagagataaatttggagacatttgcatgtatgtttttaatttcaggtgaaactactgggccatggacagccacttaactggatttctttggagcaaaatggcattatggtagaactgccacagctaaccattcatcagatgccgtgtaaatggggctgggctctagccctgactaatgtgatctaaagtgcagcagagtggctgatgctgcaagttatgtctaaggctaggaactatcaggtgtctataattgtagcacatggagaaagcaaatgtaaaactggataagaaaattattttggcagttcagccctttccctttttcccactaaattttttcttaaattacccatgtaaccattttaactctccagtgcactttgccattaaagtctcttcacattga

SEQ ID NO: 349405 - DNA, 1710 bp, Homo sapiens
gcggcatactcagcggcagagacggaagaacagcgctcccgaggccgcgggagcctgcagagaggacagccggcctgcgccgggacatgcggccccaggagctccccaggctcgcgttcccgttgctgctgttgctgttgctgctgctgccgccgccgccgtgccctgcccacagcgccacgcgcttcgaccccacctgggagtccctggacgcccgccagctgcccgcgtggtttgaccaggccaagttcggcatcttcatccactggggagtgttttccgtgcccagcttcggtagcgagtggttctggtggtattggcaaaaggaaaagataccgaagtatgtggaatttatgaaagataattaccctcctagtttcaaatatgaagattttggaccactatttacagcaaaattttttaatgccaaccagtgggcagatatttttcaggcctctggtgccaaatacattgtcttaacttccaaacatcatgaaggctttaccttgtgggggtcagaatattcgtggaactggaatgccatagatgaggggcccaagagggacattgtcaaggaacttgaggtagccattaggaacagaactgacctgcgttttggactgtactattccctttttgaatggtttcatccgctcttccttgaggatgaatccagttcattccataagcggcaatttccagtttctaagacattgccagagctctatgagttagtgaacaactatcagcctgaggttctgtggtcggatggtgacggaggagcaccggatcaatactggaacagcacaggcttcttggcctggttatataatgaaagcccagttcggggcacagtagtcaccaatgatcgttggggagctggtagcatctgtaagcatggtggcttctatacctgcagtgatcgttataacccaggacatcttttgccacataaatgggaaaactgcatgacaatagacaaactgtcctggggctataggagggaagctggaatctctgactatcttacaattgaagaattggtgaagcaacttgtagagacagtttcatgtggaggaaatcttttgatgaatattgggcccacactagatggcaccatttctgtagtttttgaggagcgactgaggcaaatggggtcctggctaaaagtcaatggagaagctatttatgaaacccatacctggcgatcccagaatgacactgtcaccccagatgtgtggtacacatccaagcctaaagaaaaattagtctatgccatttttcttaaatggcccacatcaggacagctgttccttggccatcccaaagctattctgggggcaacagaggtgaaactactgggccatggacagccacttaactggatttctttggagcaaaatggcattatggtagaactgccacagctaaccattcatcagatgccgtgtaaatggggctgggctctagccctgactaatgtgatctaaagtgcagcagagtggctgatgctgcaagttatgtctaaggctaggaactatcaggtgtctataattgtagcacatggagaaagcaaatgtaaaactggataagaaaattattttggcagttcagccctttccctttttcccactaaattttttcttaaattacccatgtaaccattttaactctccagtgcactttgccattaaagtctcttcacattga

SEQ ID NO: 349406 - DNA, 1247 bp, Homo sapiens
gcggcatactcagcggcagagacggaagaacagcgctcccgaggccgcgggagcctgcagagaggacagccggcctgcgccgggacatgcggccccaggagctccccaggctcgcgttcccgttgctgctgttgctgttgctgctgctgccgccgccgccgtgccctgcccacagcgccacgcgcttcgaccccacctgggagtccctggacgcccgccagctgcccgcgtggtttgaccaggccaagttcggcatcttcatccactggggagtgttttccgtgcccagcttcggtagcgagtggttctggtggtattggcaaaaggaaaagataccgaagtatgtggaatttatgaaagataattaccctcctagtttcaaatatgaagattttggaccactatttacagcaaaattttttaatgccaaccagtgggcagatatttttcaggcctctggtgccaaatacattgtcttaacttccaaacatcatgaaggctttaccttgtgggggtcagaatattcgtggaactggaatgccatagatgaggggcccaagagggacattgtcaaggaacttgaggtagccattaggaacagaactgacctgcgttttggactgtactattccctttttgaatggtttcatccgctcttccttgaggatgaatccagttcattccataagcggcaatttccagtttctaagacattgccagagctctatgagttagtgaacaactatcagcctgaggttctgtggtcggatggtgacggaggagcaccggatcaatactggaacagcacaggcttcttggcctggttatataatgaaagcccagttcggggcacagtagtcaccaatgatcgttggggagctggtagcatctgtaagcatggtggcttctatacctgcagtgatcgttataacccaggacatcttttgccacataaatgggaaaactgcatgacaatagacaaactgtcctggggctataggagggaagctggaatctctgactatcttacaattgaagaattggtgaaggtacagtgaaatgtctggtggctattaacataatattcttaatagtgtggtcatgtaggaattatttcttctatggctcaatggcctataaatataggacattgttctatcctgtgtttgttcttctaggcagtgactatatatacatgtataaatatataaatgcacatattagcacattaaagatggaattatttt

SEQ ID NO: 349407 - DNA, 3738 bp, Homo sapiens
  misc_feature (1735)..(1735): n is a, c, g, or t
ctgaagcccatttcctacacgtagcaccatttatttaaaacacacactacatatacacaacagaccaaatgcaaaggaaaaaaggggaaaaaggctgctgaagaccagagtcactaaaagttcaggctaagaatagacaaggaactctgagagctgctcagctatgtgacctcctgcaggggcttggcaagaagcccaattcagctttgttttttctgtgcttttacaaagaaagagcactagcttgggagtcaggagacctaggtaccagactttgctttgccagtgcctctttctgtggccttgggtaagtttttcccctctctgggcctcagtttcccatttgcaaaataaaagtgtttaagactaggttccaagattttccaattctaatgctgagaggatacagaggaaaacagaaagaatgctggctgaggaaccaggagacttgccttcttgtcccagctctgccactgacctgacctctttgggcctctgcttcctcatctataaaataagataaagcaacagaagcctccagcgactaagttaaactttcctggggtcacaaggtttacaagtggctgaataggatttctacagactggttccttcacccggctgcccgccgaagtaagcgggccttactgccctaattctcaataggaccccaaagaggacgcttctttgctcctgaagggatggcaccctttggattcgcggtaacagcaaatggggctctcactcctaccatctcagtgacagtttaaagcgcaccctaccgcaggaaagtgcccatatttgcacacacgcggcagagggcagggctgaaaaggggccctagggtgcagggggcgcgccctcacccggggaccccgcattttacaatattagctccaccgaggcgcacggaaccgcaggcgagcaactgaccttcggctccagcggccccaaagccgggggtgggaacgcgcgacccaggtagcggcatggactccgagcctggcccctcgggggttaaaactccccagacataaaggctccggacgacagaggtgcagccgccgcgtgcccgtgggacactgaaactcttcccttaccttcctcggtagtcctgtgagggaggctggcccggccggctgccctacggtgcggacaggaggtcgcggtcgggaggggccctgcccggcggttgctgctggaaccagcccccgcaagggcccgcagcggccgggccgtttacctcagacccgcgccgcagcctcccggagcccgcgcccaggactccctcacgacctctccagggtcccggcccgacaccaaggggcaggtgaggggtggaacctggaggcacccgcgccagggcccctgagggaggcgggagggggacagcctcagtcctgactcgcagccgaggcgcgacgactccgcgcagtcccgcctgtggaggggcgtgcctcatcgcttgctaaccgagaggcgaagggcaaggggcgaagggcaagcgccggatcctttcgccccctccccacgtgaggccctggaggctgattggccgtgtgctgcggaggcggcaagaggaacgtgtcctggcacgtgccgaaggagcgctaaaggccaggggcggtcccacccgcgaagccctggaaggcggattggctgcgcgaggaagtggcgtgtcctcacttgagctgtctgggagcgagagtaagagataaaggcaagggcgcctgancgggcctgggcacctcctcccactgcgggcaaagggcaggcagttcgtgcgcggacacaagcactggcggaccgtggccatggcgggcgctgagtggaagtcgctggaggaatgcttggagaagcacctgccgctccccgacttgcaggaagtgaagcgcgttctctatggcaaggaactcaggtctctgcccttcatagacgcataaaggctatcgtagaggtggctgcaatgtgtggagtcaacatcatctgtttccaggaagcatggactatgccctttgccttctgtacgagagagaagcttccttggacagaatttgctgagtcagcagaggatgggcccaccaccagattctgtcagaagctggcgaagaaccatgacatggtggtggtgtctcccatcctggaacgagacagcgagcatggggatgttttgtggaatacagccgtggtgatctccaattccggagcagtcctgggaaagaccaggaaaaaccacatccccagagtgggtgatttcaacgagtcaacttactacatggagggaaacctgggccaccccgtgttccagacgcagttcggaaggatcgcggtgaacatttgctacgggcggcaccaccccctcaactggcttatgtacagcatcaacggggctgagatcatcttcaacccctcggccacgataggagcactcagcgagtccctgtggcccatcgaggccagaaacgcagccattgccaatcactgcttcacctgcgccatcaatcgagtgggcaccgagcacttcccgaacgagtttacctcgggagatggaaagaaagctcaccaggactttggctacttttatggctcgagctatgtggcagcccctgacagcagccggactcctgggctgtcccgtagccgggatggactgctagttgctaagctcgacctaaacctctgccagcaggtgaatgatgtctggaacttcaagatgacgggcaggtatgagatgtacgcacgggagctcgccgaagctgtcaagtccaactacagccccaccatcgtgaaagagtagccggcttcagtgcctgccttggggtgaggaagacacctctgccccagtggattagcaagtgtggcaggcttaacatgtccaggttctccccaataacattgtccaggttggttttaaaattcccaggcagggggagagtggcatggggagtgacttcttaatgggtaaggggctgcttacttctggggtattggaaatgtttggggactaggtagaggtgaatgtactaaatgccactgaatttgtatacttcagaatgtttgttatgtaaattttacctcaactaaaaaaaaaaaatgcccaggtactgcttgtgcaggtggatttgaggttaggcagatgatgctgtccatcccgtacaccagtgggaagagggtgagggctgatccagagaccctgagcctacagcaaggctgtggtgggtcggatggtctttggatgtgtcagcttagctaggccacagtcaccagtaattcaatcagacactaatctaggtatttctgtgaaggtattttgtagatgtgacagaagtccattcccaattgactaagtaagtgagattatctcagataatctgggtcagcctgacctgattagtcagaaggcctaaagaacagagctaagggtttccctgaggaagaaattctgcctgaggacagcagcccagtgcttggcgagagttcctgacagtctgcccttctgatagcctgcctcacagagtttagacatgactagccagctcctacaatcactgaagtcaattccttgcaataaatctcaatatatcccctactggttctgcttctctagttgaatctgactgatacagattttggtgccaaaagtggttctagaaaaatagaatcttaaagatgagttttctgcattggttctggatttttttagaattcttccctagtttgattgaacttaaaggcatc

SEQ ID NO: 349408 - DNA, 3718 bp, Homo sapiens
  misc_feature (1735)..(1735): n is a, c, g, or t
ctgaagcccatttcctacacgtagcaccatttatttaaaacacacactacatatacacaacagaccaaatgcaaaggaaaaaaggggaaaaaggctgctgaagaccagagtcactaaaagttcaggctaagaatagacaaggaactctgagagctgctcagctatgtgacctcctgcaggggcttggcaagaagcccaattcagctttgttttttctgtgcttttacaaagaaagagcactagcttgggagtcaggagacctaggtaccagactttgctttgccagtgcctctttctgtggccttgggtaagtttttcccctctctgggcctcagtttcccatttgcaaaataaaagtgtttaagactaggttccaagattttccaattctaatgctgagaggatacagaggaaaacagaaagaatgctggctgaggaaccaggagacttgccttcttgtcccagctctgccactgacctgacctctttgggcctctgcttcctcatctataaaataagataaagcaacagaagcctccagcgactaagttaaactttcctggggtcacaaggtttacaagtggctgaataggatttctacagactggttccttcacccggctgcccgccgaagtaagcgggccttactgccctaattctcaataggaccccaaagaggacgcttctttgctcctgaagggatggcaccctttggattcgcggtaacagcaaatggggctctcactcctaccatctcagtgacagtttaaagcgcaccctaccgcaggaaagtgcccatatttgcacacacgcggcagagggcagggctgaaaaggggccctagggtgcagggggcgcgccctcacccggggaccccgcattttacaatattagctccaccgaggcgcacggaaccgcaggcgagcaactgaccttcggctccagcggccccaaagccgggggtgggaacgcgcgacccaggtagcggcatggactccgagcctggcccctcgggggttaaaactccccagacataaaggctccggacgacagaggtgcagccgccgcgtgcccgtgggacactgaaactcttcccttaccttcctcggtagtcctgtgagggaggctggcccggccggctgccctacggtgcggacaggaggtcgcggtcgggaggggccctgcccggcggttgctgctggaaccagcccccgcaagggcccgcagcggccgggccgtttacctcagacccgcgccgcagcctcccggagcccgcgcccaggactccctcacgacctctccagggtcccggcccgacaccaaggggcaggtgaggggtggaacctggaggcacccgcgccagggcccctgagggaggcgggagggggacagcctcagtcctgactcgcagccgaggcgcgacgactccgcgcagtcccgcctgtggaggggcgtgcctcatcgcttgctaaccgagaggcgaagggcaaggggcgaagggcaagcgccggatcctttcgccccctccccacgtgaggccctggaggctgattggccgtgtgctgcggaggcggcaagaggaacgtgtcctggcacgtgccgaaggagcgctaaaggccaggggcggtcccacccgcgaagccctggaaggcggattggctgcgcgaggaagtggcgtgtcctcacttgagctgtctgggagcgagagtaagagataaaggcaagggcgcctgancgggcctgggcacctcctcccactgcgggcaaagggcaggcagttcgtgcgcggacacaagcactggcggaccgtggccatggcgggcgctgagtggaagtcgctggaggaatgcttggagaagcacctgccgctccccgacttgcaggaagtgaagcgcgttctctatggcaaggaactcaggaagcttgatctgcccagggaagctttcgaagctgcctccagagaagactttgaactgcagggatatgcctttgaagcagcggaggagcagctgagacgaccccgcattgtgcacgtggggctggttcagaacagaatccccctccccgcaaatgcccctgtggcagaacaggtctctgcccttcatagacgcataaaggctatcgtagaggtggctgcaatgtgtggagtcaacatcatctgtttccaggaagcatggactatgccctttgccttctgtacgagagagaagcttccttggacagaatttgctgagtcagcagaggatgggcccaccaccagattctgtcagaagctggcgaagaaccatgacatggtggtggtgtctcccatcctggaacgagacagcgagcatggggatgttttgtggaatacagccgtggtgatctccaattccggagcagtcctgggaaagaccaggaaaaaccacatccccagagtgggtgatttcaacgagtcaacttactacatggagggaaacctgggccaccccgtgttccagacgcagttcggaaggatcgcggtgaacatttgctacgggcggcaccaccccctcaactggcttatgtacagcatcaacggggctgagatcatcttcaacccctcggccacgataggagcactcagcgagtccctgtggcccatcgaggccagaaacgcagccattgccaatcactgcttcacctgcgccatcaatcgagtgggcaccctcaccaggactttggctacttttatggctcgagctatgtggcagcccctgacagcagccggactcctgggctgtcccgtagccgggatggactgctagttgctaagctcgacctaaacctctgccagcaggtgaatgatgtctggaacttcaagatgacgggcaggtatgagatgtacgcacgggagctcgccgaagctgtcaagtccaactacagccccaccatcgtgaaagagtagccggcttcagtgcctgccttggggtgaggaagacacctctgccccagtggattagcaagtgtggcaggcttaacatgtccaggttctccccaataacattgtccaggttggttttaaaattcccaggcagggggagagtggcatggggagtgacttcttaatgggtaaggggctgcttacttctggggtattggaaatgtttggggactaggtagaggtgaatgtactaaatgccactgaatttgtatacttcagaatgtttgttatgtaaattttacctcaactaaaaaaaaaaaatgcccaggtactgcttgtgcaggtggatttgaggttaggcagatgatgctgtccatcccgtacaccagtgggaagagggtgagggctgatccagagaccctgagcctacagcaaggctgtggtgggtcggatggtctttggatgtgtcagcttagctaggccacagtcaccagtaattcaatcagacactaatctaggtatttctgtgaaggtattttgtagatgtgacagaagtccattcccaattgactaagtaagtgagattatctcagataatctgggtcagcctgacctgattagtcagaaggcctaaagaacagagctaagggtttccctgaggaagaaattctgcctgaggacagcagcccagtgcttggcgagagttcctgacagtctgcccttctgatagcctgcctcacagagtttagacatgactagccagctcctacaatcactgaagtcaattccttgcaataaatctcaatatatccccta

SEQ ID NO: 349409 - DNA, 3708 bp, Homo sapiens
  misc_feature (1735)..(1735): n is a, c, g, or t
ctgaagcccatttcctacacgtagcaccatttatttaaaacacacactacatatacacaacagaccaaatgcaaaggaaaaaaggggaaaaaggctgctgaagaccagagtcactaaaagttcaggctaagaatagacaaggaactctgagagctgctcagctatgtgacctcctgcaggggcttggcaagaagcccaattcagctttgttttttctgtgcttttacaaagaaagagcactagcttgggagtcaggagacctaggtaccagactttgctttgccagtgcctctttctgtggccttgggtaagtttttcccctctctgggcctcagtttcccatttgcaaaataaaagtgtttaagactaggttccaagattttccaattctaatgctgagaggatacagaggaaaacagaaagaatgctggctgaggaaccaggagacttgccttcttgtcccagctctgccactgacctgacctctttgggcctctgcttcctcatctataaaataagataaagcaacagaagcctccagcgactaagttaaactttcctggggtcacaaggtttacaagtggctgaataggatttctacagactggttccttcacccggctgcccgccgaagtaagcgggccttactgccctaattctcaataggaccccaaagaggacgcttctttgctcctgaagggatggcaccctttggattcgcggtaacagcaaatggggctctcactcctaccatctcagtgacagtttaaagcgcaccctaccgcaggaaagtgcccatatttgcacacacgcggcagagggcagggctgaaaaggggccctagggtgcagggggcgcgccctcacccggggaccccgcattttacaatattagctccaccgaggcgcacggaaccgcaggcgagcaactgaccttcggctccagcggccccaaagccgggggtgggaacgcgcgacccaggtagcggcatggactccgagcctggcccctcgggggttaaaactccccagacataaaggctccggacgacagaggtgcagccgccgcgtgcccgtgggacactgaaactcttcccttaccttcctcggtagtcctgtgagggaggctggcccggccggctgccctacggtgcggacaggaggtcgcggtcgggaggggccctgcccggcggttgctgctggaaccagcccccgcaagggcccgcagcggccgggccgtttacctcagacccgcgccgcagcctcccggagcccgcgcccaggactccctcacgacctctccagggtcccggcccgacaccaaggggcaggtgaggggtggaacctggaggcacccgcgccagggcccctgagggaggcgggagggggacagcctcagtcctgactcgcagccgaggcgcgacgactccgcgcagtcccgcctgtggaggggcgtgcctcatcgcttgctaaccgagaggcgaagggcaaggggcgaagggcaagcgccggatcctttcgccccctccccacgtgaggccctggaggctgattggccgtgtgctgcggaggcggcaagaggaacgtgtcctggcacgtgccgaaggagcgctaaaggccaggggcggtcccacccgcgaagccctggaaggcggattggctgcgcgaggaagtggcgtgtcctcacttgagctgtctgggagcgagagtaagagataaaggcaagggcgcctgancgggcctgggcacctcctcccactgcgggcaaagggcaggcagttcgtgcgcggacacaagcactggcggaccgtggccatggcgggcgctgagtggaagtcgctggaggaatgcttggagaagcacctgccgctccccgacttgcaggaagtgaagcgcgttctctatggcaaggaactcaggaagcttgatctgcccagggaagctttcgaagctgcctccagagaagactttgaactgcagggatatgcctttgaagcagcggaggagcagctgagacgaccccgcattgtgcacgtggggctggttcagaacagaatccccctccccgcaaatgcccctgtggcagaacaggtctctgcccttcatagacgcataaaggctatcgtagaggtggctgcaatgtgtggagtcaacatcatctgtttccaggaagcatggactatgccctttgccttctgtacgagagagaagcttccttggacagaatttgctgagtcagcagaggatgggcccaccaccagattctgtcagaagctggcgaagaaccatgacatggtggtggtgtctcccatcctggaacgagacagcgagcatggggatgttttgtggaatacagccgtggtgatctccaattccggagcagtcctgggaaagaccaggaggaaacctgggccaccccgtgttccagacgcagttcggaaggatcgcggtgaacatttgctacgggcggcaccaccccctcaactggcttatgtacagcatcaacggggctgagatcatcttcaacccctcggccacgataggagcactcagcgagtccctgtggcccatcgaggccagaaacgcagccattgccaatcactgcttcacctgcgccatcaatcgagtgggcaccgagcacttcccgaacgagtttacctcgggagatggaaagaaagctcaccaggactttggctacttttatggctcgagctatgtggcagcccctgacagcagccggactcctgggctgtcccgtagccgggatggactgctagttgctaagctcgacctaaacctctgccagcaggtgaatgatgtctggaacttcaagatgacgggcaggtatgagatgtacgcacgggagctcgccgaagctgtcaagtccaactacagccccaccatcgtgaaagagtagccggcttcagtgcctgccttggggtgaggaagacacctctgccccagtggattagcaagtgtggcaggcttaacatgtccaggttctccccaataacattgtccaggttggttttaaaattcccaggcagggggagagtggcatggggagtgacttcttaatgggtaaggggctgcttacttctggggtattggaaatgtttggggactaggtagaggtgaatgtactaaatgccactgaatttgtatacttcagaatgtttgttatgtaaattttacctcaactaaaaaaaaaaaatgcccaggtactgcttgtgcaggtggatttgaggttaggcagatgatgctgtccatcccgtacaccagtgggaagagggtgagggctgatccagagaccctgagcctacagcaaggctgtggtgggtcggatggtctttggatgtgtcagcttagctaggccacagtcaccagtaattcaatcagacactaatctaggtatttctgtgaaggtattttgtagatgtgacagaagtccattcccaattgactaagtaagtgagattatctcagataatctgggtcagcctgacctgattagtcagaaggcctaaagaacagagctaagggtttccctgaggaagaaattctgcctgaggacagcagcccagtgcttggcgagagttcctgacagtctgcccttctgatagcctgcctcacagagtttagacatgactagccagctcctacaatcactgaagtcaattccttgcaataaatctcaatatatccccta

SEQ ID NO: 349410 - DNA, 2423 bp, Homo sapiens
gcagaacacctccctggagaattgcaactaagatgtttatggcaatcgccctgcaagtgtctatttaattcctgaaaatgtcatttactggtgtgtttctgtaaaaatcatttctgaaaagttttgtcagcttggcttagcagctgggggaaaaaagcagcaaaatgagtcccctcaatcaagcctgtgattttttattttttcagactcatgaatcctcctgagaattaggcttatgacaagcacccaccccctccacctactccctggtttaaaccaggtgcctgctgacacgaaggaagattccggggcattttgatcctagtcacacagtgtttctaagtgggcattactcctgtcaatccacagtcttaaagatgttcctcagacgcgggccagagaaggacagggtctctggttggggccgtgtctcccatcgcattctccctttgcaggtgctgaagtgaggaaggcccacagctcagccaagcacatggggtgcctccctcctgggccactagcccactggccagtaagagaaccagggagcctttacttagagactcaaggttcagaagagggaaatgggaagtcactgtgaaatggcccagcttggaggaggtgaccctgctgccgaatctgaccccttatcctattacctaagttcctttcttgtttactggccctgaaatcacccgctttggagattgccttgcaaggcagcatagcagagtaggagagttagggtagggcaggtacagcctgtgctcagccctcacaggccctgcacaagcccaccaggcccccggctcccttctggcattcaccaggagagggtctgcccagcccagcaggtgggttccaggagaagggatggaggtgggaagtggtggttatggaactcctaccacttggatcttcacctgcatggtcattcagtcttcatagtcttcttttgaggacatttcagaaaaggaaactgaggctcaggatgaggatttgatccagggctgctaattcttctgacagagcacagccacgtggcttatgcctgcagcaggcccttcccaaaggctgttcaggccagggcaaggtgctgaggacaggctggcctggttgcaggtttggggtgtgaccggtgagtctcctggttgtccccaccactggcccaggaaagcctgcagccaggccaggctctgtccccaccactggcccaggaaagcctgcagccaggccaggctcagggctgagcatccactgagtctgcctggaaagtcggcaacctggttcctcttggtcctctcttacagcgagtccctgtggcccatcgaggccagaaacgcagccattgccaatcactgcttcacctgcgccatcaatcgagtgggcaccctcaccaggactttggctacttttatggctcgagctatgtggcagcccctgacagcagccggactcctgggctgtcccgtagccgggatggactgctagttgctaagctcgacctaaacctctgccagcaggtgaatgatgtctggaacttcaagatgacgggcaggtatgagatgtacgcacgggagctcgccgaagctgtcaagtccaactacagccccaccatcgtgaaagagtagccggcttcagtgcctgccttggggtgaggaagacacctctgccccagtggattagcaagtgtggcaggcttaacatgtccaggttctccccaataacattgtccaggttggttttaaaattcccaggcagggggagagtggcatggggagtgacttcttaatgggtaaggggctgcttacttctggggtattggaaatgtttggggactaggtagaggtgaatgtactaaatgccactgaatttgtatacttcagaatgtttgttatgtaaattttacctcaactaaaaaaaaaaaatgcccaggtactgcttgtgcaggtggatttgaggttaggcagatgatgctgtccatcccgtacaccagtgggaagagggtgagggctgatccagagaccctgagcctacagcaaggctgtggtgggtcggatggtctttggatgtgtcagcttagctaggccacagtcaccagtaattcaatcagacactaatctaggtatttctgtgaaggtattttgtagatgtgacagaagtccattcccaattgactaagtaagtgagattatctcagataatctgggtcagcctgacctgattagtcagaaggcctaaagaacagagctaagggtttccctgaggaagaaattctgcctgaggacagcagcccagtgcttggcgagagttcctgacagtctgcccttctgatagcctgcctcacagagtttagacatgactagccagctcctacaatcactgaagtcaattccttgcaataaatctcaatatatccccta

SEQ ID NO: 349411 - DNA, 1592 bp, Homo sapiens
agtccctgatcctagttaacttactgcaaatagagatgcagaaagggcaggggaatgagcgtccactgggtgcctgctgcatctgggccatgctaggccctgcccagccccacctgctccttacacatgtgtggggtggctgctagtcctccctgactggtgaagggaccaaggcctggagggaggataagggtgacgcagctggcaaggcagatgaaggcagagcctccagctcactgtgagggcccccataggaagcccccagagtgtgactttctgttttccttaggctgtgggtagaagtgacacctctcagaagggtgacatttagacatttccccaggggcaaagggaagcagcataagggggccatttgcagcaatttgctgggccttcaggcctgagatgagagacaggccttttgggcctcagcatttggcagacactggggaggatggcatggactccgtgtcctgggcctgcctcaaggtgcctgaccctctgtggagcccacagtgcatctacacaagctcacagatgtgtttctttgttcctttaaagctcaccaggactttggctacttttatggctcgagctatgtggcagcccctgacagcagccggactcctgggctgtcccgtagccgggatggactgctagttgctaagctcgacctaaacctctgccagcaggtgaatgatgtctggaacttcaagatgacgggcaggtatgagatgtacgcacgggagctcgccgaagctgtcaagtccaactacagccccaccatcgtgaaagagtagccggcttcagtgcctgccttggggtgaggaagacacctctgccccagtggattagcaagtgtggcaggcttaacatgtccaggttctccccaataacattgtccaggttggttttaaaattcccaggcagggggagagtggcatggggagtgacttcttaatgggtaaggggctgcttacttctggggtattggaaatgtttggggactaggtagaggtgaatgtactaaatgccactgaatttgtatacttcagaatgtttgttatgtaaattttacctcaactaaaaaaaaaaaatgcccaggtactgcttgtgcaggtggatttgaggttaggcagatgatgctgtccatcccgtacaccagtgggaagagggtgagggctgatccagagaccctgagcctacagcaaggctgtggtgggtcggatggtctttggatgtgtcagcttagctaggccacagtcaccagtaattcaatcagacactaatctaggtatttctgtgaaggtattttgtagatgtgacagaagtccattcccaattgactaagtaagtgagattatctcagataatctgggtcagcctgacctgattagtcagaaggcctaaagaacagagctaagggtttccctgaggaagaaattctgcctgaggacagcagcccagtgcttggcgagagttcctgacagtctgcccttctgatagcctgcctcacagagtttagacatgactagccagctcctacaatcactgaagtcaattccttgcaataaatctcaatatatccccta

SEQ ID NO: 349412 - DNA, 3655 bp, Homo sapiens
  misc_feature (1735)..(1735): n is a, c, g, or t
ctgaagcccatttcctacacgtagcaccatttatttaaaacacacactacatatacacaacagaccaaatgcaaaggaaaaaaggggaaaaaggctgctgaagaccagagtcactaaaagttcaggctaagaatagacaaggaactctgagagctgctcagctatgtgacctcctgcaggggcttggcaagaagcccaattcagctttgttttttctgtgcttttacaaagaaagagcactagcttgggagtcaggagacctaggtaccagactttgctttgccagtgcctctttctgtggccttgggtaagtttttcccctctctgggcctcagtttcccatttgcaaaataaaagtgtttaagactaggttccaagattttccaattctaatgctgagaggatacagaggaaaacagaaagaatgctggctgaggaaccaggagacttgccttcttgtcccagctctgccactgacctgacctctttgggcctctgcttcctcatctataaaataagataaagcaacagaagcctccagcgactaagttaaactttcctggggtcacaaggtttacaagtggctgaataggatttctacagactggttccttcacccggctgcccgccgaagtaagcgggccttactgccctaattctcaataggaccccaaagaggacgcttctttgctcctgaagggatggcaccctttggattcgcggtaacagcaaatggggctctcactcctaccatctcagtgacagtttaaagcgcaccctaccgcaggaaagtgcccatatttgcacacacgcggcagagggcagggctgaaaaggggccctagggtgcagggggcgcgccctcacccggggaccccgcattttacaatattagctccaccgaggcgcacggaaccgcaggcgagcaactgaccttcggctccagcggccccaaagccgggggtgggaacgcgcgacccaggtagcggcatggactccgagcctggcccctcgggggttaaaactccccagacataaaggctccggacgacagaggtgcagccgccgcgtgcccgtgggacactgaaactcttcccttaccttcctcggtagtcctgtgagggaggctggcccggccggctgccctacggtgcggacaggaggtcgcggtcgggaggggccctgcccggcggttgctgctggaaccagcccccgcaagggcccgcagcggccgggccgtttacctcagacccgcgccgcagcctcccggagcccgcgcccaggactccctcacgacctctccagggtcccggcccgacaccaaggggcaggtgaggggtggaacctggaggcacccgcgccagggcccctgagggaggcgggagggggacagcctcagtcctgactcgcagccgaggcgcgacgactccgcgcagtcccgcctgtggaggggcgtgcctcatcgcttgctaaccgagaggcgaagggcaaggggcgaagggcaagcgccggatcctttcgccccctccccacgtgaggccctggaggctgattggccgtgtgctgcggaggcggcaagaggaacgtgtcctggcacgtgccgaaggagcgctaaaggccaggggcggtcccacccgcgaagccctggaaggcggattggctgcgcgaggaagtggcgtgtcctcacttgagctgtctgggagcgagagtaagagataaaggcaagggcgcctgancgggcctgggcacctcctcccactgcgggcaaagggcaggcagttcgtgcgcggacacaagcactggcggaccgtggccatggcgggcgctgagtggaagtcgctggaggaatgcttggagaagcacctgccgctccccgacttgcaggaagtgaagcgcgttctctatggcaaggaactcaggaagcttgatctgcccagggaagctttcgaagctgcctccagagaagactttgaactgcagggatatgcctttgaagcagcggaggagcagctgagacgaccccgcattgtgcacgtggggctggttcagaacagaatccccctccccgcaaatgcccctgtggcagaacaggtctctgcccttcatagacgcataaaggctatcgtagaggtggctgcaatgtgtggagtcaacatcatctgtttccaggaagcatggactatgccctttgccttctgtacgagagagaagcttccttggacagaatttgctgagtcagcagaggatgggcccaccaccagattctgtcagaagctggcgaagaaccatgacatggtggtggtgtctcccatcctggaacgagacagcgagcatggggatgttttgtggaatacagccgtggtgatctccaattccggagcagtcctgggaaagaccaggaaaaaccacatccccagagtgggtgatttcaacgagtcaacttactacatggagggaaacctgggccaccccgtgttccagacgcagttcggaaggatcgcggtgaacatttgctacgggcggcaccaccccctcaactggcttatgtacagcatcaacggggctgagatcatcttcaacccctcggccacgataggagcactcagcgagtccctgtggcccatcgaggccagaaacgcagccattgccaatcactgcttcacctgcgccatcaatcgagtgggcaccctcaccaggactttggctacttttatggctcgagctatgtggcagcccctgacagcagccggactcctgggctgtcccgtagccgggatggactgctagttgctaagctcgacctaaacctctgccagcaggtgaatgatgtctggaacttcaagatgacgggcaggtatgagatgtacgcacgggagctcgccgaagctgtcaagtccaactacagccccaccatcgtgaaagagtagccggcttcagtgcctgccttggggtgaggaagacacctctgccccagtggattagcaagtgtggcaggcttaacatgtccaggttctccccaataacattgtccaggttggttttaaaattcccaggcagggggagagtggcatggggagtgacttcttaatgggtaaggggctgcttacttctggggtattggaaatgtttggggactaggtagaggtgaatgtactaaatgccactgaatttgtatacttcagaatgtttgttatgtaaattttacctcaatgtccatcccgtacaccagtgggaagagggtgagggctgatccagagaccctgagcctacagcaaggctgtggtgggtcggatggtctttggatgtgtcagcttagctaggccacagtcaccagtaattcaatcagacactaatctaggtatttctgtgaaggtattttgtagatgtgacagaagtccattcccaattgactaagtaagtgagattatctcagataatctgggtcagcctgacctgattagtcagaaggcctaaagaacagagctaagggtttccctgaggaagaaattctgcctgaggacagcagcccagtgcttggcgagagttcctgacagtctgcccttctgatagcctgcctcacagagtttagacatgactagccagctcctacaatcactgaagtcaattccttgcaataaatctcaatatatccccta

SEQ ID NO: 349413 - DNA, 3346 bp, Homo sapiens
  misc_feature (1735)..(1735): n is a, c, g, or t
ctgaagcccatttcctacacgtagcaccatttatttaaaacacacactacatatacacaacagaccaaatgcaaaggaaaaaaggggaaaaaggctgctgaagaccagagtcactaaaagttcaggctaagaatagacaaggaactctgagagctgctcagctatgtgacctcctgcaggggcttggcaagaagcccaattcagctttgttttttctgtgcttttacaaagaaagagcactagcttgggagtcaggagacctaggtaccagactttgctttgccagtgcctctttctgtggccttgggtaagtttttcccctctctgggcctcagtttcccatttgcaaaataaaagtgtttaagactaggttccaagattttccaattctaatgctgagaggatacagaggaaaacagaaagaatgctggctgaggaaccaggagacttgccttcttgtcccagctctgccactgacctgacctctttgggcctctgcttcctcatctataaaataagataaagcaacagaagcctccagcgactaagttaaactttcctggggtcacaaggtttacaagtggctgaataggatttctacagactggttccttcacccggctgcccgccgaagtaagcgggccttactgccctaattctcaataggaccccaaagaggacgcttctttgctcctgaagggatggcaccctttggattcgcggtaacagcaaatggggctctcactcctaccatctcagtgacagtttaaagcgcaccctaccgcaggaaagtgcccatatttgcacacacgcggcagagggcagggctgaaaaggggccctagggtgcagggggcgcgccctcacccggggaccccgcattttacaatattagctccaccgaggcgcacggaaccgcaggcgagcaactgaccttcggctccagcggccccaaagccgggggtgggaacgcgcgacccaggtagcggcatggactccgagcctggcccctcgggggttaaaactccccagacataaaggctccggacgacagaggtgcagccgccgcgtgcccgtgggacactgaaactcttcccttaccttcctcggtagtcctgtgagggaggctggcccggccggctgccctacggtgcggacaggaggtcgcggtcgggaggggccctgcccggcggttgctgctggaaccagcccccgcaagggcccgcagcggccgggccgtttacctcagacccgcgccgcagcctcccggagcccgcgcccaggactccctcacgacctctccagggtcccggcccgacaccaaggggcaggtgaggggtggaacctggaggcacccgcgccagggcccctgagggaggcgggagggggacagcctcagtcctgactcgcagccgaggcgcgacgactccgcgcagtcccgcctgtggaggggcgtgcctcatcgcttgctaaccgagaggcgaagggcaaggggcgaagggcaagcgccggatcctttcgccccctccccacgtgaggccctggaggctgattggccgtgtgctgcggaggcggcaagaggaacgtgtcctggcacgtgccgaaggagcgctaaaggccaggggcggtcccacccgcgaagccctggaaggcggattggctgcgcgaggaagtggcgtgtcctcacttgagctgtctgggagcgagagtaagagataaaggcaagggcgcctgancgggcctgggcacctcctcccactgcgggcaaagggcaggcagttcgtgcgcggacacaagcactggcggaccgtggccatggcgggcgctgagtggaagtcgctggaggaatgcttggagaagcacctgccgctccccgacttgcaggaagtgaagcgcgttctctatggcaaggaactcaggaagcttgatctgcccagggaagctttcgaagctgcctccagagaagactttgaactgcagggatatgcctttgaagcagcggaggagcagctgagacgaccccgcattgtgcacgtggggctggttcagaacagaatccccctccccgcaaatgcccctgtggcagaacaggtctctgcccttcatagacgcataaaggctatcgtagaggtggctgcaatgtgtggagtcaacatcatctgtttccaggaagcatggactatgccctttgccttctgtacgagagagaagcttccttggacagaatttgctgagtcagcagaggatgggcccaccaccagattctgtcagaagctggcgaagaaccatgacatggtggtggtgtctcccatcctggaacgagacagcgagcatggggatgttttgtggaatacagccgtggtgatctccaattccggagcagtcctgggaaagaccaggaaaaaccacatccccagagtgggtgatttcaacgagtcaacttactacatggagggaaacctgggccaccccgtgttccagacgcagttcggaaggatcgcggtgaacatttgctacgggcggcaccaccccctcaactggcttatgtacagcatcaacggggctgagatcatcttcaacccctcggccacgataggagcactcagcgagtccctgtggcccatcgaggccagaaacgcagccattgccaatcactgcttcacctgcgccatcaatcgagtgggcaccgtaagtcccgaggtctggctggggagaggagccaccacctggtggctctggtggggacaccccgttccctctgcacacatgccacaaatcctagggtccggaaaggggtaaaactggcttggtccgttacttttcaagatatctctgtcctcctgttttttctgtttttgtatttggctgaagcccttttattttccccattgaccccatacacttaacagttttgactgccaaacagaatgcacttattatatctcttcctcatccttattaatcagatagcaaactctaatcagaagatcttttcagtctgagataaccaaggtttctacactaagtctatctgacttctagcagcataaagaaacctgatgttttggctgggtttggtggctcatgcttgtaatcctaacactttgggaatccgaggctggcagatcacctgaggtcagaagtttgaaaccagcctggccagtgtggcaaaaccctgtctctactaaaaatataaaaattagcagggcaggctggcacgtgcctgtgattccagctactcaggaggctggggcacgagaatagcttgaacaaggaggcagaggttgcagtaagccaggatcgcgccactgcactccagcttgggtgacagagtgagactctgtcaa

SEQ ID NO: 349414 - DNA, 2105 bp, Homo sapiens
gcagaacacctccctggagaattgcaactaagatgtttatggcaatcgccctgcaagtgtctatttaattcctgaaaatgtcatttactggtgtgtttctgtaaaaatcatttctgaaaagttttgtcagcttggcttagcagctgggggaaaaaagcagcaaaatgagtcccctcaatcaagcctgtgattttttattttttcagactcatgaatcctcctgagaattaggcttatgacaagcacccaccccctccacctactccctggtttaaaccaggtgcctgctgacacgaaggaagattccggggcattttgatcctagtcacacagtgtttctaagtgggcattactcctgtcaatccacagtcttaaagatgttcctcagacgcgggccagagaaggacagggtctctggttggggccgtgtctcccatcgcattctccctttgcaggtgctgaagtgaggaaggcccacagctcagccaagcacatggggtgcctccctcctgggccactagcccactggccagtaagagaaccagggagcctttacttagagactcaaggttcagaagagggaaatgggaagtcactgtgaaatggcccagcttggaggaggtgaccctgctgccgaatctgaccccttatcctattacctaagttcctttcttgtttactggccctgaaatcacccgctttggagattgccttgcaaggcagcatagcagagtaggagagttagggtagggcaggtacagcctgtgctcagccctcacaggccctgcacaagcccaccaggcccccggctcccttctggcattcaccaggagagggtctgcccagcccagcaggtgggttccaggagaagggatggaggtgggaagtggtggttatggaactcctaccacttggatcttcacctgcatggtcattcagtcttcatagtcttcttttgaggacatttcagaaaaggaaactgaggctcaggatgaggatttgatccagggctgctaattcttctgacagagcacagccacgtggcttatgcctgcagcaggcccttcccaaaggctgttcaggccagggcaaggtgctgaggacaggctggcctggttgcaggtttggggtgtgaccggtgagtctcctggttgtccccaccactggcccaggaaagcctgcagccaggccaggctctgtccccaccactggcccaggaaagcctgcagccaggccaggctcagggctgagcatccactgagtctgcctggaaagtcggcaacctggttcctcttggtcctctcttacagcgagtccctgtggcccatcgaggccagaaacgcagccattgccaatcactgcttcacctgcgccatcaatcgagtgggcaccgtaagtcccgaggtctggctggggagaggagccaccacctggtggctctggtggggacaccccgttccctctgcacacatgccacaaatcctagggtccggaaaggggtaaaactggcttggtccgttacttttcaagatatctctgtcctcctgttttttctgtttttgtatttggctgaagcccttttgaaaagatctttgacatggcagttctcaccctatcacctccaagtatccagtttattttccccattgaccccatacacttaacagttttgactgccaaacagaatgcacttattatatctcttcctcatccttattaatcagatagcaaactctaatcagaagatcttttcagtctgagataaccaaggtttctacactaagtctatctgacttctagcagcataaagaaacctgatgttttggctgggtttggtggctcatgcttgtaatcctaacactttgggaatccgaggctggcagatcacctgaggtcagaagtttgaaaccagcctggccagtgtggcaaaaccctgtctctactaaaaatataaaaattagcagggcaggctggcacgtgcctgtgattccagctactcaggaggctggggcacgagaatagcttgaacaaggaggcagaggttgcagtaagccaggatcgcgccactgcactccagcttgggtgacagagtgagactctgtcaa

SEQ ID NO: 349415 - DNA, 3761 bp, Homo sapiens
  misc_feature (1735)..(1735): n is a, c, g, or t
ctgaagcccatttcctacacgtagcaccatttatttaaaacacacactacatatacacaacagaccaaatgcaaaggaaaaaaggggaaaaaggctgctgaagaccagagtcactaaaagttcaggctaagaatagacaaggaactctgagagctgctcagctatgtgacctcctgcaggggcttggcaagaagcccaattcagctttgttttttctgtgcttttacaaagaaagagcactagcttgggagtcaggagacctaggtaccagactttgctttgccagtgcctctttctgtggccttgggtaagtttttcccctctctgggcctcagtttcccatttgcaaaataaaagtgtttaagactaggttccaagattttccaattctaatgctgagaggatacagaggaaaacagaaagaatgctggctgaggaaccaggagacttgccttcttgtcccagctctgccactgacctgacctctttgggcctctgcttcctcatctataaaataagataaagcaacagaagcctccagcgactaagttaaactttcctggggtcacaaggtttacaagtggctgaataggatttctacagactggttccttcacccggctgcccgccgaagtaagcgggccttactgccctaattctcaataggaccccaaagaggacgcttctttgctcctgaagggatggcaccctttggattcgcggtaacagcaaatggggctctcactcctaccatctcagtgacagtttaaagcgcaccctaccgcaggaaagtgcccatatttgcacacacgcggcagagggcagggctgaaaaggggccctagggtgcagggggcgcgccctcacccggggaccccgcattttacaatattagctccaccgaggcgcacggaaccgcaggcgagcaactgaccttcggctccagcggccccaaagccgggggtgggaacgcgcgacccaggtagcggcatggactccgagcctggcccctcgggggttaaaactccccagacataaaggctccggacgacagaggtgcagccgccgcgtgcccgtgggacactgaaactcttcccttaccttcctcggtagtcctgtgagggaggctggcccggccggctgccctacggtgcggacaggaggtcgcggtcgggaggggccctgcccggcggttgctgctggaaccagcccccgcaagggcccgcagcggccgggccgtttacctcagacccgcgccgcagcctcccggagcccgcgcccaggactccctcacgacctctccagggtcccggcccgacaccaaggggcaggtgaggggtggaacctggaggcacccgcgccagggcccctgagggaggcgggagggggacagcctcagtcctgactcgcagccgaggcgcgacgactccgcgcagtcccgcctgtggaggggcgtgcctcatcgcttgctaaccgagaggcgaagggcaaggggcgaagggcaagcgccggatcctttcgccccctccccacgtgaggccctggaggctgattggccgtgtgctgcggaggcggcaagaggaacgtgtcctggcacgtgccgaaggagcgctaaaggccaggggcggtcccacccgcgaagccctggaaggcggattggctgcgcgaggaagtggcgtgtcctcacttgagctgtctgggagcgagagtaagagataaaggcaagggcgcctgancgggcctgggcacctcctcccactgcgggcaaagggcaggcagttcgtgcgcggacacaagcactggcggaccgtggccatggcgggcgctgagtggaagtcgctggaggaatgcttggagaagcacctgccgctccccgacttgcaggaagtgaagcgcgttctctatggcaaggaactcaggaagcttgatctgcccagggaagctttcgaagctgcctccagagaagactttgaactgcagggatatgcctttgaagcagcggaggagcagctgagacgaccccgcattgtgcacgtggggctggttcagaacagaatccccctccccgcaaatgcccctgtggcagaacaggtctctgcccttcatagacgcataaaggctatcgtagaggtggctgcaatgtgtggagtcaacatcatctgtttccaggaagcatggactatgccctttgccttctgtacgagagagaagcttccttggacagaatttgctgagtcagcagaggatgggcccaccaccagattctgtcagaagctggcgaagaaccatgacatggtggtggtgtctcccatcctggaacgagacagcgagcatggggatgttttgtggaatacagccgtggtgatctccaattccggagcagtcctgggaaagaccaggaaaaaccacatccccagagtgggtgatttcaacgagtcaacttactacatggagggaaacctgggccaccccgtgttccagacgcagttcggaaggatcgcggtgaacatttgctacgggcggcaccaccccctcaactggcttatgtacagcatcaacggggctgagatcatcttcaacccctcggccacgataggagcactcagcgagtccctgtggcccatcgaggccagaaacgcagccattgccaatcactgcttcacctgcgccatcaatcgagtgggcaccgagcacttcccgaacgagtttacctcgggagatggaaagaaagctcaccaggactttggctacttttatggctcgagctatgtggcagcccctgacagcagccggactcctgggctgtcccgtagccgggatggactgctagttgctaagctcgacctaaacctctgccagcaggtgaatgatgtctggaacttcaagatgacgggcaggtatgagatgtacgcacgggagctcgccgaagctgtcaagtccaactacagccccaccatcgtgaaagagtagccggcttcagtgcctgccttggggtgaggaagacacctctgccccagtggattagcaagtgtggcaggcttaacatgtccaggttctccccaataacattgtccaggttggttttaaaattcccaggcagggggagagtggcatggggagtgacttcttaatgggtaaggggctgcttacttctggggtattggaaatgtttggggactaggtagaggtgaatgtactaaatgccactgaatttgtatacttcagaatgtttgttatgtaaattttacctcaactaaaaaaaaaaaatgcccaggtactgcttgtgcaggtggatttgaggttaggcagatgatgctgtccatcccgtacaccagtgggaagagggtgagggctgatccagagaccctgagcctacagcaaggctgtggtgggtcggatggtctttggatgtgtcagcttagctaggccacagtcaccagtaattcaatcagacactaatctaggtatttctgtgaaggtattttgtagatgtgacagaagtccattcccaattgactaagtaagtgagattatctcagataatctgggtcagcctgacctgattagtcagaaggcctaaagaacagagctaagggtttccctgaggaagaaattctgcctgaggacagcagcccagtgcttggcgagagttcctgacagtctgcccttctgatagcctgcctcacagagtttagacatgactagccagctcctacaatcactgaagtcaattccttgcaataaatctcaatatatccccta

SEQ ID NO: 349416 - DNA, 3837 bp, Homo sapiens
  misc_feature (1735)..(1735): n is a, c, g, or t
ctgaagcccatttcctacacgtagcaccatttatttaaaacacacactacatatacacaacagaccaaatgcaaaggaaaaaaggggaaaaaggctgctgaagaccagagtcactaaaagttcaggctaagaatagacaaggaactctgagagctgctcagctatgtgacctcctgcaggggcttggcaagaagcccaattcagctttgttttttctgtgcttttacaaagaaagagcactagcttgggagtcaggagacctaggtaccagactttgctttgccagtgcctctttctgtggccttgggtaagtttttcccctctctgggcctcagtttcccatttgcaaaataaaagtgtttaagactaggttccaagattttccaattctaatgctgagaggatacagaggaaaacagaaagaatgctggctgaggaaccaggagacttgccttcttgtcccagctctgccactgacctgacctctttgggcctctgcttcctcatctataaaataagataaagcaacagaagcctccagcgactaagttaaactttcctggggtcacaaggtttacaagtggctgaataggatttctacagactggttccttcacccggctgcccgccgaagtaagcgggccttactgccctaattctcaataggaccccaaagaggacgcttctttgctcctgaagggatggcaccctttggattcgcggtaacagcaaatggggctctcactcctaccatctcagtgacagtttaaagcgcaccctaccgcaggaaagtgcccatatttgcacacacgcggcagagggcagggctgaaaaggggccctagggtgcagggggcgcgccctcacccggggaccccgcattttacaatattagctccaccgaggcgcacggaaccgcaggcgagcaactgaccttcggctccagcggccccaaagccgggggtgggaacgcgcgacccaggtagcggcatggactccgagcctggcccctcgggggttaaaactccccagacataaaggctccggacgacagaggtgcagccgccgcgtgcccgtgggacactgaaactcttcccttaccttcctcggtagtcctgtgagggaggctggcccggccggctgccctacggtgcggacaggaggtcgcggtcgggaggggccctgcccggcggttgctgctggaaccagcccccgcaagggcccgcagcggccgggccgtttacctcagacccgcgccgcagcctcccggagcccgcgcccaggactccctcacgacctctccagggtcccggcccgacaccaaggggcaggtgaggggtggaacctggaggcacccgcgccagggcccctgagggaggcgggagggggacagcctcagtcctgactcgcagccgaggcgcgacgactccgcgcagtcccgcctgtggaggggcgtgcctcatcgcttgctaaccgagaggcgaagggcaaggggcgaagggcaagcgccggatcctttcgccccctccccacgtgaggccctggaggctgattggccgtgtgctgcggaggcggcaagaggaacgtgtcctggcacgtgccgaaggagcgctaaaggccaggggcggtcccacccgcgaagccctggaaggcggattggctgcgcgaggaagtggcgtgtcctcacttgagctgtctgggagcgagagtaagagataaaggcaagggcgcctgancgggcctgggcacctcctcccactgcgggcaaagggcaggcagttcgtgcgcggacacaagcactggcggaccgtggccatggcgggcgctgagtggaagtcgctggaggaatgcttggagaagcacctgccgctccccgacttgcaggaagtgaagcgcgttctctatggcaaggaactcaggaagcttgatctgcccagggaagctttcgaagctgcctccagagaagactttgaactgcagggatatgcctttgaagcagcggaggagcagctgagacgaccccgcattgtgcacgtggggctggttcagaacagaatccccctccccgcaaatgcccctgtggcagaacaggtctctgcccttcatagacgcataaaggctatcgtagaggtggctgcaatgtgtggagtcaacatcatctgtttccaggaagcatggacggcagggctcggtcacgctggacacagtttccagatctacaccacaccgagatggctcaagccaagtggccagagctatgccctttgccttctgtacgagagagaagcttccttggacagaatttgctgagtcagcagaggatgggcccaccaccagattctgtcagaagctggcgaagaaccatgacatggtggtggtgtctcccatcctggaacgagacagcgagcatggggatgttttgtggaatacagccgtggtgatctccaattccggagcagtcctgggaaagaccaggaaaaaccacatccccagagtgggtgatttcaacgagtcaacttactacatggagggaaacctgggccaccccgtgttccagacgcagttcggaaggatcgcggtgaacatttgctacgggcggcaccaccccctcaactggcttatgtacagcatcaacggggctgagatcatcttcaacccctcggccacgataggagcactcagcgagtccctgtggcccatcgaggccagaaacgcagccattgccaatcactgcttcacctgcgccatcaatcgagtgggcaccgagcacttcccgaacgagtttacctcgggagatggaaagaaagctcaccaggactttggctacttttatggctcgagctatgtggcagcccctgacagcagccggactcctgggctgtcccgtagccgggatggactgctagttgctaagctcgacctaaacctctgccagcaggtgaatgatgtctggaacttcaagatgacgggcaggtatgagatgtacgcacgggagctcgccgaagctgtcaagtccaactacagccccaccatcgtgaaagagtagccggcttcagtgcctgccttggggtgaggaagacacctctgccccagtggattagcaagtgtggcaggcttaacatgtccaggttctccccaataacattgtccaggttggttttaaaattcccaggcagggggagagtggcatggggagtgacttcttaatgggtaaggggctgcttacttctggggtattggaaatgtttggggactaggtagaggtgaatgtactaaatgccactgaatttgtatacttcagaatgtttgttatgtaaattttacctcaactaaaaaaaaaaaatgcccaggtactgcttgtgcaggtggatttgaggttaggcagatgatgctgtccatcccgtacaccagtgggaagagggtgagggctgatccagagaccctgagcctacagcaaggctgtggtgggtcggatggtctttggatgtgtcagcttagctaggccacagtcaccagtaattcaatcagacactaatctaggtatttctgtgaaggtattttgtagatgtgacagaagtccattcccaattgactaagtaagtgagattatctcagataatctgggtcagcctgacctgattagtcagaaggcctaaagaacagagctaagggtttccctgaggaagaaattctgcctgaggacagcagcccagtgcttggcgagagttcctgacagtctgcccttctgatagcctgcctcacagagtttagacatgactagccagctcctacaatcactgaagtcaattccttgcaataaatctcaatatatccccta

SEQ ID NO: 349417 - DNA, 2466 bp, Homo sapiens
gcagaacacctccctggagaattgcaactaagatgtttatggcaatcgccctgcaagtgtctatttaattcctgaaaatgtcatttactggtgtgtttctgtaaaaatcatttctgaaaagttttgtcagcttggcttagcagctgggggaaaaaagcagcaaaatgagtcccctcaatcaagcctgtgattttttattttttcagactcatgaatcctcctgagaattaggcttatgacaagcacccaccccctccacctactccctggtttaaaccaggtgcctgctgacacgaaggaagattccggggcattttgatcctagtcacacagtgtttctaagtgggcattactcctgtcaatccacagtcttaaagatgttcctcagacgcgggccagagaaggacagggtctctggttggggccgtgtctcccatcgcattctccctttgcaggtgctgaagtgaggaaggcccacagctcagccaagcacatggggtgcctccctcctgggccactagcccactggccagtaagagaaccagggagcctttacttagagactcaaggttcagaagagggaaatgggaagtcactgtgaaatggcccagcttggaggaggtgaccctgctgccgaatctgaccccttatcctattacctaagttcctttcttgtttactggccctgaaatcacccgctttggagattgccttgcaaggcagcatagcagagtaggagagttagggtagggcaggtacagcctgtgctcagccctcacaggccctgcacaagcccaccaggcccccggctcccttctggcattcaccaggagagggtctgcccagcccagcaggtgggttccaggagaagggatggaggtgggaagtggtggttatggaactcctaccacttggatcttcacctgcatggtcattcagtcttcatagtcttcttttgaggacatttcagaaaaggaaactgaggctcaggatgaggatttgatccagggctgctaattcttctgacagagcacagccacgtggcttatgcctgcagcaggcccttcccaaaggctgttcaggccagggcaaggtgctgaggacaggctggcctggttgcaggtttggggtgtgaccggtgagtctcctggttgtccccaccactggcccaggaaagcctgcagccaggccaggctctgtccccaccactggcccaggaaagcctgcagccaggccaggctcagggctgagcatccactgagtctgcctggaaagtcggcaacctggttcctcttggtcctctcttacagcgagtccctgtggcccatcgaggccagaaacgcagccattgccaatcactgcttcacctgcgccatcaatcgagtgggcaccgagcacttcccgaacgagtttacctcgggagatggaaagaaagctcaccaggactttggctacttttatggctcgagctatgtggcagcccctgacagcagccggactcctgggctgtcccgtagccgggatggactgctagttgctaagctcgacctaaacctctgccagcaggtgaatgatgtctggaacttcaagatgacgggcaggtatgagatgtacgcacgggagctcgccgaagctgtcaagtccaactacagccccaccatcgtgaaagagtagccggcttcagtgcctgccttggggtgaggaagacacctctgccccagtggattagcaagtgtggcaggcttaacatgtccaggttctccccaataacattgtccaggttggttttaaaattcccaggcagggggagagtggcatggggagtgacttcttaatgggtaaggggctgcttacttctggggtattggaaatgtttggggactaggtagaggtgaatgtactaaatgccactgaatttgtatacttcagaatgtttgttatgtaaattttacctcaactaaaaaaaaaaaatgcccaggtactgcttgtgcaggtggatttgaggttaggcagatgatgctgtccatcccgtacaccagtgggaagagggtgagggctgatccagagaccctgagcctacagcaaggctgtggtgggtcggatggtctttggatgtgtcagcttagctaggccacagtcaccagtaattcaatcagacactaatctaggtatttctgtgaaggtattttgtagatgtgacagaagtccattcccaattgactaagtaagtgagattatctcagataatctgggtcagcctgacctgattagtcagaaggcctaaagaacagagctaagggtttccctgaggaagaaattctgcctgaggacagcagcccagtgcttggcgagagttcctgacagtctgcccttctgatagcctgcctcacagagtttagacatgactagccagctcctacaatcactgaagtcaattccttgcaataaatctcaatatatccccta

SEQ ID NO: 349418 - DNA, 3249 bp, Homo sapiens
  misc_feature (1735)..(1735): n is a, c, g, or t
ctgaagcccatttcctacacgtagcaccatttatttaaaacacacactacatatacacaacagaccaaatgcaaaggaaaaaaggggaaaaaggctgctgaagaccagagtcactaaaagttcaggctaagaatagacaaggaactctgagagctgctcagctatgtgacctcctgcaggggcttggcaagaagcccaattcagctttgttttttctgtgcttttacaaagaaagagcactagcttgggagtcaggagacctaggtaccagactttgctttgccagtgcctctttctgtggccttgggtaagtttttcccctctctgggcctcagtttcccatttgcaaaataaaagtgtttaagactaggttccaagattttccaattctaatgctgagaggatacagaggaaaacagaaagaatgctggctgaggaaccaggagacttgccttcttgtcccagctctgccactgacctgacctctttgggcctctgcttcctcatctataaaataagataaagcaacagaagcctccagcgactaagttaaactttcctggggtcacaaggtttacaagtggctgaataggatttctacagactggttccttcacccggctgcccgccgaagtaagcgggccttactgccctaattctcaataggaccccaaagaggacgcttctttgctcctgaagggatggcaccctttggattcgcggtaacagcaaatggggctctcactcctaccatctcagtgacagtttaaagcgcaccctaccgcaggaaagtgcccatatttgcacacacgcggcagagggcagggctgaaaaggggccctagggtgcagggggcgcgccctcacccggggaccccgcattttacaatattagctccaccgaggcgcacggaaccgcaggcgagcaactgaccttcggctccagcggccccaaagccgggggtgggaacgcgcgacccaggtagcggcatggactccgagcctggcccctcgggggttaaaactccccagacataaaggctccggacgacagaggtgcagccgccgcgtgcccgtgggacactgaaactcttcccttaccttcctcggtagtcctgtgagggaggctggcccggccggctgccctacggtgcggacaggaggtcgcggtcgggaggggccctgcccggcggttgctgctggaaccagcccccgcaagggcccgcagcggccgggccgtttacctcagacccgcgccgcagcctcccggagcccgcgcccaggactccctcacgacctctccagggtcccggcccgacaccaaggggcaggtgaggggtggaacctggaggcacccgcgccagggcccctgagggaggcgggagggggacagcctcagtcctgactcgcagccgaggcgcgacgactccgcgcagtcccgcctgtggaggggcgtgcctcatcgcttgctaaccgagaggcgaagggcaaggggcgaagggcaagcgccggatcctttcgccccctccccacgtgaggccctggaggctgattggccgtgtgctgcggaggcggcaagaggaacgtgtcctggcacgtgccgaaggagcgctaaaggccaggggcggtcccacccgcgaagccctggaaggcggattggctgcgcgaggaagtggcgtgtcctcacttgagctgtctgggagcgagagtaagagataaaggcaagggcgcctgancgggcctgggcacctcctcccactgcgggcaaagggcaggcagttcgtgcgcggacacaagcactggcggaccgtggccatggcgggcgctgagtggaagtcgctggaggaatgcttggagaagcacctgccgctccccgacttgcaggaagtgaagcgcgttctctatggcaaggaactcaggaagcttgatctgcccagggaagctttcgaagctgcctccagagaagactttgaactgcagggatatgcctttgaagcagcggaggagcagctgagacgaccccgcattgtgcacgtggggctggttcagaacagaatccccctccccgcaaatgcccctgtggcagaacaggtctctgcccttcatagacgcataaaggctatcgtagaggtggctgcaatgtgtggagtcaacatcatctgtttccaggaagcatggactatgccctttgccttctgtacgagagagaagcttccttggacagaatttgctgagtcagcagaggatgggcccaccaccagattctgtcagaagctggcgaagaaccatgacatggtggtggtgtctcccatcctggaacgagacagcgagcatggggatgttttgtggaatacagccgtggtgatctccaattccggagcagtcctgggaaagaccaggaaaaaccacatccccagagtgggtgatttcaacgagtcaacttactacatggagggaaacctgggccaccccgtgttccagacgcagttcggaaggatcgcggtgaacatttgctacgggcggcaccaccccctcaactggcttatgtacagcatcaacggggctgagatcatcttcaacccctcggccacgataggagcactcagcgagtccctgtggcccatcgaggccagaaacgcagccattgccaatcactgcttcacctgcgccatcaatcgagtgggcaccgagcacttcccgaacgagtttacctcgggagatggaaagaaagctcaccaggactttggctacttttatggctcgagctatgtggcagcccctgacagcagccggactcctgggctgtcccgtagccgggatggactgctagttgctaagctcgacctaaacctctgccagcaggtgaatgatgtctggaacttcaagatgacgggcaggtatgagatgtacgcacgggagctcgccgaagctgtcaagtccaactacagccccaccatcgtgaaagagtagccggcttcagtgcctgccttgggctgtttctgagggtgaacagccacagcagccctgtggacaccatgaggcttccacttcatcagaccatcagtgaaccaggccctggcatttaggagaacctctgtgaacttaggttcctgttgacccagtgactttgctttggtggagtgggggatataagtgtcccccaaagggttagctgccagttttttcatgtaaaactgagatgtcagcagggctagactagctgtgttcttaaatataccatttccatctt

SEQ ID NO: 349419 - DNA, 3400 bp, Homo sapiens
  misc_feature (1735)..(1735): n is a, c, g, or t
ctgaagcccatttcctacacgtagcaccatttatttaaaacacacactacatatacacaacagaccaaatgcaaaggaaaaaaggggaaaaaggctgctgaagaccagagtcactaaaagttcaggctaagaatagacaaggaactctgagagctgctcagctatgtgacctcctgcaggggcttggcaagaagcccaattcagctttgttttttctgtgcttttacaaagaaagagcactagcttgggagtcaggagacctaggtaccagactttgctttgccagtgcctctttctgtggccttgggtaagtttttcccctctctgggcctcagtttcccatttgcaaaataaaagtgtttaagactaggttccaagattttccaattctaatgctgagaggatacagaggaaaacagaaagaatgctggctgaggaaccaggagacttgccttcttgtcccagctctgccactgacctgacctctttgggcctctgcttcctcatctataaaataagataaagcaacagaagcctccagcgactaagttaaactttcctggggtcacaaggtttacaagtggctgaataggatttctacagactggttccttcacccggctgcccgccgaagtaagcgggccttactgccctaattctcaataggaccccaaagaggacgcttctttgctcctgaagggatggcaccctttggattcgcggtaacagcaaatggggctctcactcctaccatctcagtgacagtttaaagcgcaccctaccgcaggaaagtgcccatatttgcacacacgcggcagagggcagggctgaaaaggggccctagggtgcagggggcgcgccctcacccggggaccccgcattttacaatattagctccaccgaggcgcacggaaccgcaggcgagcaactgaccttcggctccagcggccccaaagccgggggtgggaacgcgcgacccaggtagcggcatggactccgagcctggcccctcgggggttaaaactccccagacataaaggctccggacgacagaggtgcagccgccgcgtgcccgtgggacactgaaactcttcccttaccttcctcggtagtcctgtgagggaggctggcccggccggctgccctacggtgcggacaggaggtcgcggtcgggaggggccctgcccggcggttgctgctggaaccagcccccgcaagggcccgcagcggccgggccgtttacctcagacccgcgccgcagcctcccggagcccgcgcccaggactccctcacgacctctccagggtcccggcccgacaccaaggggcaggtgaggggtggaacctggaggcacccgcgccagggcccctgagggaggcgggagggggacagcctcagtcctgactcgcagccgaggcgcgacgactccgcgcagtcccgcctgtggaggggcgtgcctcatcgcttgctaaccgagaggcgaagggcaaggggcgaagggcaagcgccggatcctttcgccccctccccacgtgaggccctggaggctgattggccgtgtgctgcggaggcggcaagaggaacgtgtcctggcacgtgccgaaggagcgctaaaggccaggggcggtcccacccgcgaagccctggaaggcggattggctgcgcgaggaagtggcgtgtcctcacttgagctgtctgggagcgagagtaagagataaaggcaagggcgcctgancgggcctgggcacctcctcccactgcgggcaaagggcaggcagttcgtgcgcggacacaagcactggcggaccgtggccatggcgggcgctgagtggaagtcgctggaggaatgcttggagaagcacctgccgctccccgacttgcaggaagtgaagcgcgttctctatggcaaggaactcaggaagcttgatctgcccagggaagctttcgaagctgcctccagagaagactttgaactgcagggatatgcctttgaagcagcggaggagcagctgagacgaccccgcattgtgcacgtggggctggttcagaacagaatccccctccccgcaaatgcccctgtggcagaacaggtctctgcccttcatagacgcataaaggctatcgtagaggtggctgcaatgtgtggagtcaacatcatctgtttccaggaagcatggactatgccctttgccttctgtacgagagagaagcttccttggacagaatttgctgagtcagcagaggatgggcccaccaccagattctgtcagaagctggcgaagaaccatgacatggtggtggtgtctcccatcctggaacgagacagcgagcatggggatgttttgtggaatacagccgtggtgatctccaattccggagcagtcctgggaaagaccaggaaaaaccacatccccagagtgggtgatttcaacgagtcaacttactacatggagggaaacctgggccaccccgtgttccagacgcagttcggaaggatcgcggtgaacatttgctacgggcggcaccaccccctcaactggcttatgtacagcatcaacggggctgagatcatcttcaacccctcggccacgataggagcactcagcgagtccctgtggcccatcgaggccagaaacgcagccattgccaatcactgcttcacctgcgccatcaatcgagtgggcaccgtaagtcccgaggtctggctggggagaggagccaccacctggtggctctggtggggacaccccgttccctctgcacacatgccacaaatcctagggtccggaaaggggtaaaactggcttggtccgttacttttcaagatatctctgtcctcctgttttttctgtttttgtatttggctgaagcccttttgaaaagatctttgacatggcagttctcaccctatcacctccaagtatccagtttattttccccattgaccccatacacttaacagttttgactgccaaacagaatgcacttattatatctcttcctcatccttattaatcagatagcaaactctaatcagaagatcttttcagtctgagataaccaaggtttctacactaagtctatctgacttctagcagcataaagaaacctgatgttttggctgggtttggtggctcatgcttgtaatcctaacactttgggaatccgaggctggcagatcacctgaggtcagaagtttgaaaccagcctggccagtgtggcaaaaccctgtctctactaaaaatataaaaattagcagggcaggctggcacgtgcctgtgattccagctactcaggaggctggggcacgagaatagcttgaacaaggaggcagaggttgcagtaagccaggatcgcgccactgcactccagcttgggtgacagagtgagactctgtcaa

SEQ ID NO: 349420 - DNA, 211 bp, Homo sapiens
  misc_feature (27)..(27): n is a, c, g, or t
accacgcgtcgcggacgcgtgggtcgnccacgcgtcggaataagagtactagctctcaccctctgccctttacttgaacaggagtcttgattctttttttgcctcatcagagaaggaatctggactccccatccccccaccaggataaaagtcctgacctttgttctcttgacggaataaaagcttgcttatccttatacttaaaaaaaag

SEQ ID NO: 349421 - DNA, 2658 bp, Homo sapiens
gcaataaggtaacaggtgtgcccacctctcagggctgctatgaggacaactgaggccacacacctggctctcaataagtgagtggtgctctgtgagcttctggcgagtaaggggcaccctactcattgcggccgggggcctcccccagcaaacgggtggaaagaggcctgagccccatccccagtttctgcccctgctatctccacccaggatccaccagaagatatgaagcaggaccgggacattcaggcagtggcgacctccctcctgccactgacagaagccaacctacgcatgtttcaacgtgcccaggacgaccttatccctgctgtggaccggcagtttgcctgctcctcctgcgaccacgtctggtggcgccgcgtgccccagcggaaggagatgtgaccgactgcagaggccgcgccgcctcccccgtccgaggtctgcgcgctccgccgcagggtgcagacccggggcgcccgcctgggtttggggcgcaagagcagaggcggagccagggcggagccagcgcgccgggtcccccctgaatcgaaagcgaaacaggggccggggaggaagggcggagccggccccgaggcaccgccccctgccctgcgcggctgctggaccgacgggcgcacccaggtaggggggcggctgagccgcgcagtgcggaccctcgcggggaactgcgccgccgccaccatgtctcaggaaggtgtggagctggagaagagcgtccggcgcctccgggagaagtttcatgggaaggtatcctccaagaaggcgggggctctgatgaggaaattcggcagcgaccacacgggagtggggcgctccatcgtgtacggggtaaagcaaaaagatggccaagaactaagtaacgatctggatgcccaggatccaccagaagatatgaagcaggaccgggacattcaggcagtggcgacctccctcctgccactgacagaagccaacctacgcatgtttcaacgtgcccaggacgaccttatccctgctgtggaccggcagtttgcctgctcctcctgcgaccacgtctggtggcgccgcgtgccccagcggaaggaggtatcccggtgccggaaatgccggaagcgctacgagccagtgccagctgacaagatgtggggcctggctgagttccactgcccgaagtgtcggcacaacttccggtgagggcgctgacccccagctccccctcagccctgccctaccccagccctgcccctccctgccctggccccaccctggcccagcctcgccctcggaccctcacagccctgcccgcccccaggggctgggcacagatggggtccccgtccccctgctacgggtgcggcttccccgtgtatccaacacggatcctccccccgcgctgggaccgggacccggatcgccgcagcacccacactcactcctgctcagctgccgactgctacaaccggcgagagccccacgtgcctgggacatcctgtgctcaccccaagagccggaagcagaaccacctgcccaaagtgctccaccccagcaaccctcacattagcagtggctccactgtggccacctgcttgagccagggtggcctcctggaagacctggacaacctcatcctggaggacctgaaggaggaggaggaggaagaggaggaggtggaggacgaggagggcgggcccagggagtgacccctgccaggtgcagatacaaaccagacacggtctgtggctactttgtgttattataagatatgagctcaaaccgagatatgaatgaccttggggagccatctgaggccaagatattgacgggggggattcctgggtcccattttcagcgcccagggtcacagatccacagtgggaagttctgtgggacacattggcactgagccacaaagaaggtgtggccagaacaacttgggctcctgctgaccaatgtcctctagggcctaggggacagaggaacacagagtcacagcttcaggggccgaatgagcatggcggccttcctgagagaatatgccccaccacgaaactcagcccagtagacaccatcctggtagcggcttcggtagtggccgccgtggtgccacacaccgttgaggttggagtgggcacaggcatggtaccaccagcctccccgctggtacagggcacagttacctgaggggagagagagagtccatgtcctctcaccagaataaaagcctctacctgcacctcacagtgcaaggcttttgccaggcatcccctggcccctcccattcttattgaatacaagccctgatcttccatctcctcagcaaaaaaataggagccctggccccccaactttcttcagagtaatagccttaattccttccctatctccttaccaaagtacaagtcacatctttcccaccttttctgcaaactaggagtctaccgttcattcctttatcaaagaaaagtatctacttcctttctagaataagagtactagctctcaccctctgccctttacttgaacaggagtcttgattctttttttgcctcatcagagaaggaatctggactccccatccccccaccaggataaaagtcctgacctttgttctcttgacggaataaaagcttgcttatccttatacttaaaaaaaag

SEQ ID NO: 349422 - DNA, 1226 bp, Homo sapiens
  misc_feature (27)..(27): n is a, c, g, or t
accacgcgtcgcggacgcgtgggtcgnccacgcgtcggagccccacgtgcctgggacatcctgtgctcaccccaagagccggaagcagaaccacctgcccaaagtgctccaccccagcaaccctcacattagcagtggctccactgtggccacctgcttgagccagggtggcctcctggaagacctggacaacctcatcctggaggacctgaaggaggaggaggaggaagaggaggaggtggaggacgaggagggcgggcccagggagtgacccctgccaggtgcagatacaaaccagacacggtctgtggctactttgtgttattataagatatgagctcaaaccgagatatgaatgaccttggggagccatctgaggccaagatattgacgggggggattcctgggtcccattttcagcgcccagggtcacagatccacagtgggaagttctgtgggacacattggcactgagccacaaagaaggtgtggccagaacaacttgggctcctgctgaccaatgtcctctagggcctaggggacagaggaacacagagtcacagcttcaggggccgaatgagcatggcggccttcctgagagaatatgccccaccacgaaactcagcccagtagacaccatcctggtagcggcttcggtagtggccgccgtggtgccacacaccgttgaggttggagtgggcacaggcatggtaccaccagcctccccgctggtacagggcacagttacctgaggggagagagagagtccatgtcctctcaccagaataaaagcctctacctgcacctcacagtgcaaggcttttgccaggcatcccctggcccctcccattcttattgaatacaagccctgatcttccatctcctcagcaaaaaaataggagccctggccccccaactttcttcagagtaatagccttaattccttccctatctccttaccaaagtacaagtcacatctttcccaccttttctgcaaactaggagtctaccgttcattcctttatcaaagaaaagtatctacttcctttctagaataagagtactagctctcaccctctgccctttacttgaacaggagtcttgattctttttttgcctcatcagagaaggaatctggactccccatccccccaccaggataaaagtcctgacctttgttctcttgacggaataaaagcttgcttatccttatacttaaaaaaaag

SEQ ID NO: 349423 - DNA, 2482 bp, Homo sapiens
gcaataaggtaacaggtgtgcccacctctcagggctgctatgaggacaactgaggccacacacctggctctcaataagtgagtggtgctctgtgagcttctggcgagtaaggggcaccctactcattgcggccgggggcctcccccagcaaacgggtggaaagaggcctgagccccatccccagtttctgcccctgctatctccacccaggatccaccagaagatatgaagcaggaccgggacattcaggcagtggcgacctccctcctgccactgacagaagccaacctacgcatgtttcaacgtgcccaggacgaccttatccctgctgtggaccggcagtttgcctgctcctcctgcgaccacgtctggtggcgccgcgtgccccagcggaaggagatgtgaccgactgcagaggccgcgccgcctcccccgtccgaggtctgcgcgctccgccgcagggtgcagacccggggcgcccgcctgggtttggggcgcaagagcagaggcggagccagggcggagccagcgcgccgggtcccccctgaatcgaaagcgaaacaggggccggggaggaagggcggagccggccccgaggcaccgccccctgccctgcgcggctgctggaccgacgggcgcacccaggtaggggggcggctgagccgcgcagtgcggaccctcgcggggaactgcgccgccgccaccatgtctcaggaaggtgtggagctggagaagagcgtccggcgcctccgggagaagtttcatgggaaggtatcctccaagaaggcgggggctctgatgaggaaattcggcagcgaccacacgggagtggggcgctccatcgtgtacggggtaaagcaaaaagatggccaagaactaagtaacgatctggatgcccaggatccaccagaagatatgaagcaggaccgggacattcaggcagtggcgacctccctcctgccactgacagaagccaacctacgcatgtttcaacgtgcccaggacgaccttatccctgctgtggaccggcagtttgcctgctcctcctgcgaccacgtctggtggcgccgcgtgccccagcggaaggaggtatcccggtgccggaaatgccggaagcgctacgagccagtgccagctgacaagatgtggggcctggctgagttccactgcccgaagtgtcggcacaacttccggggctgggcacagatggggtccccgtccccctgctacgggtgcggcttccccgtgtatccaacacggatcctccccccgcgctgggaccgggacccggatcgccgcagcacccacactcactcctgctcagctgccgactgctacaaccggcgagagccccacgtgcctgggacatcctgtgctcaccccaagagccggaagcagaaccacctgcccaaagtgctccaccccagcaaccctcacattagcagtggctccactgtggccacctgcttgagccagggtggcctcctggaagacctggacaacctcatcctggaggacctgaaggaggaggaggaggaagaggaggaggtggaggacgaggagggcgggcccagggagtgacccctgccaggtgcagatacaaaccagacacggtctgtggctactttgtgttattataagatatgagctcaaaccgagatatgaatgaccttggggagccatctgaggccaagatattgacgggggggattcctgggtcccattttcagcgcccagggtcacagatccacagtgggaagttctgtgggacacattggcactgagccacaaagaaggtgtggccagaacaacttgggctcctgctgaccaatgtcctctagggcctaggggacagaggaacacagagtcacagcttcaggggccgaatgagcatggcggccttcctgagagaatatgccccaccacgaaactcagcccagtagacaccatcctggtagcggcttcggtagtggccgccgtggtgccacacaccgttgaggttggagtgggcacaggcatggtaccaccagcctccccgctggtacagggcacagttacctgaggggagagagagagtccatgtcctctcaccagaataaaagcctctacctgcacctcacagtgcaaggcttttgccaggcatcccctggcccctcccattcttattgaatacaagccctgatcttccatctcctcagcaaaaaaataggagccctggccccccaactttcttcagagtaatagccttaattccttccctatctccttaccaaagtacaagtcacatctttcccaccttttctgcaaactaggagtctaccgttcattcctttatcaaagaaaattgaacaggagtcttgattctttttttgcctcatcagagaaggaatctggactccccatccccccaccaggataaaagtcctgacctttgttctcttgacggaataaaagcttgcttatccttatacttaaaaaaaag

SEQ ID NO: 349424 - DNA, 1864 bp, Homo sapiens
  misc_feature (1085)..(1085): n is a, c, g, or t
  misc_feature (1365)..(1365): n is a, c, g, or t
gcaataaggtaacaggtgtgcccacctctcagggctgctatgaggacaactgaggccacacacctggctctcaataagtgagtggtgctctgtgagcttctggcgagtaaggggcaccctactcattgcggccgggggcctcccccagcaaacgggtggaaagaggcctgagccccatccccagtttctgcccctgctatctccacccaggatccaccagaagatatgaagcaggaccgggacattcaggcagtggcgacctccctcctgccactgacagaagccaacctacgcatgtttcaacgtgcccaggacgaccttatccctgctgtggaccggcagtttgcctgctcctcctgcgaccacgtctggtggcgccgcgtgccccagcggaaggagatgtgaccgactgcagaggccgcgccgcctcccccgtccgaggtctgcgcgctccgccgcagggtgcagacccggggcgcccgcctgggtttggggcgcaagagcagaggcggagccagggcggagccagcgcgccgggtcccccctgaatcgaaagcgaaacaggggccggggaggaagggcggagccggccccgaggcaccgccccctgccctgcgcggctgctggaccgacgggcgcacccaggtaggggggcggctgagccgcgcagtgcggaccctcgcggggaactgcgccgccgccaccatgtctcaggaaggtgtggagctggagaagagcgtccggcgcctccgggagaagtttcatgggaaggtatcctccaagaaggcgggggctctgatgaggaaattcggcagcgaccacacgggagtggggcgctccatcgtgtacggggtaaagcaaaaagatggccaagaactaagtaacgatctggatgcccaggtaacctatcccctcccctcgcaaaggaccgggtcacgggagggagagcaagaggggggacccgacccgttcatggtgactgacccccctctgaaacaggagggaccaggcattgtcggtccataactcatcacccaatctcactttttcacctctccatcatttgtccggccagggagcctgcnaacagtaggcgctcattatgtgctgattgtattcaatgggggagagagccatgaaactaagcaatgaaaggagccaggattattgccatcatagcgggggcgcagaggtcagagaaggcttactggaggaggaggtaccaagtcttaaaggatggggaggagtgagccctgggaggggaaagggaaagaaaggcaggggtcttggggtgggggagggaatggcataagcaaaggctgggaggtggggaagggttgttagtggcagtctctagaaaggctnggatgagcagaggattggggaggagagagaggcaggggaatggaacccttgtgttgaatgaatgaatgaatgaatgaatgaatgaatgaatgaatgaatggctttgaagcacaggtgcatcatggctactttgcttctttgacagctttggtgatgggaacgctgtggatttagcctgcctgaaaggcttagtgtagggctgttaaagagtataataggccaggcgcggtggctcacgcctgcaatcccaacattttgggaggccgaggcgggcggatcacctgaggtcgggagtttgagaccagcctgaccaacatggagaaacccgtctctactaaaaaatacaaaattagctgggcatggtggcgcatgcctgtaatcccagctactcgggaggctgaggcaggagaatcacttgaacccaggaggcggaggttgcagtgagctgagatcacaccattgcactccagcctgggcaacaagagcgaaactctgtctc

SEQ ID NO: 349425 - DNA, 2536 bp, Homo sapiens
gcaataaggtaacaggtgtgcccacctctcagggctgctatgaggacaactgaggccacacacctggctctcaataagtgagtggtgctctgtgagcttctggcgagtaaggggcaccctactcattgcggccgggggcctcccccagcaaacgggtggaaagaggcctgagccccatccccagtttctgcccctgctatctccacccaggatccaccagaagatatgaagcaggaccgggacattcaggcagtggcgacctccctcctgccactgacagaagccaacctacgcatgtttcaacgtgcccaggacgaccttatccctgctgtggaccggcagtttgcctgctcctcctgcgaccacgtctggtggcgccgcgtgccccagcggaaggagatgtgaccgactgcagaggccgcgccgcctcccccgtccgaggtctgcgcgctccgccgcagggtgcagacccggggcgcccgcctgggtttggggcgcaagagcagaggcggagccagggcggagccagcgcgccgggtcccccctgaatcgaaagcgaaacaggggccggggaggaagggcggagccggccccgaggcaccgccccctgccctgcgcggctgctggaccgacgggcgcacccaggtaggggggcggctgagccgcgcagtgcggaccctcgcggggaactgcgccgccgccaccatgtctcaggaaggtgtggagctggagaagagcgtccggcgcctccgggagaagtttcatgggaaggtatcctccaagaaggcgggggctctgatgaggaaattcggcagcgaccacacgggagtggggcgctccatcgtgtacggggtaaagcaaaaagatggccaagaactaagtaacgatctggatgcccaggatccaccagaagatatgaagcaggaccgggacattcaggcagtggcgacctccctcctgccactgacagaagccaacctacgcatgtttcaacgtgcccaggacgaccttatccctgctgtggaccggcagtttgcctgctcctcctgcgaccacgtctggtggcgccgcgtgccccagcggaaggaggtatcccggtgccggaaatgccggaagcgctacgagccagtgccagctgacaagatgtggggcctggctgagttccactgcccgaagtgtcggcacaacttccggggctgggcacagatggggtccccgtccccctgctacgggtgcggcttccccgtgtatccaacacggatcctccccccgcgctgggaccgggacccggatcgccgcagcacccacactcactcctgctcagctgccgactgctacaaccggcgagagccccacgtgcctgggacatcctgtgctcaccccaagagccggaagcagaaccacctgcccaaagtgctccaccccagcaaccctcacattagcagtggctccactgtggccacctgcttgagccagggtggcctcctggaagacctggacaacctcatcctggaggacctgaaggaggaggaggaggaagaggaggaggtggaggacgaggagggcgggcccagggagtgacccctgccaggtgcagatacaaaccagacacggtctgtggctactttgtgttattataagatatgagctcaaaccgagatatgaatgaccttggggagccatctgaggccaagatattgacgggggggattcctgggtcccattttcagcgcccagggtcacagatccacagtgggaagttctgtgggacacattggcactgagccacaaagaaggtgtggccagaacaacttgggctcctgctgaccaatgtcctctagggcctaggggacagaggaacacagagtcacagcttcaggggccgaatgagcatggcggccttcctgagagaatatgccccaccacgaaactcagcccagtagacaccatcctggtagcggcttcggtagtggccgccgtggtgccacacaccgttgaggttggagtgggcacaggcatggtaccaccagcctccccgctggtacagggcacagttacctgaggggagagagagagtccatgtcctctcaccagaataaaagcctctacctgcacctcacagtgcaaggcttttgccaggcatcccctggcccctcccattcttattgaatacaagccctgatcttccatctcctcagcaaaaaaataggagccctggccccccaactttcttcagagtaatagccttaattccttccctatctccttaccaaagtacaagtcacatctttcccaccttttctgcaaactaggagtctaccgttcattcctttatcaaagaaaagtatctacttcctttctagaataagagtactagctctcaccctctgccctttacttgaacaggagtcttgattctttttttgcctcatcagagaaggaatctggactccccatccccccaccaggataaaagtcctgacctttgttctcttgacggaataaaagcttgcttatccttatacttaaaaaaaag

SEQ ID NO: 349426 - DNA, 1804 bp, Homo sapiens
aaagaaactgaggccgaagtcacttgccagcaagcaggggcagctgcgatttgaaccctggccacctggagtcagagcctgggctctaacatgcctccgagcacaacgtggcctcaaaggggcgatatgtcacaacatcaacaagcatgtggcatttgcaggcaggaagatccaccagaagatatgaagcaggaccgggacattcaggcagtggcgacctccctcctgccactgacagaagccaacctacgcatgtttcaacgtgcccaggacgaccttatccctgctgtggaccggcagtttgcctgctcctcctgcgaccacgtctggtggcgccgcgtgccccagcggaaggaggtatcccggtgccggaaatgccggaagcgctacgagccagtgccagctgacaagatgtggggcctggctgagttccactgcccgaagtgtcggcacaacttccggggctgggcacagatggggtccccgtccccctgctacgggtgcggcttccccgtgtatccaacacggatcctccccccgcgctgggaccgggacccggatcgccgcagcacccacactcactcctgctcagctgccgactgctacaaccggcgagagccccacgtgcctgggacatcctgtgctcaccccaagagccggaagcagaaccacctgcccaaagtgctccaccccagcaaccctcacattagcagtggctccactgtggccacctgcttgagccagggtggcctcctggaagacctggacaacctcatcctggaggacctgaaggaggaggaggaggaagaggaggaggtggaggacgaggagggcgggcccagggagtgacccctgccaggtgcagatacaaaccagacacggtctgtggctactttgtgttattataagatatgagctcaaaccgagatatgaatgaccttggggagccatctgaggccaagatattgacgggggggattcctgggtcccattttcagcgcccagggtcacagatccacagtgggaagttctgtgggacacattggcactgagccacaaagaaggtgtggccagaacaacttgggctcctgctgaccaatgtcctctagggcctaggggacagaggaacacagagtcacagcttcaggggccgaatgagcatggcggccttcctgagagaatatgccccaccacgaaactcagcccagtagacaccatcctggtagcggcttcggtagtggccgccgtggtgccacacaccgttgaggttggagtgggcacaggcatggtaccaccagcctccccgctggtacagggcacagttacctgaggggagagagagagtccatgtcctctcaccagaataaaagcctctacctgcacctcacagtgcaaggcttttgccaggcatcccctggcccctcccattcttattgaatacaagccctgatcttccatctcctcagcaaaaaaataggagccctggccccccaactttcttcagagtaatagccttaattccttccctatctccttaccaaagtacaagtcacatctttcccaccttttctgcaaactaggagtctaccgttcattcctttatcaaagaaaagtatctacttcctttctagaataagagtactagctctcaccctctgccctttacttgaacaggagtcttgattctttttttgcctcatcagagaaggaatctggactccccatccccccaccaggataaaagtcctgacctttgttctcttgacggaataaaagcttgcttatccttatacttaaaaaaaag

SEQ ID NO: 349427 - DNA, 2003 bp, Homo sapiens
gcaataaggtaacaggtgtgcccacctctcagggctgctatgaggacaactgaggccacacacctggctctcaataagtgagtggtgctctgtgagcttctggcgagtaaggggcaccctactcattgcggccgggggcctcccccagcaaacgggtggaaagaggcctgagccccatccccagtttctgcccctgctatctccacccaggatccaccagaagatatgaagcaggaccgggacattcaggcagtggcgacctccctcctgccactgacagaagccaacctacgcatgtttcaacgtgcccaggacgaccttatccctgctgtggaccggcagtttgcctgctcctcctgcgaccacgtctggtggcgccgcgtgccccagcggaaggagatgtgaccgactgcagaggccgcgccgcctcccccgtccgaggtctgcgcgctccgccgcagggtgcagacccggggcgcccgcctgggtttggggcgcaagagcagaggcggagccagggcggagccagcgcgccgggtcccccctgaatcgaaagcgaaacaggggccggggaggaagggcggagccggccccgaggcaccgccccctgccctgcgcggctgctggaccgacgggcgcacccaggtaggggggcggctgagccgcgcagtgcggaccctcgcggggaactgcgccgccgccaccatgtctcaggaaggtgtggagctggagaagagcgtccggcgcctccgggagaagtttcatgggaaggtatcctccaagaaggcgggggctctgatgaggaaattcggcagcgaccacacgggagtggggcgctccatcgtgtacggggtaaagcaaaaagatggccaagaactaagtaacgatctggatgcccaggatccaccagaagatatgaagcaggaccgggacattcaggcagtggcgacctccctcctgccactgacagaagccaacctacgcatgtttcaacgtgcccaggacgaccttatccctgctgtggaccggcagtttgcctgctcctcctgcgaccacgtctggtggcgccgcgtgccccagcggaaggaggtatcccggtgccggaaatgccggaagcgctacgagccagtgccagctgacaagatgtggggcctggctgagttccactgcccgaagtgtcggcacaacttccggggctgggcacagatggggtccccgtccccctgctacgggtgcggcttccccgtgtatccaacacggatcctccccccgcgctgggaccgggacccggatcgccgcagcacccacactcactcctgctcagctgccgactgctacaaccggcgagagccccacgtgcctgggacatcctgtgctcaccccaagagccggaagcagaaccacctgcccaaagtgctccaccccagcaaccctcacattagcagtggctccactgtggccacctgcttgagccagggtggcctcctggaagacctggacaacctcatcctggaggacctgaaggaggaggaggaggaagaggaggaggtggaggacgaggagggcgggcccagggagtgacccctgccaggtgcagatacaaaccagacacggtctgtggctactttgtgttattataagatatgagctcaaaccgagatatgaatgaccttggggagccatctgaggccaagtttcttcagagtaatagccttaattccttccctatctccttaccaaagtacaagtcacatctttcccaccttttctgcaaactaggagtctaccgttcattcctttatcaaagaaaagtatctacttcctttctagaataagagtactagctctcaccctctgccctttacttgaacaggagtcttgattctttttttgcctcatcagagaaggaatctggactccccatccccccaccaggataaaagtcctgacctttgttctcttgacggaataaaagcttgcttatccttatacttaaaaaaaag

SEQ ID NO: 349428 - DNA, 415 bp, Homo sapiens
gcgctgtcccgtgctttagccactaggtgcctgtcactcgggagcacttgaaaagtgggtccctgccactgagcagctgaactggtcattttatttaattttaatttacttaaatttaaacagccacctgtggctgtggctaatggctacttaacccgagggcacagggttgggtgatgaagtcatattctgtgtttcggagcagggcctgggctcttggtatctgattccttccccaatgccccacctgcaccccaactttttttctgaggtagggtcttgctctgtcaccaaggctggagtgcagtggtaccatcacagctcattacagccatgaactcctgggctcaaattaacctcccgcctcagcctcccaaatagctgagacgacaggtgtacaccaccatgactggct

SEQ ID NO: 349429 - DNA, 221 bp, Homo sapiens
gagctatttatattagctctgccaaaattacatcattaaatttggccttatgaagcattgctgactgtagtaaaaacaagtgtgagcaaagtcttcatatgcactgagtctggtttcagttccacgtaatactgacttggcaagtgtggaaattctcatgtcatcattaccaaaaaaaagtgagttcacacagggatttctgatcaagtgacccattactg

SEQ ID NO: 349430 - DNA, 500 bp, Homo sapiens
agctagataagtaagaagaaatgaccagtagatctgacaggaaagtgggctcgatgtgattagccgactcccaggagaagctgataaagggcaagttctacttctttttgctcagatctggaggcaagcagagttcaggggcccataggaaaaagagaaggctttggttaagacaaagcagagggtaagaaatgggcaattgtgaatgcttagttagaaaatacaggctgggcacagtggctcatgcctgtaataccaacactttgggaggtcgaggtgggtggatcacgaggtaaggagattgagaccatcctggctaaaatggtgaaaccttgtctctactaaaaatataaaaaattagctcggcatggtgacatgtgcctgtaatcccagccactctggaggctgaggcagaagaatcgcttcaacccaggaggcggaggttccagtgagccgagatggtgccactgcactccagcctgggcaacagagcaagacac

SEQ ID NO: 349431 - DNA, 503 bp, Homo sapiens
gcatgtatgtttacacatgcacacacactcccaggctggatgcccagaaccccactgtgatcaatattgaacgactggagaaatactccactccttccacccactgggcctctcttgattatctgctgtacaccaagctgcttcatttccatagctcctgagaatctgctgacaaagaattagccctggcccagcttccccatcctgaggacgccttggcttccagcattacagctcattaggtggagagaggtttgcatgcaaggcaagtggaaagggggtcccatcccttccacttccttctttctcccagctagcaaattccaagccgagactgtccatgctccagagaggatttctgctgccacagaggaggggaaggtggggagaaggttggctcctgctctgtgcctccccatctggatctcatcattattttcaaggaggcttatctgcttcagcatcctgtcccaattaaaaaccaactcagtttatgtttccag

SEQ ID NO: 349432 - DNA, 257 bp, Homo sapiens
ccatcttcatgcacctgattcctgaagctccccctgccatttccaggagaaaatacactttcctagccacttctcatcagaggccctctgttttcctacctattgctgccacataaagaagaggtcaaagagggtcaggccctggcagcacttctaggtatttgcaggtgggaaggaacccctccaaacaacactgccttagccaggcatggtagcacatgtctgtagtcccagctactcagaggcagaggcaggag

SEQ ID NO: 349433 - DNA, 551 bp, Homo sapiens
tagaacgttactgctccaatgattcagtgaggatctcgaaatgaattctgaagtcttccaatgtttgcatttattggaggggctcccgagttctatcaacttgttttttcaagtcttgttctcatcttgtgcataaatgttaacgcttcccaaagtaaaaacttagctttcttacttttactttttattaaatttaatacaaaatatgacctgagtagttaaaaaatattttacattatttgcagtaagatgtcattagccctttcaaagagcaaattttaaaacttcaatctgggtgaaagattggctagttttatagaaagatttgccgtcttaaactcaagctgatttttctatttttatgtaaataactgagatgccatcttattaattcttccaaggtcatgtttgtaaaataaacattacatgagagctttcctgtcatctacactgtatgttgtttagagtgttgaacaaatttgagttcctaagttgtaatctgtcctcatgtggtctatgctatttgcacgtgtgccactacacgctgagat

SEQ ID NO: 349434 - DNA, 470 bp, Homo sapiens
tctctaaaggaccatcaggtgaaagttacatgaagccataaacttaatatggagagtacttttctaaccttttataaagtggggtaaatgaaatggggttctctattaaatagtggactcctaatccctgcaagtagtaaagcaaaaaaaaaaaacaaacaaaaaacttttaaactacatatataggatataataaagcaaatccaatgacaaaaggtatgctgaggtgtcaaaatacagggcgaaaacacaggaggaagtgtttaaatatgactaagaaatctaagaagacttttggaggaggcagcatttaagctgggcattcatttacacacaggtctttactaccctagcttgaaatttaaggttcagagcaataaactaaaaaaagaatttattttttctaattccaacttcactcctcttaaaaattctgcccttcctctgaattaaatgtatacacaaaaaca

SEQ ID NO: 349435 - DNA, 698 bp, Homo sapiens
gaaggtgggtctgtaaagcaggtggactctgggcattgctgtgggtgcaaacttcccttaggaagagcctggtgatttgtgaggaaatgacctcattgttaaaaagaagaatgcatccaggatccttattatgtctgctgagaatgacccttcatggactctggaatctggagcaggtggggagagaggtcaagaagggctgtttctcctttaactctcacccaagcttgcccaaaggggaccatgtgactggcattcatgggctagtcagaagagagaaatgtagtgcccctctgtcttatacctgctaaggatgctaaggggggtgtgtcttgagaaacagtatatagaatctgatggggaacaaagggaaagatttctagagatcaagaaaagagctgcacaaaaagaaaacacattttcagtggggagctgtttccttccatgtggcgctgtgattattttagcctctggaaagaagctccctcactcctaccagggaagaaagaggggcttaagtcgcttggattgaatgtggaaagattctactgagcatgctcagctcagcctcgccctctttttcatggggggagctgtccatagggtcagaagtttcttccgcgtctctgtctcacctgagcagttcacttcctgccacaggaaaacctgtcccgcatcagcccttccagagattttgt

SEQ ID NO: 349436 - DNA, 748 bp, Homo sapiens
cataaagctagcacttatttcaagtacagtgggaagcctttgtggggagtggggaatatgcaagtttaatgatgtgatttacatttgtaatggatcagtggctactatttggaaattcagtcatgtatgggaaagtagaattcgagagccaaattagaaacagaccaaaggtgattttctttggggataaactaccagtagtctagacccgaatttaaaggtcttatattctatacctggctcattttattgtctgagaaaattccctgtaatctttgtttttcctcctctatgttgtgtttattttattttccatcacatttataacccctcagttaaatgatacgctaatgaaatctaaaactgtagtgtatgcttctagtctttcaagaccatttgtcaggtctgaatatttttttgctttgcatttttatatatactcattttttagaggtattgtgaaatgcttaaaactcaatttaaattctctccagtgtatgtgcttacatgtacttatgtgtggcttacccatgattataatttgcctaccactggaaataataaccaataatgtcgaaaattatttgagtaccctctgagtcacactgtagcaagtgctcatttaactgacacagcactctagcaaaataaatattttatgcccataagaaaacagacgttctgagagagaaagtaatttgtctaaggctacatagcttgttagtgaaaaatctgatttttaaacttg

SEQ ID NO: 349437 - DNA, 557 bp, Homo sapiens
aaaatttttttaatgctactattgttgtaatgagtcatattaagtgggattatacatgtaccaaacttttattttttcttgagtgagattatttcatggttattttaattggcatgccttacgattgagttaaattgattatatttgtcacttttttttgcaaactgcctaccagtaccctatttcgggtactttgcagcttcaaataagaaaaattttaattaaaaatgcattaaaccataaataaaatttacctcacatgactggaagtccaggtgtaattcagtggctcaattaaattatcacggacctagatggttttcattttcctgctgttttatactcagcttgttgtcgatagttgctaaattaattcacttaaataatcatttaccacctaaaatgtattaggcagtagtccataagcacgggaaatacagcagtgagcaaaacaaagttcattgccttccttcacgggcttatattttagtggggataagggagaagacagtcaaacaaataggtagaatttatagattgtcagaagatgttaagtt

SEQ ID NO: 349438 - DNA, 341 bp, Homo sapiens
  misc_feature (45)..(45): n is a, c, g, or t
ccttggctaaacaagataaggagtatgcagtgtggcaccactttngggagaaatcaaaaggttctggcttcagtgatcctctcactggagcaccatctcaatacttagagagactttccaaaatagccatattggaatatgataccattcgtcaggaaacaaccacaaaatcaaaaaaaagcaagaaacgagacctccgagaccgctgaaaaatgtcgtacagtgtgatgctttcttcagtgacttttaagctttatattttctttttttatatgatatgatgcaaaatgatttatataaaaatggaaatgtaaataaataaatattttacattataaaaa

SEQ ID NO: 349439 - DNA, 434 bp, Homo sapiens
gtgtggaaatggcctgtagcctgcaggagcctgaggagaagagaggagctagcagccccagtcaagtctagcgaagtgcatcttggcctgcagtgatggctgtttcccccagaaagttcttccacttctggatcccacctcgactgaaccttacacaatctactgctggactttccaatggcatgagttggtaaatcatctcatttttgcaaaagcaagtgtaacttgagtttccatcacttgcagctgagagaacacttgttcttgaattttatccacaatgaggtgctggatgttttctgtttgccccatgaactcactctctgccttccctgtcttgctgtctacccttactggttcttttttcctttctgctttggtttccagttggctctggccaatgatagaagacgataaaagagcgagggagaata

SEQ ID NO: 349440 - DNA, 1504 bp, Homo sapiens
cccgccctggccctcgcggttgccctgcccccgccagccccaggctccccgggcccgcgccgcgccgctctttctccgacagccgccgggggtgccctgcaagctgttccgcgcgtcctgcccgtctgtccccgcgggtcgtcgcccgccacagccgcgccatgaccacccagcagatagacctccagggcccggggccgtggggcttccgcctcgtgggcggcaaggacttcgagcagcctctcgccatttcccgggtcactcctggaagcaaggcggctctagctaatttatgtattggagatgtaatcacagccattgatggggaaaatactagcaatatgacacacttggaagctcagaacagaatcaaaggctgcacagacaacttgactctcactgtagccagatctgaacataaagtctggtctcctctggtgacggaggaagggaagcgtcatccatacaagatgaatttagcctctgaaccccaggaggtcctgcacataggaagcgcccacaaccgaagtgccatgccctttaccgcctcgcctgcctccagcactactgccagggtcatcacaaaccagtacaacaacccagctggcctctactcttctgaaaatatctccaacttcaacaatgccctggagtcaaagactgctgccagcggggtggaggcgaacagcagacccttagaccatgctcagcctccaagcagccttgtcatcgacaaagaatctgaagtttacaagatgcttcaggagaaacaggagttgaatgagcccccgaaacagtccacgtctttcttggttttgcaggaaatcctggagtctgaagaaaaaggggatcccaacaagccctcaggattcagaagtgttaaagctcctgtcactaaagtggctgcgtcgattggaaatgctcagaagttgcctatgtgtgacaaatgtggcactgggattgttggtgtgtttgtgaagctgcgggaccgtcaccgccaccctgagtgttatgtgtgcactgactgtggcaccaacctgaaacagaagggccatttctttgtggaggatcaaatctactgtgagaagcatgcccgggagcgagtcacaccacctgagggttatgaagtggtcactgtgttccccaagtgagccagcagatctgaccactgttctccagcaggcctctgctgcagctttttctctcagtgttctggccctctcctctcttgaaagttctctgcttactttggttttccctctgcttgtaaaacattgagtcccctccctgccttggttaattgactcacaccagctgtgcgatgcccgcttttacaattaaaggaaaactgttgtgttcagtgtcaccttgtcagcaacactgtgtcccttcgccccgccgttcttctctgctgcatttggacatcagccaaatttgaacccaatcaaatataacgtgtctgacactgattttgtttttactcaataaatgtatagactacaaa

SEQ ID NO: 349441 - DNA, 392 bp, Homo sapiens
cccccccccgcgcctaactaggctaggtacgaggcgggtgttaatcggccgaggccatgttctccagcaggcctctgctgcagctttttctctcagtgttctggccctctcctctcttgaaagttctctgcttactttggttttccctctgcttgtaaaacattgagtcccctccctgccttggttaattgactcacaccagctgtgcgatgcccgcttttacaattaaaggaaaactgttgtgttcagtgtcaccttgtcagcaacactgtgtcccttcgccccgccgttcttctctgctgcatttggacatcagccaaatttgaacccaatcaaatataacgtgtctgacactgattttgtttttactcaataaatgtatagactacaaa

SEQ ID NO: 349442 - DNA, 1269 bp, Homo sapiens
ctgctttcccctttttttctaggtcactcctggaagcaaggcggctctagctaatttatgtattggagatgtaatcacagccattgatggggaaaatactagcaatatgacacacttggaagctcagaacagaatcaaaggctgcacagacaacttgactctcactgtagccagatctgaacataaagtctggtctcctctggtgacggaggaagggaagcgtcatccatacaagatgaatttagcctctgaaccccaggaggtcctgcacataggaagcgcccacaaccgaagtgccatgccctttaccgcctcgcctgcctccagcactactgccagggtcatcacaaaccagtacaacaacccagctggcctctactcttctgaaaatatctccaacttcaacaatgccctggagtcaaagactgctgccagcggggtggaggcgaacagcagacccttagaccatgctcagcctccaagcagccttgtcatcgacaaagaatctgaagtttacaagatgcttcaggagaaacaggagttgaatgagcccccgaaacagtccacgtctttcttggttttgcaggaaatcctggagtctgaagaaaaaggggatcccaacaagccctcaggattcagaagtgttaaagctcctgtcactaaagtggctgcgtcgattggaaatgctcagaagttgcctatgtgtgacaaatgtggcactgggattgttggtgtgtttgtgaagctgcgggaccgtcaccgccaccctgagtgttatgtgtgcactgactgtggcaccaacctgaaacagaagggccatttctttgtggaggatcaaatctactgtgagaagcatgcccgggagcgagtcacaccacctgagggttatgaagtggtcactgtgttccccaagtgagccagcagatctgaccactgttctccagcaggcctctgctgcagctttttctctcagtgttctggccctctcctctcttgaaagttctctgcttactttggttttccctctgcttgtaaaacattgagtcccctccctgccttggttaattgactcacaccagctgtgcgatgcccgcttttacaattaaaggaaaactgttgtgttcagtgtcaccttgtcagcaacactgtgtcccttcgccccgccgttcttctctgctgcatttggacatcagccaaatttgaacccaatcaaatataacgtgtctgacactgattttgtttttactcaataaatgtatagactacaaa

SEQ ID NO: 349443 - DNA, 1298 bp, Homo sapiens
  misc_feature (28)..(28): n is a, c, g, or t
ctagtaatgagataacaaacaaacaaanttggaacaaaaaagccacatttggtcactcctggaagcaaggcggctctagctaatttatgtattggagatgtaatcacagccattgatggggaaaatactagcaatatgacacacttggaagctcagaacagaatcaaaggctgcacagacaacttgactctcactgtagccagatctgaacataaagtctggtctcctctggtgacggaggaagggaagcgtcatccatacaagatgaatttagcctctgaaccccaggaggtcctgcacataggaagcgcccacaaccgaagtgccatgccctttaccgcctcgcctgcctccagcactactgccagggtcatcacaaaccagtacaacaacccagctggcctctactcttctgaaaatatctccaacttcaacaatgccctggagtcaaagactgctgccagcggggtggaggcgaacagcagacccttagaccatgctcagcctccaagcagccttgtcatcgacaaagaatctgaagtttacaagatgcttcaggagaaacaggagttgaatgagcccccgaaacagtccacgtctttcttggttttgcaggaaatcctggagtctgaagaaaaaggggatcccaacaagccctcaggattcagaagtgttaaagctcctgtcactaaagtggctgcgtcgattggaaatgctcagaagttgcctatgtgtgacaaatgtggcactgggattgttggtgtgtttgtgaagctgcgggaccgtcaccgccaccctgagtgttatgtgtgcactgactgtggcaccaacctgaaacagaagggccatttctttgtggaggatcaaatctactgtgagaagcatgcccgggagcgagtcacaccacctgagggttatgaagtggtcactgtgttccccaagtgagccagcagatctgaccactgttctccagcaggcctctgctgcagctttttctctcagtgttctggccctctcctctcttgaaagttctctgcttactttggttttccctctgcttgtaaaacattgagtcccctccctgccttggttaattgactcacaccagctgtgcgatgcccgcttttacaattaaaggaaaactgttgtgttcagtgtcaccttgtcagcaacactgtgtcccttcgccccgccgttcttctctgctgcatttggacatcagccaaatttgaacccaatcaaatataacgtgtctgacactgattttgtttttactcaataaatgtatagactacaaa

SEQ ID NO: 349444 - DNA, 1289 bp, Homo sapiens
ttaggcgcgttctgcgtcgagcagcctctcgccatttcccgggtcactcctggaagcaaggcggctctagctaatttatgtattggagatgtaatcacagccattgatggggaaaatactagcaatatgacacacttggaagctcagaacagaatcaaaggctgcacagacaacttgactctcactgtagccagatctgaacataaagtctggtctcctctggtgacggaggaagggaagcgtcatccatacaagatgaatttagcctctgaaccccaggaggtcctgcacataggaagcgcccacaaccgaagtgccatgccctttaccgcctcgcctgcctccagcactactgccagggtcatcacaaaccagtacaacaacccagctggcctctactcttctgaaaatatctccaacttcaacaatgccctggagtcaaagactgctgccagcggggtggaggcgaacagcagacccttagaccatgctcagcctccaagcagccttgtcatcgacaaagaatctgaagtttacaagatgcttcaggagaaacaggagttgaatgagcccccgaaacagtccacgtctttcttggttttgcaggaaatcctggagtctgaagaaaaaggggatcccaacaagccctcaggattcagaagtgttaaagctcctgtcactaaagtggctgcgtcgattggaaatgctcagaagttgcctatgtgtgacaaatgtggcactgggattgttggtgtgtttgtgaagctgcgggaccgtcaccgccaccctgagtgttatgtgtgcactgactgtggcaccaacctgaaacagaagggccatttctttgtggaggatcaaatctactgtgagaagcatgcccgggagcgagtcacaccacctgagggttatgaagtggtcactgtgttccccaagtgagccagcagatctgaccactgttctccagcaggcctctgctgcagctttttctctcagtgttctggccctctcctctcttgaaagttctctgcttactttggttttccctctgcttgtaaaacattgagtcccctccctgccttggttaattgactcacaccagctgtgcgatgcccgcttttacaattaaaggaaaactgttgtgttcagtgtcaccttgtcagcaacactgtgtcccttcgccccgccgttcttctctgctgcatttggacatcagccaaatttgaacccaatcaaatataacgtgtctgacactgattttgtttttactcaataaatgtatagactacaaa

SEQ ID NO: 349445 - DNA, 1550 bp, Homo sapiens
  misc_feature (1506)..(1506): n is a, c, g, or t
  misc_feature (1513)..(1513): n is a, c, g, or t
  misc_feature (1520)..(1520): n is a, c, g, or t
  misc_feature (1522)..(1522): n is a, c, g, or t
  misc_feature (1524)..(1524): n is a, c, g, or t
  misc_feature (1530)..(1530): n is a, c, g, or t
  misc_feature (1532)..(1532): n is a, c, g, or t
  misc_feature (1536)..(1536): n is a, c, g, or t
  misc_feature (1542)..(1542): n is a, c, g, or t
cccgccctggccctcgcggttgccctgcccccgccagccccaggctccccgggcccgcgccgcgccgctctttctccgacagccgccgggggtgccctgcaagctgttccgcgcgtcctgcccgtctgtccccgcgggtcgtcgcccgccacagccgcgccatgaccacccagcagatagacctccagggcccggggccgtggggcttccgcctcgtgggcggcaaggacttcgagcagcctctcgccatttcccgggtcactcctggaagcaaggcggctctagctaatttatgtattggagatgtaatcacagccattgatggggaaaatactagcaatatgacacacttggaagctcagaacagaatcaaaggctgcacagacaacttgactctcactgtagccagatctgaacataaagtctggtctcctctggtgacggaggaagggaagcgtcatccatacaagatgaatttagcctctgaaccccaggaggtcctgcacataggaagcgcccacaaccgaagtgccatgccctttaccgcctcgcctgcctccagcactactgccagggtcatcacaaaccagtacaacaacccagctggcctctactcttctgaaaatatctccaacttcaacaatgccctggagtcaaagactgctgccagcggggtggaggcgaacagcagacccttagaccatgctcagcctccaagcagccttgtcatcgacaaagaatctgaagtttacaagatgcttcaggagaaacaggagttgaatgagcccccgaaacagtccacgtctttcttggttttgcaggaaatcctggagtctgaagaaaaaggggatcccaacaagccctcaggattcagaagtgttaaagctcctgtcactaaagtggctgcgtcgattggaaatgctcagaagttgcctatgtgtgacaaatgtggcactgggattgttggtgtgtttgtgaagctgcgggaccgtcaccgccaccctgagtgttatgtgtgcactgactgtggcaccaacctgaaacagaagggccatttctttgtggaggatcaaatctactgtgagaagcatgcccgggagcgagtcacaccacctgagggttatgaagtggtcactgtgttccccaagtgagccagcagatctgaccactgttctccagcaggcctctgctgcagctttttctctcagtgttctggccctctcctctcttgaaagttctctgcttactttggttttccctctgcttgtaaaacattgagtcccctccctgccttggttaattgactcacaccagctgtgcgatgcccgcttttacaattaaaggaaaactgttgtgttcagtgtcaccttgtcagcaacactgtgtcccttcgccccgccgttcttctctgctgcatttggacatcagccaaatttgaacccaatcaaatataacgtgtctgacactgattttgtttttactcaataaatgtatagactacaaaanacaaaanaaaaaancncnggagancnatancggggnggacaaaa

SEQ ID NO: 349446 - DNA, 1352 bp, Homo sapiens
cccgccctggccctcgcggttgccctgcccccgccagccccaggctccccgggcccgcgccgcgccgctctttctccgacagccgccgggggtgccctgcaagctgttccgcgcgtcctgcccgtctgtccccgcgggtcgtcgcccgccacagccgcgccatgaccacccagcagatagacctccagggcccggggccgtggggcttccgcctcgtgggcggcaaggacttcgagcagcctctcgccatttcccggatctgaacataaagtctggtctcctctggtgacggaggaagggaagcgtcatccatacaagatgaatttagcctctgaaccccaggaggtcctgcacataggaagcgcccacaaccgaagtgccatgccctttaccgcctcgcctgcctccagcactactgccagggtcatcacaaaccagtacaacaacccagctggcctctactcttctgaaaatatctccaacttcaacaatgccctggagtcaaagactgctgccagcggggtggaggcgaacagcagacccttagaccatgctcagcctccaagcagccttgtcatcgacaaagaatctgaagtttacaagatgcttcaggagaaacaggagttgaatgagcccccgaaacagtccacgtctttcttggttttgcaggaaatcctggagtctgaagaaaaaggggatcccaacaagccctcaggattcagaagtgttaaagctcctgtcactaaagtggctgcgtcgattggaaatgctcagaagttgcctatgtgtgacaaatgtggcactgggattgttggtgtgtttgtgaagctgcgggaccgtcaccgccaccctgagtgttatgtgtgcactgactgtggcaccaacctgaaacagaagggccatttctttgtggaggatcaaatctactgtgagaagcatgcccgggagcgagtcacaccacctgagggttatgaagtggtcactgtgttccccaagtgagccagcagatctgaccactgttctccagcaggcctctgctgcagctttttctctcagtgttctggccctctcctctcttgaaagttctctgcttactttggttttccctctgcttgtaaaacattgagtcccctccctgccttggttaattgactcacaccagctgtgcgatgcccgcttttacaattaaaggaaaactgttgtgttcagtgtcaccttgtcagcaacactgtgtcccttcgccccgccgttcttctctgctgcatttggacatcagccaaatttgaacccaatcaaatataacgtgtctgacactgattttgtttttactcaataaatgtatagactacaaa

SEQ ID NO: 349447 - DNA, 1625 bp, Homo sapiens
  misc_feature (375)..(375): n is a, c, g, or t
  misc_feature (382)..(382): n is a, c, g, or t
  misc_feature (384)..(384): n is a, c, g, or t
cccgccctggccctcgcggttgccctgcccccgccagccccaggctccccgggcccgcgccgcgccgctctttctccgacagccgccgggggtgccctgcaagctgttccgcgcgtcctgcccgtctgtccccgcgggtcgtcgcccgccacagccgcgccatgaccacccagcagatagacctccagggcccggggccgtggggcttccgcctcgtgggcggcaaggacttcgagcagcctctcgccatttcccggtcactcctggaagcaaggcggtgtctatgtcataatattagtggtatgtggatgattagtacatcagcaagtccacttgcatgtggtcgagagactatcgtagacacagtaatgtacnagctatntntgcgtagagacatcagccaacgagagatctaaaatgggcgtagcgacctacgtagcgaaacctcttggaacatcatacatcatgctgatgaccaggaactcttgaataccaatagacacgctcctgggctgctcgctgcgtgaggtgcactggcatggggaaagggcaacgcgttctatttccagtgagcaacgtatgcatattctataccctcgtgaagccgccatgagcgaggtcctgcacataggaagcgcccacaaccgaagtgccatgccctttaccgcctcgcctgcctccagcactactgccagggtcatcacaaaccagtacaacaacccagctggcctctactcttctgaaaatatctccaacttcaacaatgccctggagtcaaagactgctgccagcggggtggaggcgaacagcagacccttagaccatgctcagcctccaagcagccttgtcatcgacaaagaatctgaagtttacaagatgcttcaggagaaacaggagttgaatgagcccccgaaacagtccacgtctttcttggttttgcaggaaatcctggagtctgaagaaaaaggggatcccaacaagccctcaggattcagaagtgttaaagctcctgtcactaaagtggctgcgtcgattggaaatgctcagaagttgcctatgtgtgacaaatgtggcactgggattgttggtgtgtttgtgaagctgcgggaccgtcaccgccaccctgagtgttatgtgtgcactgactgtggcaccaacctgaaacagaagggccatttctttgtggaggatcaaatctactgtgagaagcatgcccgggagcgagtcacaccacctgagggttatgaagtggtcactgtgttccccaagtgagccagcagatctgaccactgttctccagcaggcctctgctgcagctttttctctcagtgttctggccctctcctctcttgaaagttctctgcttactttggttttccctctgcttgtaaaacattgagtcccctccctgccttggttaattgactcacaccagctgtgcgatgcccgcttttacaattaaaggaaaactgttgtgttcagtgtcaccttgtcagcaacactgtgtcccttcgccccgccgttcttctctgctgcatttggacatcagccaaatttgaacccaatcaaatataacgtgtctgacactgattttgtttttactcaataaatgtatagactacaaa

SEQ ID NO: 349448 - DNA, 1072 bp, Homo sapiens
tgaggattcacgtagcatttcagcagcgacatgactacccagcagatagacctccaggccaggaggtcctgcacataggaagcgcccacaaccgaagtgccatgccctttaccgcctcgcctgcctccagcactactgccagggtcatcacaaaccagtacaacaacccagctggcctctactcttctgaaaatatctccaacttcaacaatgccctggagtcaaagactgctgccagcggggtggaggcgaacagcagacccttagaccatgctcagcctccaagcagccttgtcatcgacaaagaatctgaagtttacaagatgcttcaggagaaacaggagttgaatgagcccccgaaacagtccacgtctttcttggttttgcaggaaatcctggagtctgaagaaaaaggggatcccaacaagccctcaggattcagaagtgttaaagctcctgtcactaaagtggctgcgtcgattggaaatgctcagaagttgcctatgtgtgacaaatgtggcactgggattgttggtgtgtttgtgaagctgcgggaccgtcaccgccaccctgagtgttatgtgtgcactgactgtggcaccaacctgaaacagaagggccatttctttgtggaggatcaaatctactgtgagaagcatgcccgggagcgagtcacaccacctgagggttatgaagtggtcactgtgttccccaagtgagccagcagatctgaccactgttctccagcaggcctctgctgcagctttttctctcagtgttctggccctctcctctcttgaaagttctctgcttactttggttttccctctgcttgtaaaacattgagtcccctccctgccttggttaattgactcacaccagctgtgcgatgcccgcttttacaattaaaggaaaactgttgtgttcagtgtcaccttgtcagcaacactgtgtcccttcgccccgccgttcttctctgctgcatttggacatcagccaaatttgaacccaatcaaatataacgtgtctgacactgattttgtttttactcaataaatgtatagactacaaa

SEQ ID NO: 349449 - DNA, 1469 bp, Homo sapiens
cccgccctggccctcgcggttgccctgcccccgccagccccaggctccccgggcccgcgccgcgccgctctttctccgacagccgccgggggtgccctgcaagctgttccgcgcgtcctgcccgtctgtccccgcgggtcgtcgcccgccacagccgcgccatgaccacccagcagatagacctccagggcccggggccgtggggcttccgcctcgtgggcggcaaggacttcgagcagcctctcgccatttcccgggtcactcctggaagcaaggcggctctagctaatttatgtattggagatgtaatcacagccattgatggggaaaatactagcaatatgacacacttggaagctcagaacagaatcaaaggctgcacagacaacttgactctcactgtagccagatctgaacataaagtctggtctcctctggtgacggaggaagggaagcgtcatccatacaagatgaatttagcctctgaaccccaggaggtcctgcacataggaagcgcccacaaccgaagtgccatgccctttaccgcctcgcctgcctccagcactactgccagggtcatcacaaaccagtacaacaacccagctggcctctactcttctgaaaatatctccaacttcaacaatgccctggagtcaaagactgctgccagcggggtggaggcgaacagcagacccttagaccatgctcagcctccaagcagccttgtcatcgacaaagaatctgaagtttacaagatgcttcaggagaaacaggagttgaatgagcccccgaaacagtccacgtctttcttggttttgcaggaaatcctggagtctgaagaaaaaggggatcccaacaagccctcaggattcagaagtgttaaagctcctgtcactaaagtggctgcgtcgattggaaatgctcagaagttgcctatgtgtgacaaatgtggcactgggattgttggtgtgtttgtgaagctgcgggaccgtcaccgccaccctgaaacagaagggccatttctttgtggaggatcaaatctactgtgagaagcatgcccgggagcgagtcacaccacctgagggttatgaagtggtcactgtgttccccaagtgagccagcagatctgaccactgttctccagcaggcctctgctgcagctttttctctcagtgttctggccctctcctctcttgaaagttctctgcttactttggttttccctctgcttgtaaaacattgagtcccctccctgccttggttaattgactcacaccagctgtgcgatgcccgcttttacaattaaaggaaaactgttgtgttcagtgtcaccttgtcagcaacactgtgtcccttcgccccgccgttcttctctgctgcatttggacatcagccaaatttgaacccaatcaaatataacgtgtctgacactgattttgtttttactcaataaatgtatagactacaaa

SEQ ID NO: 349450 - DNA, 1152 bp, Homo sapiens
cccgccctggccctcgcggttgccctgcccccgccagccccaggctccccgggcccgcgccgcgccgctctttctccgacagccgccgggggtgccctgcaagctgttccgcgcgtcctgcccgtctgtccccgcgggtcgtcgcccgccacagccgcgccatgaccacccagcagatagacctccagggcccggggccgtggggcttccgcctcgtgggcggcaaggacttcgagcagcctctcgccatttcccgggtcactcctggaagcaaggcggctctagctaatttatgtattggagatgtaatcacagccattgatggggaaaatactagcaatatgacacacttggaagctcagaacagaatcaaaggctgcacagacaacttgactctcactgtagccagatctgaacataaagtctggtctcctctggtgacggaggaagggaagcgtcatccatacaagatgaatttagcctctgaaccccaggggatcccaacaagccctcaggattcagaagtgttaaagctcctgtcactaaagtggctgcgtcgattggaaatgctcagaagttgcctatgtgtgacaaatgtggcactgggattgttggtgtgtttgtgaagctgcgggaccgtcaccgccaccctgagtgttatgtgtgcactgactgtggcaccaacctgaaacagaagggccatttctttgtggaggatcaaatctactgtgagaagcatgcccgggagcgagtcacaccacctgagggttatgaagtggtcactgtgttccccaagtgagccagcagatctgaccactgttctccagcaggcctctgctgcagctttttctctcagtgttctggccctctcctctcttgaaagttctctgcttactttggttttccctctgcttgtaaaacattgagtcccctccctgccttggttaattgactcacaccagctgtgcgatgcccgcttttacaattaaaggaaaactgttgtgttcagtgtcaccttgtcagcaacactgtgtcccttcgccccgccgttcttctctgctgcatttggacatcagccaaatttgaacccaatcaaatataacgtgtctgacactgattttgtttttactcaataaatgtatagactacaaa

SEQ ID NO: 349451 - DNA, 822 bp, Homo sapiens
tggggaccagagaggttaagttacttgcccaggatcacagagcagagtcactccagttcccatggccttgcttgaacatatatttatgagtggttctgaagagctgagtgatacttatgcaattctgcccttcctggccaatgacagtgttttcctcatttcaggggatcccaacaagccctcaggattcagaagtgttaaagctcctgtcactaaagtggctgcgtcgattggaaatgctcagaagttgcctatgtgtgacaaatgtggcactgggattgttggtgtgtttgtgaagctgcgggaccgtcaccgccaccctgagtgttatgtgtgcactgactgtggcaccaacctgaaacagaagggccatttctttgtggaggatcaaatctactgtgagaagcatgcccgggagcgagtcacaccacctgagggttatgaagtggtcactgtgttccccaagtgagccagcagatctgaccactgttctccagcaggcctctgctgcagctttttctctcagtgttctggccctctcctctcttgaaagttctctgcttactttggttttccctctgcttgtaaaacattgagtcccctccctgccttggttaattgactcacaccagctgtgcgatgcccgcttttacaattaaaggaaaactgttgtgttcagtgtcaccttgtcagcaacactgtgtcccttcgccccgccgttcttctctgctgcatttggacatcagccaaatttgaacccaatcaaatataacgtgtctgacactgattttgtttttactcaataaatgtatagactacaaa

SEQ ID NO: 349452 - DNA, 724 bp, Homo sapiens
aggcagtgatcgagctcggtacaggtgttgttggttttgcaggaaatcctggagttcaagaaaaaggggatcccaacaagccctcaggattcagaagtgttaaagctcctgtcactaaagtggctgcgtcgattggaaatgctcagaagttgcctatgtgtgacaaatgtggcactgggattgttggtgtgtttgtgaagctgcgggaccgtcaccgccaccctgagtgttatgtgtgcactgactgtggcaccaacctgaaacagaagggccatttctttgtggaggatcaaatctactgtgagaagcatgcccgggagcgagtcacaccacctgagggttatgaagtggtcactgtgttccccaagtgagccagcagatctgaccactgttctccagcaggcctctgctgcagctttttctctcagtgttctggccctctcctctcttgaaagttctctgcttactttggttttccctctgcttgtaaaacattgagtcccctccctgccttggttaattgactcacaccagctgtgcgatgcccgcttttacaattaaaggaaaactgttgtgttcagtgtcaccttgtcagcaacactgtgtcccttcgccccgccgttcttctctgctgcatttggacatcagccaaatttgaacccaatcaaatataacgtgtctgacactgattttgtttttactcaataaatgtatagactacaaa

SEQ ID NO: 349453 - DNA, 887 bp, Homo sapiens
tcctggaaaaatgcaacagagaggccagaaaggtcctgtgtcccagagccaggttgtgaaggttttccttcactgcggagcccttaggttatgaacatgtaaaatgagaaaaatcagggctgccctgttgaagtaggaggggtttttggaaaaatgtctctggaccctgggaaggagaagcaagtcccttatgattggaggccagttgggaggccctggtttcccctgtgatgggttcctggggagaagccccaggcccctgctcaggaaggatggtgccacctgctcaggtgccacctgcaggtgcttgtcactgatggagtcccttccctcccttgcttctgtagtggtgtgtttgtgaagctgcgggaccgtcaccgccaccctgagtgttatgtgtgcactgactgtggcaccaacctgaaacagaagggccatttctttgtggaggatcaaatctactgtgagaagcatgcccgggagcgagtcacaccacctgagggttatgaagtggtcactgtgttccccaagtgagccagcagatctgaccactgttctccagcaggcctctgctgcagctttttctctcagtgttctggccctctcctctcttgaaagttctctgcttactttggttttccctctgcttgtaaaacattgagtcccctccctgccttggttaattgactcacaccagctgtgcgatgcccgcttttacaattaaaggaaaactgttgtgttcagtgtcaccttgtcagcaacactgtgtcccttcgccccgccgttcttctctgctgcatttggacatcagccaaatttgaacccaatcaaatataacgtgtctgacactgattttgtttttactcaataaatgtatagactacaaa

SEQ ID NO: 349454 - DNA, 981 bp, Homo sapiens
cccgccctggccctcgcggttgccctgcccccgccagccccaggctccccgggcccgcgccgcgccgctctttctccgacagccgccgggggtgccctgcaagctgttccgcgcgtcctgcccgtctgtccccgcgggtcgtcgcccgccacagccgcgccatgaccacccagcagatagacctccagggcccggggccgtggggcttccgcctcgtgggcggcaaggacttcgagcagcctctcgccatttcccgggtcactcctggaagcaaggcggctctagctaatttatgtattggagatgtaatcacagccattgatggggaaaatactagcaatatgacacacttggaagctcagaacagaatcaaaggctgcacagacaacttgactctcactgtagccagatctgaacataaagtctggtctcctctggtgacggaggaagggaagcgtcatccatacaagatgaatttagcctctgaaccccaggaggtcctgcacataggaagcgcccacaaccgaagtgccatgccctttaccgcctcgcctgcctccagcactactgccagggtcatcacaaaccagtacaacaacccagctggcctctactcttctgaaaatatctccaacttcaacaatgccctggagtcaaagactgctgccagcggggtggaggcgaacagcagacccttagaccatgctcagcctccaagcagccttgtcatcgacaaagaatctgaagtttacaagatgcttcaggagaaacaggagttgaatgagcccccgaaacagtccacgtctttcttggttttgcaggaaatcctggagtctgaagaaaaaggggatcccaacaagccctcaggattcagaagtgttaaagctcctgtcactaaagtggctgcgtcgattggaaatgctcagaagttgcctatgtgtgacaaatgtggcactgggattgtgtgagtatctgcttccc

SEQ ID NO: 349455 - DNA, 1604 bp, Homo sapiens
tggggaccagagaggttaagttacttgcccaggatcacagagcagagtcactccagttcccatggccttgcttgaacatatatttatgagtggttctgaagagctgagtgatacttatgcaattctgcccttcctggccaatgacagtgttttcctcatttcaggggatcccaacaagccctcaggattcagaagtgttaaagctcctgtcactaaagtggctgcgtcgattggaaatgctcagaagttgcctatgtgtgacaaatgtggcactgggattgttggtgtgtttgtgaagctgcgggaccgtcaccgccaccctgagtgttatgtgtgcactgactgtggcaccaacctgaaacagaagggccatttctttgtggaggatcaaatctactgtgagaagcatgcccgggagcgagtcacaccacctgagggttatgaagtggtcactgtgttccccaagtgagccagcagatctgaccactgttctccagcaggcctctgctgcagctttttctctcagtgttctggccctctcctctcttgaaagttctctgcttactttggttttccctctgcttgtaaaacattgagtcccctccctgccttggttaattgactcacaccagctgtgcgatgcccgcttttacaattaaaggaaaactgttgtgttcagtgtcaccttgtcagcaacactgtgtcccttcgccccgccgttcttctctgctgcatttggacatcagccaaatttgaacccaatcaaatataacgtgtctgacactgattttgtttttactcaataaatgtatagactacaaaaaaaaaaaaaaaaaaaaaaaaaaaaaaaaaaaaaaaaaaaaaaaaaaaaaaaaaaaaaaaaaaaaaaaaaaaaaaaaaaaaaaaaaaaaaaaaaaaacaaaacaaccaaaaaaaaagggggcgggcggcgcaaccaccaggggccaaccaccccccggaaaacagcacccaccaccaaaacaagacgagcacctaaaacagcaaccaagacacccccgcagccgcacagtcacacaacacaaccaggcgaagacagcaacaaaagagcatgcccgcaaagcaacactagcaagaggcagaaagccaacccaccacggcggcggcggagacacaatcgccgccaacagctccacaacccgaacgaaagtaataacccgacccgacgacgagacaaacataacacacgacacagacaacaagcgaacgcacaacaaccaacaccacgtcacgacgagcaggccaacgagacaaccacaggacgacgagcaagaacccctaaagcacctgccaaccaaccccgacgcacagatccaaaagaaagagacatcaacaaacagaccagagacgagagaagagaaagcagaagaaaagcagacagagcacagcacgaaaagcggagaacggccaagaggaagcagaagagcaaggaaaaaaacacggaaaaggacaaacaaaaccagacgacgaagaccacagccgagaaacagccgaagagaagcgagacagacacgcggacaagcaaagaacaaaacaagaagaaggaaagaagcgcaggacgagag

SEQ ID NO: 349456 - DNA, 1617 bp, Homo sapiens
agctgctgaaaactgcatcagatactgaggtttaggacccaacttgtgtgtcctggtttggtgccttgaagaacctgttacctgtggttcagccataaggagacacccaggtgttcataagatcttcctcaactggatcccgagagtcaagggccttctccaaagggtggccagagccctgtgggcactgggagcctgggggtgttactgccaccttgatcctgcggacttggaattcccatccaggaaggtcttgtaatgtggaaaaaaaaagttgtgaacttaccctgggatgatgacagtaatatttttagtataccttagtttagaaaatctaaccagataccttggttagagatagtactctgaggtcactcctggaagcaaggcggctctagctaatttatgtattggagatgtaatcacagccattgatggggaaaatactagcaatatgacacacttggaagctcagaacagaatcaaaggctgcacagacaacttgactctcactgtagccagatctgaacataaagtctggtctcctctggtgacggaggaagggaagcgtcatccatacaagatgaatttagcctctgaaccccaggaggtcctgcacataggaagcgcccacaaccgaagtgccatgccctttaccgcctcgcctgcctccagcactactgccagggtcatcacaaaccagtacaacaacccagctggcctctactcttctgaaaatatctccaacttcaacaatgccctggagtcaaagactgctgccagcggggtggaggcgaacagcagacccttagaccatgctcagcctccaagcagccttgtcatcgacaaagaatctgaagtttacaagatgcttcaggagaaacaggagttgaatgagcccccgaaacagtccacgtctttcttggttttgcaggaaatcctggagtctgaagaaaaaggggatcccaacaagccctcaggattcagaagtgttaaagctcctgtcactaaagtggctgcgtcgattggaaatgctcagaagttgcctatgtgtgacaaatgtggcactgggattgttggtgtgtttgtgaagctgcgggaccgtcaccgccaccctgagtgttatgtgtgcactgactgtggcaccaacctgaaacagaagggccatttctttgtggaggatcaaatctactgtgagaagcatgcccgggagcgagtcacaccacctgagggttatgaagtggtcactgtgttccccaagtgagccagcagatctgaccactgttctccagcaggcctctgctgcagctttttctctcagtgttctggccctctcctctcttgaaagttctctgcttactttggttttccctctgcttgtaaaacattgagtcccctccctgccttggttaattgactcacaccagctgtgcgatgcccgcttttacaattaaaggaaaactgttgtgttcagtgtcaccttgtcagcaacactgtgtcccttcgccccgccgttcttctctgctgcatttggacatcagccaaatttgaacccaatcaaatataacgtgtctgacactgattttgtttttactcaataaatgtatagactacaaa

SEQ ID NO: 349457 - DNA, 1615 bp, Homo sapiens
cccgccctggccctcgcggttgccctgcccccgccagccccaggctccccgggcccgcgccgcgccgctctttctccgacagccgccgggggtgccctgcaagctgttccgcgcgtcctgcccgtctgtccccgcgggtcgtcgcccgccacagccgcgccatgaccacccagcagatagacctccagggcccggggccgtggggcttccgcctcgtgggcggcaaggacttcgagcagcctctcgccatttcccgggtcactcctggaagcaaggcggctctagctaatttatgtattggagatgtaatcacagccattgatggggaaaatactagcaatatgacacacttggaagctcagaacagaatcaaaggctgcacagacaacttgactctcactgtagccagatctgaacataaagtctggtctcctctggtgacggaggaagggaagcgtcatccatacaagatgaatttagcctctgaaccccaggaggtcctgcacataggaagcgcccacaaccgaagtgccatgccctttaccgcctcgcctgcctccagcactactgccagggtcatcacaaaccagtacaacaacccagctggcctctactcttctgaaaatatctccaacttcaacaatgccctggagtcaaagactgctgccagcggggtggaggcgaacagcagacccttagaccatgctcagcctccaagcagccttgtcatcgacaaagaatctgaagtttacaagatgcttcaggagaaacaggagttgaatgagcccccgaaacagtccacgtctttcttggttttgcaggaaatcctggagtctgaagaaaaaggggatcccaacaagccctcaggattcagaagtgttaaagctcctgtcactaaagtggctgcgtcgattggaaatgctcagaagttgcctatgtgtgacaaatgtggcactgggattgttggtgtgtttgtgaagctgcgggaccgtcaccgccaccctgagtgttatgtgtgcactgactgtggcaccaacctgaaacagaagggccatttctttgtggaggatcaaatctactgtgagaagcatgcccgggagcgagtcacaccacctgagggttatgaagtggtcactgtgttccccaagtgagccagcagatctgaccactgttctccagcaggcctctgctgcagctttttctctcagtgttctggccctctcctctcttgaaagttctctgcttactttggttttccctctgcttgtaaaacattgagtcccctccctgccttggttaattgactcacaccagctgtgcgatgcccgcttttacaattaaaggaaaactgttgtgttcagtgtcaccttgtcagcaacactgtgtcccttcgccccgccgttcttctctgctgcatttggacatcagccaaatttgaacccaatcaaatataacgtgtctgacactgattttgtttttactcaataaatgtatagactacaaaaaaaaaatactccacaccctcacacctccagggggggcccagctcccaattttccctatagggagcctctttaactctcgcttactgccccccccctcgcgacaccccctg

SEQ ID NO: 349458 - DNA, 2286 bp, Homo sapiens
cccgccctggccctcgcggttgccctgcccccgccagccccaggctccccgggcccgcgccgcgccgctctttctccgacagccgccgggggtgccctgcaagctgttccgcgcgtcctgcccgtctgtccccgcgggtcgtcgcccgccacagccgcgccatgaccacccagcagatagacctccagggcccggggccgtggggcttccgcctcgtgggcggcaaggacttcgagcagcctctcgccatttcccgggtcactcctggaagcaaggcggctctagctaatttatgtattggagatgtaatcacagccattgatggggaaaatactagcaatatgacacacttggaagctcagaacagaatcaaaggctgcacagacaacttgactctcactgtagccagatctgaacataaagtctggtctcctctggtgacggaggaagggaagcgtcatccatacaagatgaatttagcctctgaaccccaggaggtcctgcacataggaagcgcccacaaccgaagtgccatgccctttaccgcctcgcctgcctccagcactactgccagggtcatcacaaaccagtacaacaacccagctggcctctactcttctgaaaatatctccaacttcaacaatgccctggagtcaaagactgctgccagcggggtggaggcgaacagcagacccttagaccatgctcagcctccaagcagccttgtcatcgacaaagaatctgaagtttacaagatgcttcaggagaaacaggagttgaatgagcccccgaaacagtccacgtctttcttggttttgcaggaaatcctggagtctgaagaaaaaggggatcccaacaagccctcaggattcagaagtgttaaagctcctgtcactaaagtggctgcgtcgattggaaatgctcagaagttgcctatgtgtgacaaatgtggcactgggattgttggtgtgtttgtgaagctgcgggaccgtcaccgccaccctgagtgttatgtgtgcactgactgtggcaccaacctgaaacagaagggccatttctttgtggaggatcaaatctactgtgagaagcatgcccgggagcgagtcacaccacctgagggttatgaagtggtcactgtgttccccaagtgagccagcagatctgaccactgttctccagcaggcctctgctgcagctttttctctcagtgttctggccctctcctctcttgaaagttctctgcttactttggttttccctctgcttgtaaaacattgagtcccctccctgccttggttaattgactcacaccagctgtgcgatgcccgcttttacaattaaaggaaaactgttgtgttcagtgtcaccttgtcagcaacactgtgtcccttcgccccgccgttcttctctgctgcatttggacatcagccaaatttgaacccaatcaaatataacgtgtctgacactgattttgtttttactcaataaatgtatagactacaaaaaaaaaaaaaaaaaaaaaaaaaaaaaaaaaaaaaaaaaaaaaaaaaaaaaaaaaaaaaaaaaaaaaaaaaaaaaaaaaaaaaaaaaaaaaaaaaaaacaaaacaaccaaaaaaaaagggggcgggcggcgcaaccaccaggggccaaccaccccccggaaaacagcacccaccaccaaaacaagacgagcacctaaaacagcaaccaagacacccccgcagccgcacagtcacacaacacaaccaggcgaagacagcaacaaaagagcatgcccgcaaagcaacactagcaagaggcagaaagccaacccaccacggcggcggcggagacacaatcgccgccaacagctccacaacccgaacgaaagtaataacccgacccgacgacgagacaaacataacacacgacacagacaacaagcgaacgcacaacaaccaacaccacgtcacgacgagcaggccaacgagacaaccacaggacgacgagcaagaacccctaaagcacctgccaaccaaccccgacgcacagatccaaaagaaagagacatcaacaaacagaccagagacgagagaagagaaagcagaagaaaagcagacagagcacagcacgaaaagcggagaacggccaagaggaagcagaagagcaaggaaaaaaacacggaaaaggacaaacaaaaccagacgacgaagaccacagccgagaaacagccgaagagaagcgagacagacacgcggacaagcaaagaacaaaacaagaagaaggaaagaagcgcaggacgagag

SEQ ID NO: 349459 - DNA, 1267 bp, Homo sapiens
cccgccctggccctcgcggttgccctgcccccgccagccccaggctccccgggcccgcgccgcgccgctctttctccgacagccgccgggggtgccctgcaagctgttccgcgcgtcctgcccgtctgtccccgcgggtcgtcgcccgccacagccgcgccatgaccacccagcagatagacctccagggcccggggccgtggggcttccgcctcgtgggcggcaaggacttcgagcagcctctcgccatttcccgggaggtcctgcacataggaagcgcccacaaccgaagtgccatgccctttaccgcctcgcctgcctccagcactactgccagggtcatcacaaaccagtacaacaacccagctggcctctactcttctgaaaatatctccaacttcaacaatgccctggagtcaaagactgctgccagcggggtggaggcgaacagcagacccttagaccatgctcagcctccaagcagccttgtcatcgacaaagaatctgaagtttacaagatgcttcaggagaaacaggagttgaatgagcccccgaaacagtccacgtctttcttggttttgcaggaaatcctggagtctgaagaaaaaggggatcccaacaagccctcaggattcagaagtgttaaagctcctgtcactaaagtggctgcgtcgattggaaatgctcagaagttgcctatgtgtgacaaatgtggcactgggattgttggtgtgtttgtgaagctgcgggaccgtcaccgccaccctgagtgttatgtgtgcactgactgtggcaccaacctgaaacagaagggccatttctttgtggaggatcaaatctactgtgagaagcatgcccgggagcgagtcacaccacctgagggttatgaagtggtcactgtgttccccaagtgagccagcagatctgaccactgttctccagcaggcctctgctgcagctttttctctcagtgttctggccctctcctctcttgaaagttctctgcttactttggttttccctctgcttgtaaaacattgagtcccctccctgccttggttaattgactcacaccagctgtgcgatgcccgcttttacaattaaaggaaaactgttgtgttcagtgtcaccttgtcagcaacactgtgtcccttcgccccgccgttcttctctgctgcatttggacatcagccaaatttgaacccaatcaaatataacgtgtctgacactgattttgtttttactcaataaatgtatagactacaaa

SEQ ID NO: 349460 - DNA, 1457 bp, Homo sapiens
cccgccctggccctcgcggttgccctgcccccgccagccccaggctccccgggcccgcgccgcgccgctctttctccgacagccgccgggggtgccctgcaagctgttccgcgcgtcctgcccgtctgtccccgcgggtcgtcgcccgccacagccgcgccatgaccacccagcagatagacctccagggcccggggccgtggggcttccgcctcgtgggcggcaaggacttcgagcagcctctcgccatttcccgggtcactcctggaagcaaggcggctctagctaatttatgtattggagatgtaatcacagccattgatggggaaaatactagcaatatgacacacttggaagctcagaacagaatcaaaggctgcacagacaacttgactctcactgtagccagatctgaacataaagtctggtctcctctggtgacggaggaagggaagcgtcatccatacaagatgaatttagcctctgaaccccaggaggtcctgcacataggaagcgcccacaaccgaagtgccatgccctttaccgcctcgcctgcctccagcactactgccagggtcatcacaaaccagtacaacaacccagctggcctctactcttctgaaaatatctccaacttcaacaatgcccttagaccatgctcagcctccaagcagccttgtcatcgacaaagaatctgaagtttacaagatgcttcaggagaaacaggagttgaatgagcccccgaaacagtccacgtctttcttggttttgcaggaaatcctggagtctgaagaaaaaggggatcccaacaagccctcaggattcagaagtgttaaagctcctgtcactaaagtggctgcgtcgattggaaatgctcagaagttgcctatgtgtgacaaatgtggcactgggattgttggtgtgtttgtgaagctgcgggaccgtcaccgccaccctgagtgttatgtgtgcactgactgtggcaccaacctgaaacagaagggccatttctttgtggaggatcaaatctactgtgagaagcatgcccgggagcgagtcacaccacctgagggttatgaagtggtcactgtgttccccaagtgagccagcagatctgaccactgttctccagcaggcctctgctgcagctttttctctcagtgttctggccctctcctctcttgaaagttctctgcttactttggttttccctctgcttgtaaaacattgagtcccctccctgccttggttaattgactcacaccagctgtgcgatgcccgcttttacaattaaaggaaaactgttgtgttcagtgtcaccttgtcagcaacactgtgtcccttcgccccgccgttcttctctgctgcatttggacatcagccaaatttgaacccaatcaaatataacgtgtctgacactgattttgtttttactcaataaatgtatagactacaaa

SEQ ID NO: 349461 - DNA, 1500 bp, Homo sapiens
  misc_feature (392)..(392): n is a, c, g, or t
  misc_feature (480)..(480): n is a, c, g, or t
  misc_feature (657)..(657): n is a, c, g, or t
ttaggcgcgttctgcgtcgagcagcctctcgccatttcccgggtcagtcctggatacgcaaggcggctctagctaatttatagtattggcaggactgtacatcgagcgaggccgattgagtgcgggcacacagatacataggctaactagtgagcagcactctgggaagcgtcaggaacagaatcatcaggctgcgacgagatctgacctgggacgtctctactgtagtgcatgatctgaacatagaatgtcgtggtctacctcgtggttgacggatgaagggaagcggtcatccattacgatagcatgaacttatgagacgcggtctgcagagcacgctcaagcgaaggagtctcttcgactaccatacgaggaaggcagccgcatcgaancgctgacagggtggtcgcttattgggccccttttctgatcgccgggccttttcgaccctaggccgtgcgcaagtcgactaatcgtagngccaagggaggtgctactccaacgataatcgccagttacaatacaaagctcgcgagtcctggggcgcatgcatacgttctatgcctggagaaatagtcaatctgcccggacactttacaaacgagagtgacgccgctggaaagatccacataggacgtgcgtgaccgaggtcgtggntggaaggtcggaacaggcgaggacccgttgagtcttagaccatgctcagcctccaagcagccttgtcatcgacaaagaatctgaagtttacaagatgcttcaggagaaacaggagttgaatgagcccccgaaacagtccacgtctttcttggttttgcaggaaatcctggagtctgaagaaaaaggggatcccaacaagccctcaggattcagaagtgttaaagctcctgtcactaaagtggctgcgtcgattggaaatgctcagaagttgcctatgtgtgacaaatgtggcactgggattgttggtgtgtttgtgaagctgcgggaccgtcaccgccaccctgagtgttatgtgtgcactgactgtggcaccaacctgaaacagaagggccatttctttgtggaggatcaaatctactgtgagaagcatgcccgggagcgagtcacaccacctgagggttatgaagtggtcactgtgttccccaagtgagccagcagatctgaccactgttctccagcaggcctctgctgcagctttttctctcagtgttctggccctctcctctcttgaaagttctctgcttactttggttttccctctgcttgtaaaacattgagtcccctccctgccttggttaattgactcacaccagctgtgcgatgcccgcttttacaattaaaggaaaactgttgtgttcagtgtcaccttgtcagcaacactgtgtcccttcgccccgccgttcttctctgctgcatttggacatcagccaaatttgaacccaatcaaatataacgtgtctgacactgattttgtttttactcaataaatgtatagactacaaa

SEQ ID NO: 349462 - DNA, 1431 bp, Homo sapiens
cccgccctggccctcgcggttgccctgcccccgccagccccaggctccccgggcccgcgccgcgccgctctttctccgacagccgccgggggtgccctgcaagctgttccgcgcgtcctgcccgtctgtccccgcgggtcgtcgcccgccacagccgcgccatgaccacccagcagatagacctccagggcccggggccgtggggcttccgcctcgtgggcggcaaggacttcgagcagcctctcgccatttcccgggtcactcctggaagcaaggcggctctagctaatttatgtattggagatgtaatcacagccattgatggggaaaatactagcaatatgacacacttggaagctcagaacagaatcaaaggctgcacagacaacttgactctcactgtagccagatctgaacataaagtctggtctcctctggtgacggaggaagggaagcgtcatccatacaagatgaatttagcctctgaaccccaggaggtcctgcacataggaagcgcccacaaccgaagtgccatgccctttaccgcctcgcctgcctccagcactactgccagggtcatcacaaaccagtacaacaacccagctggcctctactcttctgaaaatatctccaacttcaacaatgccctggagtcaaagactgctgccagcggggtggaggcgaacagcagacccttagaccatgctcagcctccaagcagccttgtcatcgacaaagaatctgaagtttacaagatgcttcaggagaaacaggagttgaatgagcccccgaaacagtccacgtctttcttggttttgcaggaaatcctggagtctgaagaaaaaggggatcccaacaagccctcaggattcagaagtgttaaagctcctgtcactaaagtggctgcgtcgattggaaatgctcagaagttgcctatgtgtgacaaatgtggcactgggattgttggtgtgtttgtgaagctgcgggaccgtcaccgccaccctgagtgttatgtgtgcactgactgtggcaccaacctgaaacagaagggccatttctttgtggaggatcaaatctactgtgagaagcatgcccgggagcgagtcacaccacctgagggttatgaagtggtcactgtgttccccctctcctctcttgaaagttctctgcttactttggttttccctctgcttgtaaaacattgagtcccctccctgccttggttaattgactcacaccagctgtgcgatgcccgcttttacaattaaaggaaaactgttgtgttcagtgtcaccttgtcagcaacactgtgtcccttcgccccgccgttcttctctgctgcatttggacatcagccaaatttgaacccaatcaaatataacgtgtctgacactgattttgtttttactcaataaatgtatagactacaaa

SEQ ID NO: 349463 - DNA, 1070 bp, Homo sapiens
cccgccctggccctcgcggttgccctgcccccgccagccccaggctccccgggcccgcgccgcgccgctctttctccgacagccgccgggggtgccctgcaagctgttccgcgcgtcctgcccgtctgtccccgcgggtcgtcgcccgccacagccgcgccatgaccacccagcagatagacctccagggcccggggccgtggggcttccgcctcgtgggcggcaaggacttcgagcagcctctcgccatttcccgggtcactcctggaagcaaggcggctctagctaatttatgtattggagatgtaatcacagccattgatggggaaaatactagcaatatgacacacttggaagctcagaacagaatcaaaggctgcacagacaacttgactctcactgtagccagatctgaacataaagtctggtctcctctggtgacggaggaagggaagcgtcatccatacaagatgaatttagcctctgaaccccaggaggtcctgcacataggaagcgcccacaaccgaagtgccatgccctttaccgcctcgcctgcctccagcactactgccagggtcatcacaaaccagtacaacaacccagctggcctctactcttctgaaaatatctccaacttcaacaatgccctggagtcaaagactgctgccagcggggtggaggcgaacagcagacccttagaccatgctcagcctccaagcagccttgtcatcgacaaagaatctgaagtttacaagatgcttcaggagaaacaggagttgaatgagcccccgaaacagtccacgtctttcttggttttgcaggaaatcctggagtctgaagaaaaaggggatcccaacaagccctcaggattcagaagtgttaaagctcctgtcactaaagtggctgcgtcgattggaaatgctcagaagttgccttgtcagcaacactgtgtcccttcgccccgccgttcttctctgctgcatttggacatcagccaaatttgaacccaatcaaatataacgtgtctgacactgattttgtttttactcaataaatgtatagactacaaa

SEQ ID NO: 349464 - DNA, 870 bp, Homo sapiens
cccgccctggccctcgcggttgccctgcccccgccagccccaggctccccgggcccgcgccgcgccgctctttctccgacagccgccgggggtgccctgcaagctgttccgcgcgtcctgcccgtctgtccccgcgggtcgtcgcccgccacagccgcgccatgaccacccagcagatagacctccagggcccggggccgtggggcttccgcctcgtgggcggcaaggacttcgagcagcctctcgccatttcccgggtcactcctggaagcaaggcggctctagctaatttatgtattggagatgtaatcacagccattgatggggaaaatactagcaatatgacacacttggaagctcagaacagaatcaaaggctgcacagacaacttgactctcactgtagccagatctgaacataaagtctggtctcctctggtgacggaggaagggaagcgtcatccatacaagatgaatttagcctctgaaccccaggaggtcctgcacataggaagcgcccacaaccgaagtgccatgccctttaccgcctcgcctgcctccagcactactgccagggtcatcacaaaccagtacaacaacccagctggcctctactcttctgaaaatatctccaacttcaacaatgccctggagtcaaagactgctgccagcggggtggaggcgaacagcagacccttagaccatgctcagcctccaagcagccttgtcatcgacaaagaatctgaagtttacaagatgcttcaggagaaacaggagttgaatgagcccccgaaacagtccacgtctttcttggttttgcaggaaatcctggagtctgaagaaaaagaggtaatcagctccatctgcagtc

SEQ ID NO: 349465 - DNA, 479 bp, Homo sapiens
tcatcatcatcatcttcaatgacaacaacatcattatcactggaaaacactgtgccaatgcagtggcattggtaccaaggtaaaatacaaggaatttaaggacaaaaaaagaagacagaaacataaaaatattaatacagaaggaaataaatagtataagagagttacagagaatgctgtgaatgttttgggtgggaaaagattgtttcatgaatccagaaaggattaagtagaacttggtgaaggaagttgaactggggaaatgcaagagatagacagtctaagaacactgaatagtttagtcaaatagggaaagctcatgagttagattaactgaatggtgagtaaggaaatagtggggaaaactccttacctaatttcagctaatagagggccttcgatgctaaatgaaggaatctgcactttgttctattgacagtaatgaaagttagttatttgagatggagtctcgctcagcc

SEQ ID NO: 349466 - DNA, 733 bp, Homo sapiens
aggctggctgcggcctgggcgaggacagcgtcaccggcctgggactgtggggagggctgaccctgtgtttatcttccagggcccgccgggctgtggtctgttgctttttcgtttgggggcagaggcttcgtgccagaaaggggaacgtgtcctgcttacccagtacctggggcactccagccccaaatgcctcccccctactcttcatctcgtctgtacccaggtgagtggcacacaacaccgccccgccccacctctgctctgtctcagatggtcactagaggctgctgcttaccagcggctctgctgggcccagacaaccacccagcaaaccaaactcaaccctggatgaatctgtggcccaaacacgcagtggatcccacagtcggtgctaacaggcaggtggggaagctctcccagggcctccccttagtagagcttcgaggtgcagccaggggtggagcaggggaggaggggcctcggggtggggcttccgtgcagagctggagagtttctgctgtgcaggaggcgggggctctgaggaagcaggtctgtcctccacccgccctcccggggacattcgtaggcgtgcctcgagcacaggctcccgggtcaggagagtgggggtggctgcgagaaggccaggcaggtttctgctggcaaggctcccccacacctcttctgagcacccctttcccacttgttctgtctgtccaccggactgtcggtcaga

SEQ ID NO: 349467 - DNA, 6352 bp, Homo sapiens
  misc_feature (4403)..(4403): n is a, c, g, or t
  misc_feature (4980)..(4980): n is a, c, g, or t
  misc_feature (5518)..(5518): n is a, c, g, or t
  misc_feature (6073)..(6073): n is a, c, g, or t
gtccaaaccggaagaccgtgggtagctgcggcggggctgacccgtcccgagtgccaaagctggggttctacttgagatttccctcgtggtgccagggtccggcgagcatcacgccgaggcccattttccagacgaccacgacgaggccggggtcacctggcgagacgcactgactctgccagaggcccagccccagaactcagagaatggggcactgcatgtgaccaaggacctgctgtgggagccggcaacccctgggcctctccccatgctgcctcccctcatcgatccctgggaccctggcctgactgcccgggacctgcttttccgcggagggtaccggtatcggaagcggccccgagtcgtgctggatgtgactgagcagatcagccggttcctcttggatcatggagacgtagcctttgcgcccctggggaagctgatgctggagaatttcaagctggagggagcggggagccgcactaagaagaagacagtggtcagtgtgaagaagctgctccaggacctcggtggacaccagccctgggggtgtccctgggcttacctcagcaaccgacagcgccgcttctctatcctcgggggccccatcctgggcacgtcggtggcgagccacttggcagagctgctgcacgaggagctggtgctgcggtgggagcagctgcttctggatgaggcctgcactgggggcgcgctggcctgggttcctggaaggacaccccagttcgggcagctggtctaccctgctggaggcgcccaggacaggctgcatttccaagaggtcgttctgaccccaggtgacaatccccaattccttgggaaacctggacgcatccagctccagggacctgtccggcaagtggtgacatgcaccgtccagggagaaactctgctggccgtccgctctgactaccactgtgccgtgtggaagtttggtaaacagtggcagccaacccttctgcaggcaatgcaggtggagaaaggggccacggggatcagcctcagccctcacctgcccggggagctggccatctgcagccgctcgggagccgtctgcctgtggagccctgaggatgggctgcggcaaatctacagggaccctgagaccctcgtgttccgggactcctcttcgtggcgttgggcagacttcactgcgcaccctcgggtgctgaccgtgggtgaccgcaccggagtgaagatgctggacactcagggcccgccgggctgtggtctgttgctttttcgtttgggggcagaggcttcgtgccagaaaggggaacgtgtcctgcttacccagtacctggggcactccagccccaaatgcctcccccctactcttcatctcgtctgtacccagccccagttctctctctacctagtggacgagcgccttcccctggtgccgatgctgaagtggaaccatggcctcccctccccgctcctgctggcccgactgctgcctccgccccggcccagctgcgtgcagcccctgctcctcggaggccagggtgggcagctgcagctgctgcacctggcaggagaaggggcgtcggtgccccgcctggcaggccccccccagtctcttccttccaggatcgactccctccctgcatttcctctgctggagcctaagatccagtggcggctgcaggagcgcctgaaagcaccgaccataggtctggctgccgtcgtcccgcccttgccctcagcgcccacaccaggcctggtgctcttccagctctcggcggcgggagatgtcttctaccagcagctccgcccccaggtggactccagcctccgcagagatgctgggcctcctggcgacacccaacctgactgccatgcccccacagcttcctggacctcccaggacactgccggctgcagccagtggctgaaggccctgctaaaagtgcccctggctcctcctgtgtggacagcacccaccttcacccaccgccagatgctgggcagcacagagctgcggagggaggaagaggaagggcagcggctgggtgtgctccgcaaggccatggcccgagggcagctcctgctgcagagagacctgggctccctccctgcggcagagccaccccctgcacccgagtcaggcctagaggacaagctcagtgagcgcctgggggaagcctgggcaggccgaggggctgcctggtgggagaggcagcagggcaggacctcggagcccgggagacagaccaggcggcccaagcgccggacccagctgtccagcagcttttcgctcagtggccatgtggatccctcagaggacaccagctcccctcatagccctgagtggccacctgctgatgctctgcccctgccccccacgaccccgccctcccaggagttgactccggatgcatgcgcccagggcgtcccatcagagcagcggcagatgctccgtgactacatggccaagctaccaccccagagggacaccccaggctgtgccaccacacctccccactcccaggcctccagcgtccgggccactcgctcccagcagcacacacccgtcctctctagctctcagcccctccggaagaagcctcgaatgggcttctgaggacacaaggtgggctgccctcaagccccagagagcccctcatccttcctctgggaccagatgtgccttccacagttgaaacttgagaagcagagctcgccaccttctggaggccactgtgatgatgagccaagcaatttggagccaagttgaagggacagggcaacaaaatacagtagtagtttcttttgtattttgtatattcgcctgaagatcatcccgcaaggcaggctggaggtgccggtgggcctgtgttgctgggattttagtctgtgctgggaggcagggctccgctgcgcctcagctgtgggggcctcaggcaggtccctcagttctcacgccttcctgtccagtggaatgggggccaggagtgctggctcctcgtgtttggtgagggtggagtgaggcccctgcagagctgctgatgaggtgggcacagcggccgttggcagctgctgttgtgggttgctttgtcaatctctgccccggtctgatgtttcctacagggagatgccgtggatccaggttcagggactaaatacacttggcagctgaagatgaattggaatggtcacgttttttaggctggacagcgtcccgccacagctactacctgacactgagctcatgcagagagatgatggctgatgttccttctcccttgggacatgggtctggcacctgtgggctgtcgatagtgccctctgagcagagggtcacggtcatgtcagtttgggggaattctctgttgtgcctcacagactcccccctttctttcctccctccccttctcattttgatgtctaaagcatcaagtccctcttcctcggagtttctctagctgcagtggaagattctgttttcctgtggggaaaatgctcacttgagattttgcagggacccgggtctgtctggtttctgatgacatagtaagagaaaggtcttttttcaggttggctggtgaaaggaattgcatgtgactcacacaaacaggagctagcccaatcatacactgactcgcgtgggtgttaaaatgtttatcatgcctaagggagacatttataattaaaccatttatgctacatataactggggaaaactatgatgctttcggtgctgggaatgcagtgaggtcccacgtgggcagagcttggctgggctgggcaactccgacacacgtctctgggggtgtggcggcgctctcagtcggcactgtggaaggaagggtgacctgtgctttctccctgtcactgtgactgcaaggacaggggggcagccttggggttcagtccaggccaaattcagtgtcctcaactgggcgtggtggctcatacctgtaatcccagcactttgggaggccgaggcaaacagatcacctgaggtcaggagttcgagaccagcctggtcaacatggtgaaaccccatctctactaaaaatacaaagattagctgggcgtggtggcaggcccctataataccagctactggggaggctgaggcaggaaaatcccttgacgggtgcctgtaatcccagctacttcagaggcggaggcaggagaattgcttgaacctaggaggcagaggttgcagtgagccaagatcacatgactgcattccagcctaggccacagtgcgagactgtctcaaacaaaacaaacaaaaacaaattattcaacgtcctccaggcctgcccccgcccgaggctgcacgggctccagctcagactgcacttttctgtgctggttcctagagtggaagagaaggccactcagtgttcccgggaaatgcactcaggccnctccctgcttcctgcctgcaagtctggagtcagccaggcagctgtcttcaggaaaaagcctggccaccgatgcgtgctggatgagagtagcacggtctgggctccacacagcccccaatttgggagtgcacctgaaggcagatgctgaatgaaaaaacagtcccagcttgcttgttctcagcactaaccggctgctccccaaaaccgcatctgccaggcacatgtaccagcctgcagtatgaggggaggccccggtacattcagcatgtttttctgggtcttctgcagccaggcctctggctgccgtccctgcctggtgcccctttgcccctttgccttccctgccttgaaggccactaggactggcctgtgattcacccgggcctgggtcactgtgaagcagccacgcccttgtgtggctgtcacctcgcttgccccacactccccagcagtggtgttggtggtcccctccaaaagccctggtctagaaaggctgaggccagggatggtgaggagggggtggaaatgcacggtcattaggcccccgccccaggagatctgcatgaccacagggggnttgtgacccccacacacagtcagactcggctgcccaagaggaggctggctcggtggcttcctggcccaggctggctaccagcaagtggcagcttcagacccgtgaactcaggaatgggaccttcagaggatctgtgtggtctgtcctgggtgacccctccagcaacatgaaagctcagggtaaggctgagtgactgccctgccccacccatcccaggccggggagccaacattgtctccactgtgctctcggccccacgctcttacccggagaagaggctgcaaggaagtcgctgtccctgtctccactggaagtgagtggtgcagcatctctttggcaggtggggggcatcagtagctggccagaggggtcctcgtcgctgagctcctggatcaggggtcttggggacttggtgtcttgttttcggatttccaagtccctcttagcttcttttttaaagatgtctgtgaagggcacccgagccgcctttgaggtgtctttagagactgcaaatatatttgacagagtgtctgtgggnaggttttccagcacagggagtgacgtgtagtccagttcagggtcactgtcatcactcaagctcgagatgacctcaatcttcggaaagcacatattctatttacagaagaaaaggtgtctgaaagtttctgttttcacaacagaatcgctctacaatgcaccatgccagttctgctttttcacccaatgtcacaaagtattctgttgccacatccaagaaaggcccaagggaacacaggactctgaaagttaggcctgggggtggccactccctgggcacagctcatgtctatgcccttctctctgccctctgctcccccagccactggctattcctcaccctcctggtacctgagagggcgcacccctgagccctgggctctgcttggcatgcccctgaaccccgtttccttcacagactctctgggacttagctccttggacagcagcccctccacagtaactgtgtctgttttcgtttgctgctgagctcgtgcacagagatgatggctgatgcctccttctccctcagggtacgggtctggcacgtgtgggntcctggtaatgccagtaatggcctctgggtggagtagggtcacgtcactctgagagaattccccattgtgcctcacagactcacccctttctttcccctctcctgttttcatttccttcccctatattcagacagacattcataggatggacatagaaatacatcttaatgacagaaagtactttcaggtaactatgcactgtactcagctgttacaaaccagcaatagattttcaagtggttcatcataaaatcttaaagaaattgaacaagaacaaa

SEQ ID NO: 349468 - DNA, 6558 bp, Homo sapiens
  misc_feature (4609)..(4609): n is a, c, g, or t
  misc_feature (5186)..(5186): n is a, c, g, or t
  misc_feature (5724)..(5724): n is a, c, g, or t
  misc_feature (6279)..(6279): n is a, c, g, or t
gtccaaaccggaagaccgtgggtagctgcggcggggctgacccgtcccgagtgccaaagctggggttctacttgagatttccctcgtggtgccagggtccggcgagcatcacgccgaggcccattttccagacgaccacgacgaggccggggtcacctggcgagacgcactgactctgccagaggcccagccccagaactcagagaatggggcactgcatgtgaccaaggacctgctgtgggagccggcaacccctgggcctctccccatgctgcctcccctcatcgatccctgggaccctggcctgactgcccgggacctgcttttccgcggagggtaccggtatcggaagcggccccgagtcgtgctggatgtgactgagcagatcagccggttcctcttggatcatggagacgtagcctttgcgcccctggggaagctgatgctggagaatttcaagctggagggagcggggagccgcactaagaagaagacagtggtcagtgtgaagaagctgctccaggacctcggtggacaccagccctgggggtgtccctgggcttacctcagcaaccgacagcgccgcttctctatcctcgggggccccatcctgggcacgtcggtggcgagccacttggcagagctgctgcacgaggagctggtgctgcggtgggagcagctgcttctggatgaggcctgcactgggggcgcgctggcctgggttcctggaaggacaccccagttcgggcagctggtctaccctgctggaggcgcccaggacaggctgcatttccaagaggtcgttctgaccccaggtgacaatccccaattccttgggaaacctggacgcatccagctccagggacctgtccggcaagtggtgacatgcaccgtccagggagaaagtaaggcccttatatacactttcctccctcactggctgacctgctacctgacccctggccctttccatccctcctcagctctgctggccgtccgctctgactaccactgtgccgtgtggaagtttggtaaacagtggcagccaacccttctgcaggcaatgcaggtggagaaaggggccacggggatcagcctcagccctcacctgcccggggagctggccatctgcagccgctcgggagccgtctgcctgtggagccctgaggatgggtatcgccgcttcctgtgaaaccccccaccctaacgaactgaactccgccctgttgagcatgtcgcgacccttgagccccttccccatcagcctgtccccctgcccacggcttgcctgtctccccaaggctgcggcaaatctacagggaccctgagaccctcgtgttccgggactcctcttcgtggcgttgggcagacttcactgcgcaccctcgggtgctgaccgtgggtgaccgcaccggagtgaagatgctggacactcagggcccgccgggctgtggtctgttgctttttcgtttgggggcagaggcttcgtgccagaaaggggaacgtgtcctgcttacccagtacctggggcactccagccccaaatgcctcccccctactcttcatctcgtctgtacccagccccagttctctctctacctagtggacgagcgccttcccctggtgccgatgctgaagtggaaccatggcctcccctccccgctcctgctggcccgactgctgcctccgccccggcccagctgcgtgcagcccctgctcctcggaggccagggtgggcagctgcagctgctgcacctggcaggagaaggggcgtcggtgccccgcctggcaggccccccccagtctcttccttccaggatcgactccctccctgcatttcctctgctggagcctaagatccagtggcggctgcaggagcgcctgaaagcaccgaccataggtctggctgccgtcgtcccgcccttgccctcagcgcccacaccaggcctggtgctcttccagctctcggcggcgggagatgtcttctaccagcagctccgcccccaggtggactccagcctccgcagagatgctgggcctcctggcgacacccaacctgactgccatgcccccacagcttcctggacctcccaggacactgccggctgcagccagtggctgaaggccctgctaaaagtgcccctggctcctcctgtgtggacagcacccaccttcacccaccgccagatgctgggcagcacagagctgcggagggaggaagaggaagggcagcggctgggtgtgctccgcaaggccatggcccgagggcagctcctgctgcagagagacctgggctccctccctgcggcagagccaccccctgcacccgagtcaggcctagaggacaagctcagtgagcgcctgggggaagcctgggcaggccgaggggctgcctggtgggagaggcagcagggcaggacctcggagcccgggagacagaccaggcggcccaagcgccggacccagctgtccagcagcttttcgctcagtggccatgtggatccctcagaggacaccagctcccctcatagccctgagtggccacctgctgatgctctgcccctgccccccacgaccccgccctcccaggagttgactccggatgcatgcgcccagggcgtcccatcagagcagcggcagatgctccgtgactacatggccaagctaccaccccagagggacaccccaggctgtgccaccacacctccccactcccaggcctccagcgtccgggccactcgctcccagcagcacacacccgtcctctctagctctcagcccctccggaagaagcctcgaatgggcttctgaggacacaaggtgggctgccctcaagccccagagagcccctcatccttcctctgggaccagatgtgccttccacagttgaaacttgagaagcagagctcgccaccttctggaggccactgtgatgatgagccaagcaatttggagccaagttgaagggacagggcaacaaaatacagtagtagtttcttttgtattttgtatattcgcctgaagatcatcccgcaaggcaggctggaggtgccggtgggcctgtgttgctgggattttagtctgtgctgggaggcagggctccgctgcgcctcagctgtgggggcctcaggcaggtccctcagttctcacgccttcctgtccagtggaatgggggccaggagtgctggctcctcgtgtttggtgagggtggagtgaggcccctgcagagctgctgatgaggtgggcacagcggccgttggcagctgctgttgtgggttgctttgtcaatctctgccccggtctgatgtttcctacagggagatgccgtggatccaggttcagggactaaatacacttggcagctgaagatgaattggaatggtcacgttttttaggctggacagcgtcccgccacagctactacctgacactgagctcatgcagagagatgatggctgatgttccttctcccttgggacatgggtctggcacctgtgggctgtcgatagtgccctctgagcagagggtcacggtcatgtcagtttgggggaattctctgttgtgcctcacagactcccccctttctttcctccctccccttctcattttgatgtctaaagcatcaagtccctcttcctcggagtttctctagctgcagtggaagattctgttttcctgtggggaaaatgctcacttgagattttgcagggacccgggtctgtctggtttctgatgacatagtaagagaaaggtcttttttcaggttggctggtgaaaggaattgcatgtgactcacacaaacaggagctagcccaatcatacactgactcgcgtgggtgttaaaatgtttatcatgcctaagggagacatttataattaaaccatttatgctacatataactggggaaaactatgatgctttcggtgctgggaatgcagtgaggtcccacgtgggcagagcttggctgggctgggcaactccgacacacgtctctgggggtgtggcggcgctctcagtcggcactgtggaaggaagggtgacctgtgctttctccctgtcactgtgactgcaaggacaggggggcagccttggggttcagtccaggccaaattcagtgtcctcaactgggcgtggtggctcatacctgtaatcccagcactttgggaggccgaggcaaacagatcacctgaggtcaggagttcgagaccagcctggtcaacatggtgaaaccccatctctactaaaaatacaaagattagctgggcgtggtggcaggcccctataataccagctactggggaggctgaggcaggaaaatcccttgacgggtgcctgtaatcccagctacttcagaggcggaggcaggagaattgcttgaacctaggaggcagaggttgcagtgagccaagatcacatgactgcattccagcctaggccacagtgcgagactgtctcaaacaaaacaaacaaaaacaaattattcaacgtcctccaggcctgcccccgcccgaggctgcacgggctccagctcagactgcacttttctgtgctggttcctagagtggaagagaaggccactcagtgttcccgggaaatgcactcaggccnctccctgcttcctgcctgcaagtctggagtcagccaggcagctgtcttcaggaaaaagcctggccaccgatgcgtgctggatgagagtagcacggtctgggctccacacagcccccaatttgggagtgcacctgaaggcagatgctgaatgaaaaaacagtcccagcttgcttgttctcagcactaaccggctgctccccaaaaccgcatctgccaggcacatgtaccagcctgcagtatgaggggaggccccggtacattcagcatgtttttctgggtcttctgcagccaggcctctggctgccgtccctgcctggtgcccctttgcccctttgccttccctgccttgaaggccactaggactggcctgtgattcacccgggcctgggtcactgtgaagcagccacgcccttgtgtggctgtcacctcgcttgccccacactccccagcagtggtgttggtggtcccctccaaaagccctggtctagaaaggctgaggccagggatggtgaggagggggtggaaatgcacggtcattaggcccccgccccaggagatctgcatgaccacagggggnttgtgacccccacacacagtcagactcggctgcccaagaggaggctggctcggtggcttcctggcccaggctggctaccagcaagtggcagcttcagacccgtgaactcaggaatgggaccttcagaggatctgtgtggtctgtcctgggtgacccctccagcaacatgaaagctcagggtaaggctgagtgactgccctgccccacccatcccaggccggggagccaacattgtctccactgtgctctcggccccacgctcttacccggagaagaggctgcaaggaagtcgctgtccctgtctccactggaagtgagtggtgcagcatctctttggcaggtggggggcatcagtagctggccagaggggtcctcgtcgctgagctcctggatcaggggtcttggggacttggtgtcttgttttcggatttccaagtccctcttagcttcttttttaaagatgtctgtgaagggcacccgagccgcctttgaggtgtctttagagactgcaaatatatttgacagagtgtctgtgggnaggttttccagcacagggagtgacgtgtagtccagttcagggtcactgtcatcactcaagctcgagatgacctcaatcttcggaaagcacatattctatttacagaagaaaaggtgtctgaaagtttctgttttcacaacagaatcgctctacaatgcaccatgccagttctgctttttcacccaatgtcacaaagtattctgttgccacatccaagaaaggcccaagggaacacaggactctgaaagttaggcctgggggtggccactccctgggcacagctcatgtctatgcccttctctctgccctctgctcccccagccactggctattcctcaccctcctggtacctgagagggcgcacccctgagccctgggctctgcttggcatgcccctgaaccccgtttccttcacagactctctgggacttagctccttggacagcagcccctccacagtaactgtgtctgttttcgtttgctgctgagctcgtgcacagagatgatggctgatgcctccttctccctcagggtacgggtctggcacgtgtgggntcctggtaatgccagtaatggcctctgggtggagtagggtcacgtcactctgagagaattccccattgtgcctcacagactcacccctttctttcccctctcctgttttcatttccttcccctatattcagacagacattcataggatggacatagaaatacatcttaatgacagaaagtactttcaggtaactatgcactgtactcagctgttacaaaccagcaatagattttcaagtggttcatcataaaatcttaaagaaattgaacaagaacaaa

SEQ ID NO: 349469 - DNA, 6145 bp, Homo sapiens
  misc_feature (4196)..(4196): n is a, c, g, or t
  misc_feature (4773)..(4773): n is a, c, g, or t
  misc_feature (5311)..(5311): n is a, c, g, or t
  misc_feature (5866)..(5866): n is a, c, g, or t
tacttttggttcccccgagtatgggatatcgtcgaccgcgcctcgagctggagggagccgggagccgcactaagaagaagacagtggtcagtgtgaagaagctgctccaggacctcggtggacaccagccctgggggtgtccctgggcttacctcagcaaccgacagcgccgcttctctatcctcgggggccccatcctgggcacgtcggtggcgagccacttggcagagctgctgcacgaggagctggtgctgcggtgggagcagctgcttctggatgaggcctgcactgggggcgcgctggcctgggttcctggaaggacaccccagttcgggcagctggtctaccctgctggaggcgcccaggacaggctgcatttccaagaggtcgttctgaccccaggtgacaatccccaattccttgggaaacctggacgcatccagctccagggacctgtccggcaagtggtgacatgcaccgtccagggagaaagtaaggcccttatatacactttcctccctcactggctgacctgctacctgacccctggccctttccatccctcctcagctctgctggccgtccgctctgactaccactgtgccgtgtggaagtttggtaaacagtggcagccaacccttctgcaggcaatgcaggtggagaaaggggccacggggatcagcctcagccctcacctgcccggggagctggccatctgcagccgctcgggagccgtctgcctgtggagccctgaggatgggtatcgccgcttcctgtgaaaccccccaccctaacgaactgaactccgccctgttgagcatgtcgcgacccttgagccccttccccatcagcctgtccccctgcccacggcttgcctgtctccccaaggctgcggcaaatctacagggaccctgagaccctcgtgttccgggactcctcttcgtggcgttgggcagacttcactgcgcaccctcgggtgctgaccgtgggtgaccgcaccggagtgaagatgctggacactcagggcccgccgggctgtggtctgttgctttttcgtttgggggcagaggcttcgtgccagaaaggggaacgtgtcctgcttacccagtacctggggcactccagccccaaatgcctcccccctactcttcatctcgtctgtacccagccccagttctctctctacctagtggacgagcgccttcccctggtgccgatgctgaagtggaaccatggcctcccctccccgctcctgctggcccgactgctgcctccgccccggcccagctgcgtgcagcccctgctcctcggaggccagggtgggcagctgcagctgctgcacctggcaggagaaggggcgtcggtgccccgcctggcaggccccccccagtctcttccttccaggatcgactccctccctgcatttcctctgctggagcctaagatccagtggcggctgcaggagcgcctgaaagcaccgaccataggtctggctgccgtcgtcccgcccttgccctcagcgcccacaccaggcctggtgctcttccagctctcggcggcgggagatgtcttctaccagcagctccgcccccaggtggactccagcctccgcagagatgctgggcctcctggcgacacccaacctgactgccatgcccccacagcttcctggacctcccaggacactgccggctgcagccagtggctgaaggccctgctaaaagtgcccctggctcctcctgtgtggacagcacccaccttcacccaccgccagatgctgggcagcacagagctgcggagggaggaagaggaagggcagcggctgggtgtgctccgcaaggccatggcccgagggcagctcctgctgcagagagacctgggctccctccctgcggcagagccaccccctgcacccgagtcaggcctagaggacaagctcagtgagcgcctgggggaagcctgggcaggccgaggggctgcctggtgggagaggcagcagggcaggacctcggagcccgggagacagaccaggcggcccaagcgccggacccagctgtccagcagcttttcgctcagtggccatgtggatccctcagaggacaccagctcccctcatagccctgagtggccacctgctgatgctctgcccctgccccccacgaccccgccctcccaggagttgactccggatgcatgcgcccagggcgtcccatcagagcagcggcagatgctccgtgactacatggccaagctaccaccccagagggacaccccaggctgtgccaccacacctccccactcccaggcctccagcgtccgggccactcgctcccagcagcacacacccgtcctctctagctctcagcccctccggaagaagcctcgaatgggcttctgaggacacaaggtgggctgccctcaagccccagagagcccctcatccttcctctgggaccagatgtgccttccacagttgaaacttgagaagcagagctcgccaccttctggaggccactgtgatgatgagccaagcaatttggagccaagttgaagggacagggcaacaaaatacagtagtagtttcttttgtattttgtatattcgcctgaagatcatcccgcaaggcaggctggaggtgccggtgggcctgtgttgctgggattttagtctgtgctgggaggcagggctccgctgcgcctcagctgtgggggcctcaggcaggtccctcagttctcacgccttcctgtccagtggaatgggggccaggagtgctggctcctcgtgtttggtgagggtggagtgaggcccctgcagagctgctgatgaggtgggcacagcggccgttggcagctgctgttgtgggttgctttgtcaatctctgccccggtctgatgtttcctacagggagatgccgtggatccaggttcagggactaaatacacttggcagctgaagatgaattggaatggtcacgttttttaggctggacagcgtcccgccacagctactacctgacactgagctcatgcagagagatgatggctgatgttccttctcccttgggacatgggtctggcacctgtgggctgtcgatagtgccctctgagcagagggtcacggtcatgtcagtttgggggaattctctgttgtgcctcacagactcccccctttctttcctccctccccttctcattttgatgtctaaagcatcaagtccctcttcctcggagtttctctagctgcagtggaagattctgttttcctgtggggaaaatgctcacttgagattttgcagggacccgggtctgtctggtttctgatgacatagtaagagaaaggtcttttttcaggttggctggtgaaaggaattgcatgtgactcacacaaacaggagctagcccaatcatacactgactcgcgtgggtgttaaaatgtttatcatgcctaagggagacatttataattaaaccatttatgctacatataactggggaaaactatgatgctttcggtgctgggaatgcagtgaggtcccacgtgggcagagcttggctgggctgggcaactccgacacacgtctctgggggtgtggcggcgctctcagtcggcactgtggaaggaagggtgacctgtgctttctccctgtcactgtgactgcaaggacaggggggcagccttggggttcagtccaggccaaattcagtgtcctcaactgggcgtggtggctcatacctgtaatcccagcactttgggaggccgaggcaaacagatcacctgaggtcaggagttcgagaccagcctggtcaacatggtgaaaccccatctctactaaaaatacaaagattagctgggcgtggtggcaggcccctataataccagctactggggaggctgaggcaggaaaatcccttgacgggtgcctgtaatcccagctacttcagaggcggaggcaggagaattgcttgaacctaggaggcagaggttgcagtgagccaagatcacatgactgcattccagcctaggccacagtgcgagactgtctcaaacaaaacaaacaaaaacaaattattcaacgtcctccaggcctgcccccgcccgaggctgcacgggctccagctcagactgcacttttctgtgctggttcctagagtggaagagaaggccactcagtgttcccgggaaatgcactcaggccnctccctgcttcctgcctgcaagtctggagtcagccaggcagctgtcttcaggaaaaagcctggccaccgatgcgtgctggatgagagtagcacggtctgggctccacacagcccccaatttgggagtgcacctgaaggcagatgctgaatgaaaaaacagtcccagcttgcttgttctcagcactaaccggctgctccccaaaaccgcatctgccaggcacatgtaccagcctgcagtatgaggggaggccccggtacattcagcatgtttttctgggtcttctgcagccaggcctctggctgccgtccctgcctggtgcccctttgcccctttgccttccctgccttgaaggccactaggactggcctgtgattcacccgggcctgggtcactgtgaagcagccacgcccttgtgtggctgtcacctcgcttgccccacactccccagcagtggtgttggtggtcccctccaaaagccctggtctagaaaggctgaggccagggatggtgaggagggggtggaaatgcacggtcattaggcccccgccccaggagatctgcatgaccacagggggnttgtgacccccacacacagtcagactcggctgcccaagaggaggctggctcggtggcttcctggcccaggctggctaccagcaagtggcagcttcagacccgtgaactcaggaatgggaccttcagaggatctgtgtggtctgtcctgggtgacccctccagcaacatgaaagctcagggtaaggctgagtgactgccctgccccacccatcccaggccggggagccaacattgtctccactgtgctctcggccccacgctcttacccggagaagaggctgcaaggaagtcgctgtccctgtctccactggaagtgagtggtgcagcatctctttggcaggtggggggcatcagtagctggccagaggggtcctcgtcgctgagctcctggatcaggggtcttggggacttggtgtcttgttttcggatttccaagtccctcttagcttcttttttaaagatgtctgtgaagggcacccgagccgcctttgaggtgtctttagagactgcaaatatatttgacagagtgtctgtgggnaggttttccagcacagggagtgacgtgtagtccagttcagggtcactgtcatcactcaagctcgagatgacctcaatcttcggaaagcacatattctatttacagaagaaaaggtgtctgaaagtttctgttttcacaacagaatcgctctacaatgcaccatgccagttctgctttttcacccaatgtcacaaagtattctgttgccacatccaagaaaggcccaagggaacacaggactctgaaagttaggcctgggggtggccactccctgggcacagctcatgtctatgcccttctctctgccctctgctcccccagccactggctattcctcaccctcctggtacctgagagggcgcacccctgagccctgggctctgcttggcatgcccctgaaccccgtttccttcacagactctctgggacttagctccttggacagcagcccctccacagtaactgtgtctgttttcgtttgctgctgagctcgtgcacagagatgatggctgatgcctccttctccctcagggtacgggtctggcacgtgtgggntcctggtaatgccagtaatggcctctgggtggagtagggtcacgtcactctgagagaattccccattgtgcctcacagactcacccctttctttcccctctcctgttttcatttccttcccctatattcagacagacattcataggatggacatagaaatacatcttaatgacagaaagtactttcaggtaactatgcactgtactcagctgttacaaaccagcaatagattttcaagtggttcatcataaaatcttaaagaaattgaacaagaacaaa

SEQ ID NO: 349470 - DNA, 6159 bp, Homo sapiens
  misc_feature (4210)..(4210): n is a, c, g, or t
  misc_feature (4787)..(4787): n is a, c, g, or t
  misc_feature (5325)..(5325): n is a, c, g, or t
  misc_feature (5880)..(5880): n is a, c, g, or t
gtccaaaccggaagaccgtgggtagctgcggcggggctgacccgtcccgagtgccaaagctggggttctacttgagatttccctcgtggtgccagggtccggcgagcatcacgccgaggcccattttccagacgaccacgacgaggccggggtcacctggcgagacgcactgactctgccagaggcccagccccagaactcagagaatggggcactgcatgtgaccaaggacctgctgtgggagccggcaacccctgggcctctccccatgctgcctcccctcatcgatccctgggaccctggcctgactgcccgggacctgcttttccgcggagggtaccggtatcggaagcggccccgagtcgtgctggatgtgactgagcagatcagccggttcctcttggatcatggagacgtagcctttgcgcccctggggaagctgatgctggagaatttcaagctggagggagcggggagccgcactaagaagaagacagtggtcagtgtgaagaagctgctccaggacctcggtggacaccagccctgggggtgtccctgggcttacctcagcaaccgacagcgccgcttctctatcctcgggggccccatcctgggcacgtcggtggcgagccacttggcagagctgctgcacgaggagctggtgctgcggtgggagcagctgcttctggatgaggcctgcactgggggcgcgctggcctgggttcctggaaggacaccccagttcgggcagctggtctaccctgctggaggcgcccaggacaggctgcatttccaagaggtcgttctgaccccaggtgacaatccccaattccttgggaaacctggacgcatccagctccagggacctgtccggcaagtggtgacatgcaccgtccagggagaaactctgctggccgtccgctctgactaccactgtgccgtgtggaagtttggtaaacagtggcagccaacccttctgcaggcaatgcaggtggagaaaggggccacggggatcagcctcagccctcacctgcccggggagctggccatctgcagccgctcgggagccgtctgcctgtggagccctgaggatgggctgcggcaaatctacagggaccctgagaccctcgtgttccgggactcctcttcgtggcgttgggcagacttcactgcgcaccctcgggtgctgaccgtgggtgaccgcaccggagtgaagatgctggacactcagggcccgccgggctgtggtctgttgctttttcgtttgggggcagaggcttcgtgccagaaaggggaacgtgtcctgcttacccagtacctggggcactccagccccaaatgcctcccccctactcttcatctcgtctgtacccagccccagttctctctctacctagtggacgagcgccttcccctggtgccgatgctgaagtggaaccatggcctcccctccccgctcctgctggcccgactgctgcctccgccccggcccagctgcgtgcagcccctgctcctcggaggccagggtgggcagctgcagctgctgcacctggcaggagaaggggcgtcggtgccccgcctggcaggccccccccagtctcttccttccaggatcgactccctccctgcatttcctctgctggagcctaagatccagtggcggctgcaggagcgcctgaaagcaccgaccataggtctggctgccgtcgtcccgcccttgccctcagcgcccacaccaggcctggtgctcttccagctctcggcggcgggagatgtcttctaccagcagctccgcccccaggtggactccagcctccgcagagatgctgggcctcctggcgacacccaacctgactgccatgcccccacagcttcctggacctcccaggacactgccggctgcagccagtggctgaaggccctgctaaaagtgcccctggctcctcctgtgtggacagcacccaccttcacccaccgccagatgctgggcagcacagagctgcggagggaggaagaggaagggcagcggctgggtgtgctccgcaaggccatggcccgagggcagctcctgctgcagagagacctgggctccctccctgcggcagagccaccccctgcacccgagtcaggcctagaggacaagctcagtgagcgcctgggggaagcctgggcaggccgaggggctgcctggtgggagaggcagcagggcaggacctcggagcccgggagacagaccaggcggcccaagcgccggacccagctgtccagcagcttttcgctcagtggccatgtggatccctcagaggacaccagctcccctcatagccctgagtggccactcgctcccagcagcacacacccgtcctctctagctctcagcccctccggaagaagcctcgaatgggcttctgaggacacaaggtgggctgccctcaagccccagagagcccctcatccttcctctgggaccagatgtgccttccacagttgaaacttgagaagcagagctcgccaccttctggaggccactgtgatgatgagccaagcaatttggagccaagttgaagggacagggcaacaaaatacagtagtagtttcttttgtattttgtatattcgcctgaagatcatcccgcaaggcaggctggaggtgccggtgggcctgtgttgctgggattttagtctgtgctgggaggcagggctccgctgcgcctcagctgtgggggcctcaggcaggtccctcagttctcacgccttcctgtccagtggaatgggggccaggagtgctggctcctcgtgtttggtgagggtggagtgaggcccctgcagagctgctgatgaggtgggcacagcggccgttggcagctgctgttgtgggttgctttgtcaatctctgccccggtctgatgtttcctacagggagatgccgtggatccaggttcagggactaaatacacttggcagctgaagatgaattggaatggtcacgttttttaggctggacagcgtcccgccacagctactacctgacactgagctcatgcagagagatgatggctgatgttccttctcccttgggacatgggtctggcacctgtgggctgtcgatagtgccctctgagcagagggtcacggtcatgtcagtttgggggaattctctgttgtgcctcacagactcccccctttctttcctccctccccttctcattttgatgtctaaagcatcaagtccctcttcctcggagtttctctagctgcagtggaagattctgttttcctgtggggaaaatgctcacttgagattttgcagggacccgggtctgtctggtttctgatgacatagtaagagaaaggtcttttttcaggttggctggtgaaaggaattgcatgtgactcacacaaacaggagctagcccaatcatacactgactcgcgtgggtgttaaaatgtttatcatgcctaagggagacatttataattaaaccatttatgctacatataactggggaaaactatgatgctttcggtgctgggaatgcagtgaggtcccacgtgggcagagcttggctgggctgggcaactccgacacacgtctctgggggtgtggcggcgctctcagtcggcactgtggaaggaagggtgacctgtgctttctccctgtcactgtgactgcaaggacaggggggcagccttggggttcagtccaggccaaattcagtgtcctcaactgggcgtggtggctcatacctgtaatcccagcactttgggaggccgaggcaaacagatcacctgaggtcaggagttcgagaccagcctggtcaacatggtgaaaccccatctctactaaaaatacaaagattagctgggcgtggtggcaggcccctataataccagctactggggaggctgaggcaggaaaatcccttgacgggtgcctgtaatcccagctacttcagaggcggaggcaggagaattgcttgaacctaggaggcagaggttgcagtgagccaagatcacatgactgcattccagcctaggccacagtgcgagactgtctcaaacaaaacaaacaaaaacaaattattcaacgtcctccaggcctgcccccgcccgaggctgcacgggctccagctcagactgcacttttctgtgctggttcctagagtggaagagaaggccactcagtgttcccgggaaatgcactcaggccnctccctgcttcctgcctgcaagtctggagtcagccaggcagctgtcttcaggaaaaagcctggccaccgatgcgtgctggatgagagtagcacggtctgggctccacacagcccccaatttgggagtgcacctgaaggcagatgctgaatgaaaaaacagtcccagcttgcttgttctcagcactaaccggctgctccccaaaaccgcatctgccaggcacatgtaccagcctgcagtatgaggggaggccccggtacattcagcatgtttttctgggtcttctgcagccaggcctctggctgccgtccctgcctggtgcccctttgcccctttgccttccctgccttgaaggccactaggactggcctgtgattcacccgggcctgggtcactgtgaagcagccacgcccttgtgtggctgtcacctcgcttgccccacactccccagcagtggtgttggtggtcccctccaaaagccctggtctagaaaggctgaggccagggatggtgaggagggggtggaaatgcacggtcattaggcccccgccccaggagatctgcatgaccacagggggnttgtgacccccacacacagtcagactcggctgcccaagaggaggctggctcggtggcttcctggcccaggctggctaccagcaagtggcagcttcagacccgtgaactcaggaatgggaccttcagaggatctgtgtggtctgtcctgggtgacccctccagcaacatgaaagctcagggtaaggctgagtgactgccctgccccacccatcccaggccggggagccaacattgtctccactgtgctctcggccccacgctcttacccggagaagaggctgcaaggaagtcgctgtccctgtctccactggaagtgagtggtgcagcatctctttggcaggtggggggcatcagtagctggccagaggggtcctcgtcgctgagctcctggatcaggggtcttggggacttggtgtcttgttttcggatttccaagtccctcttagcttcttttttaaagatgtctgtgaagggcacccgagccgcctttgaggtgtctttagagactgcaaatatatttgacagagtgtctgtgggnaggttttccagcacagggagtgacgtgtagtccagttcagggtcactgtcatcactcaagctcgagatgacctcaatcttcggaaagcacatattctatttacagaagaaaaggtgtctgaaagtttctgttttcacaacagaatcgctctacaatgcaccatgccagttctgctttttcacccaatgtcacaaagtattctgttgccacatccaagaaaggcccaagggaacacaggactctgaaagttaggcctgggggtggccactccctgggcacagctcatgtctatgcccttctctctgccctctgctcccccagccactggctattcctcaccctcctggtacctgagagggcgcacccctgagccctgggctctgcttggcatgcccctgaaccccgtttccttcacagactctctgggacttagctccttggacagcagcccctccacagtaactgtgtctgttttcgtttgctgctgagctcgtgcacagagatgatggctgatgcctccttctccctcagggtacgggtctggcacgtgtgggntcctggtaatgccagtaatggcctctgggtggagtagggtcacgtcactctgagagaattccccattgtgcctcacagactcacccctttctttcccctctcctgttttcatttccttcccctatattcagacagacattcataggatggacatagaaatacatcttaatgacagaaagtactttcaggtaactatgcactgtactcagctgttacaaaccagcaatagattttcaagtggttcatcataaaatcttaaagaaattgaacaagaacaaa

SEQ ID NO: 349471 - DNA, 4214 bp, Homo sapiens
  misc_feature (3380)..(3380): n is a, c, g, or t
  misc_feature (3935)..(3935): n is a, c, g, or t
gtccaaaccggaagaccgtgggtagctgcggcggggctgacccgtcccgagtgccaaagctggggttctacttgagatttccctcgtggtgccagggtccggcgagcatcacgccgaggcccattttccagacgaccacgacgaggccggggtcacctggcgagacgcactgactctgccagaggcccagccccagaactcagagaatggggcactgcatgtgaccaaggacctgctgtgggagccggcaacccctgggcctctccccatgctgcctcccctcatcgatccctgggaccctggcctgactgcccgggacctgcttttccgcggagggtaccggtatcggaagcggccccgagtcgtgctggatgtgactgagcagatcagccggttcctcttggatcatggagacgtagcctttgcgcccctggggaagctgatgctggagaatttcaagctggagggagcggggagccgcactaagaagaagacagtggtcagtgtgaagaagctgctccaggacctcggtggacaccagccctgggggtgtccctgggcttacctcagcaaccgacagcgccgcttctctatcctcgggggccccatcctgggcacgtcggtggcgagccacttggcagagctgctgcacgaggagctggtgctgcggtgggagcagctgcttctggatgaggcctgcactgggggcgcgctggcctgggttcctggaaggacaccccagttcgggcagctggtctaccctgctggaggcgcccaggacaggctgcatttccaagaggtcgttctgaccccaggtgacaatccccaattccttgggaaacctggacgcatccagctccagggacctgtccggcaagtggtgacatgcaccgtccagggagaaactctgctggccgtccgctctgactaccactgtgccgtgtggaagtttggtaaacagtggcagccaacccttctgcaggcaatgcaggtggagaaaggggccacggggatcagcctcagccctcacctgcccggggagctggccatctgcagccgctcgggagccgtctgcctgtggagccctgaggatgggctgcggcaaatctacagggaccctgagaccctcgtgttccgggactcctcttcgtggcgttgggcagacttcactgcgcaccctcgggtgctgaccgtgggtgaccgcaccggagtgaagatgctggacactcagggcccgccgggctgtggtctgttgctttttcgtttgggggcagaggcttcgtgccagaaaggggaacgtgtcctgcttacccagtacctggggcactccagccccaaatgcctcccccctactcttcatctcgtctgtacccagccccagttctctctctacctagtggacgagcgccttcccctggtgccgatgctgaagtggaaccatggcctcccctccccgctcctgctggcccgactgctgcctccgccccggcccagctgcgtgcagcccctgctcctcggaggccagggtgggcagctgcagctgctgcacctggcaggagaaggggcgtcggtgccccgcctggcaggccccccccagtctcttccttccaggatcgactccctccctgcatttcctctgctggagcctaagatccagtggcggctgcaggagcgcctgaaagcaccgaccataggtctggctgccgtcgtcccgcccttgccctcagcgcccacaccaggcctggtgctcttccagctctcggcggcgggagatgtcttctaccagcagctccgcccccaggtggactccagcctccgcagagatgctgggcctcctggcgacacccaacctgactgccatgcccccacagcttcctggacctcccaggacactgccggctgcagccagtggctgaaggccctgctaaaagtgcccctggctcctcctgtgtggacagcacccaccttcacccaccgccagatgctgggcagcacagagctgcggagggaggaagaggaagggcagcggctgggtgtgctccgcaaggccatggcccgagggcagctcctgctgcagagagacctgggctccctccctgcggcagagccaccccctgcacccgagtcaggcctagaggacaagctcagtgagcgcctgggggaagcctgggcaggccgaggggctgcctggtgggagaggcagcagggcaggacctcggagcccgggagacagaccaggcggcccaagcgccggacccagctgtccagcagcttttcgctcagtggccatgtggatccctcagaggacaccagctcccctcatagccctgagtggccacctgctgatgctctgcccctgccccccacgaccccgccctcccaggagttgactccggatgcatgcgcccagggcgtcccatcagagcagcggcagatgctccgtgactacatggccaagctaccaccccagagggacaccccaggctgtgccaccacacctccccactcccaggcctccagcgtccgggccactcgctcccagcagcacacacccgtcctctctagctctcagcccctccggaagaagcctcgaatgggcttctgaggacacaaggtgggctgccctcaagccccagagagcccctcatccttcctctgggaccagatgtgccttccacagttgaaacttgagaagcagagctcgccaccttctggaggccactgtgatgatgagccaagcaatttggagccaagttgaagggacagggcaacaaaatacagtagtagtttcttttgtattttgtatattcgcctgaagatcatcccgcaaggcaggctggaggtgccggtgggcctgtgttgctgggattttagtctgtgctgggaggcagggctccgctgcgcctcagctgtgggggcctcaggcaggtccctcagttctcacgccttcctgtccagtggaatgggggccaggagtgctggctcctcgtgtttggtgagggtggagtgaggcccctgcagagctgctgatgaggtgggcacagcggccgttggcagctgctgttgtgggttgctttgtcaatctctgccccggtctgatgtttcctaccggagaagaggctgcaaggaagtcgctgtccctgtctccactggaagtgagtggtgcagcatctctttggcaggtggggggcatcagtagctggccagaggggtcctcgtcgctgagctcctggatcaggggtcttggggacttggtgtcttgttttcggatttccaagtccctcttagcttcttttttaaagatgtctgtgaagggcacccgagccgcctttgaggtgtctttagagactgcaaatatatttgacagagtgtctgtgggnaggttttccagcacagggagtgacgtgtagtccagttcagggtcactgtcatcactcaagctcgagatgacctcaatcttcggaaagcacatattctatttacagaagaaaaggtgtctgaaagtttctgttttcacaacagaatcgctctacaatgcaccatgccagttctgctttttcacccaatgtcacaaagtattctgttgccacatccaagaaaggcccaagggaacacaggactctgaaagttaggcctgggggtggccactccctgggcacagctcatgtctatgcccttctctctgccctctgctcccccagccactggctattcctcaccctcctggtacctgagagggcgcacccctgagccctgggctctgcttggcatgcccctgaaccccgtttccttcacagactctctgggacttagctccttggacagcagcccctccacagtaactgtgtctgttttcgtttgctgctgagctcgtgcacagagatgatggctgatgcctccttctccctcagggtacgggtctggcacgtgtgggntcctggtaatgccagtaatggcctctgggtggagtagggtcacgtcactctgagagaattccccattgtgcctcacagactcacccctttctttcccctctcctgttttcatttccttcccctatattcagacagacattcataggatggacatagaaatacatcttaatgacagaaagtactttcaggtaactatgcactgtactcagctgttacaaaccagcaatagattttcaagtggttcatcataaaatcttaaagaaattgaacaagaacaaa

SEQ ID NO: 349472 - DNA, 2828 bp, Homo sapiens
gtccaaaccggaagaccgtgggtagctgcggcggggctgacccgtcccgagtgccaaagctggggttctacttgagatttccctcgtggtgccagggtccggcgagcatcacgccgaggcccattttccagacgaccacgacgaggccggggtcacctggcgagacgcactgactctgccagaggcccagccccagaactcagagaatggggcactgcatgtgaccaaggacctgctgtgggagccggcaacccctgggcctctccccatgctgcctcccctcatcgatccctgggaccctggcctgactgcccgggacctgcttttccgcggagggtaccggtatcggaagcggccccgagtcgtgctggatgtgactgagcagatcagccggttcctcttggatcatggagacgtagcctttgcgcccctggggaagctgatgctggagaatttcaagctggagggagcggggagccgcactaagaagaagacagtggtcagtgtgaagaagctgctccaggacctcggtggacaccagccctgggggtgtccctgggcttacctcagcaaccgacagcgccgcttctctatcctcgggggccccatcctgggcacgtcggtggcgagccacttggcagagctgctgcacgaggagctggtgctgcggtgggagcagctgcttctggatgaggcctgcactgggggcgcgctggcctgggttcctggaaggacaccccagttcgggcagctggtctaccctgctggaggcgcccaggacaggctgcatttccaagaggtcgttctgaccccaggtgacaatccccaattccttgggaaacctggacgcatccagctccagggacctgtccggcaagtggtgacatgcaccgtccagggagaaactctgctggccgtccgctctgactaccactgtgccgtgtggaagtttggtaaacagtggcagccaacccttctgcaggcaatgcaggtggagaaaggggccacggggatcagcctcagccctcacctgcccggggagctggccatctgcagccgctcgggagccgtctgcctgtggagccctgaggatgggctgcggcaaatctacagggaccctgagaccctcgtgttccgggactcctcttcgtggcgttgggcagacttcactgcgcaccctcgggtgctgaccgtgggtgaccgcaccggagtgaagatgctggacactcagggcccgccgggctgtggtctgttgctttttcgtttgggggcagaggcttcgtgccagaaaggggaacgtgtcctgcttacccagtacctggggcactccagccccaaatgcctcccccctactcttcatctcgtctgtacccagccccagttctctctctacctagtggacgagcgccttcccctggtgccgatgctgaagtggaaccatggcctcccctccccgctcctgctggcccgactgctgcctccgccccggcccagctgcgtgcagcccctgctcctcggaggccagggtgggcagctgcagctgctgcacctggcaggagaaggggcgtcggtgccccgcctggcaggccccccccagtctcttccttccaggatcgactccctccctgcatttcctctgctggagcctaagatccagtggcggctgcaggagcgcctgaaagcaccgaccataggtctggctgccgtcgtcccgcccttgccctcagcgcccacaccaggcctggtgctcttccagctctcggcggcgggagatgtcttctaccagcagctccgcccccaggtggactccagcctccgcagagatgctgggcctcctggcgacacccaacctgactgccatgcccccacagcttcctggacctcccaggacactgccggctgcagccagtggctgaaggccctgctaaaagtgcccctggctcctcctgtgtggacagcacccaccttcacccaccgccagatgctgggcagcacagagctgcggagggaggaagaggaagggcagcggctgggtgtgctccgcaaggccatggcccgagggcagctcctgctgcagagagacctgggctccctccctgcggcagagccaccccctgcacccgagtcaggcctagaggacaagctcagtgagcgcctgggggaagcctgggcaggccgaggggctgcctggtgggagaggcagcagggcaggacctcggagcccgggagacagaccaggcggcccaagcgccggacccagctgtccagcagcttttcgctcagtggccatgtggatccctcagaggacaccagctcccctcatagccctgagtggccacctgctgatgctctgcccctgccccccacgaccccgccctcccaggagttgactccggatgcatgcgcccagggcgtcccatcagagcagcggcagatgctccgtgactacatggccaagctaccaccccagagggacaccccaggctgtgccaccacacctccccactcccaggcctccagcgtccgggccactcgctcccagcagcacacacccgtcctctctagctctcagcccctccggaagaagcctcgaatgggcttctgaggacacaaggtgggctgccctcaagccccagagagcccctcatccttcctctgggaccagatgtgccttccacagttgaaacttgagaagcagagctcgccaccttctggaggccactgtgatgatgagccaagcaatttggagccaagttgaagggacagggcaacaaaatacagtagtagtaggcgcagcgctcccctatactaccagacacggccccgcc

SEQ ID NO: 349473 - DNA, 1736 bp, Homo sapiens
gtccaaaccggaagaccgtgggtagctgcggcggggctgacccgtcccgagtgccaaagctggggttctacttgagatttccctcgtggtgccagggtccggcgagcatcacgccgaggcccattttccagacgaccacgacgaggccggggtcacctggcgagacgcactgactctgccagaggcccagccccagaactcagagaatggggcactgcatgtgaccaaggacctgctgtgggagccggcaacccctgggcctctccccatgctgcctcccctcatcgatccctgggaccctggcctgactgcccgggacctgcttttccgcggagggtaccggtatcggaagcggccccgagtcgtgctggatgtgactgagcagatcagccggttcctcttggatcatggagacgtagcctttgcgcccctggggaagctgatgctggagaatttcaagctggagggagcggggagccgcactaagaagaagacagtggtcagtgtgaagaagctgctccaggacctcggtggacaccagccctgggggtgtccctgggcttacctcagcaaccgacagcgccgcttctctatcctcgggggccccatcctgggcacgtcggtggcgagccacttggcagagctgctgcacgaggagctggtgctgcggtgggagcagctgcttctggatgaggcctgcactgggggcgcgctggcctgggttcctggaaggacaccccagttcgggcagctggtctaccctgctggaggcgcccaggacaggctgcatttccaagaggtcgttctgaccccaggtgacaatccccaattccttgggaaacctggacgcatccagctccagggacctgtccggcaagtggtgacatgcaccgtccagggagaaactctgctggccgtccgctctgactaccactgtgccgtgtggaagtttggtaaacagtggcagccaacccttctgcaggcaatgcaggtggagaaaggggccacggggatcagcctcagccctcacctgcccggggagctggccatctgcagccgctcgggagccgtctgcctgtggagccctgaggatgggctgcgggaaatctacagggacccctgaagaccactcgatgtaccgggactccttctatcagtaggacggatagggggcaagacattcagatgagcaaccccatacgggatgctgaaccggatgcggattgaccagacaaccggagtgacaagaatgactggacaaacattcaagggccagcccgggctgatggctctgctgcatttaccgataaggagcggcaaaagcatccgaggcccaagacacggggaaacaagagacccaggctaaacccaagtaccctgggggggaaaatccagaacccaaaatgacaccacaccgtaagcttacaacaccggtcaggacccacgaagtcatatctaactagaagggcagaggcgataccgctggaggcaagaaaagtggaccgaggcacacataccgaagagaagaacgcaggggatcaagcgagacacaggagcaacccggaaggaaagacggggggaggaaagaggaagcgcaagaaagagaaacgcacaaacacgagaagccaagacagacagagaacagcgggaggaaggaaaagaagaacaaagagcacaagaagccggaaattgagataaacagacagagacacaaggacccgacgacgagagcgcga

SEQ ID NO: 349474 - DNA, 913 bp, Homo sapiens
ttcccctggtgccgatgctgaagtggaaccatggcctcccctccccgctcctgctggcccgactgctgcctccgccccggcccagctgcgtgcagcccctgctcctcggaggccagggtgggcagctgcagctgctgcacctggcaggtgagggtccaggccagggtgggcggcgtgtgggagatggggcggtcggggcctggacagggcctcagctgtctgtccttcctcaggagaaggggcgtcggtgccccgcctggcaggccccccccagtctcttccttccaggatcgactccctccctgcatttcctctgctggagcctaagatccagtggcggctgcaggagcgcctgaaagcaccgaccataggtgtgctgggtgggggagtgagcttggggggcgcagtggaaaacatcccctccccccgctaggccctggaggtcattgtcattcccgtcaccaggtctggctgccgtcgtcccgcccttgccctcagcgcccacaccaggcctggtgctcttccagctctcggcggcgggagatgtcttctaccagcagctccgcccccaggtggactccagcctccgcagagatgctgggcctcctggcgacacccaacctgactgccatgcccccacagcttcctggacctcccaggacactgccggctgcagccagtggctgaaggccctgctaaaagtgcccctggctcctcctgtgtggacagcacccaccttcacccaccgccagatgctgggcagcacagagctgcggagggaggaagaggaagggcagcggctgggtgtgctccgcaaggccatggcccgagggcagctcctgctgcagagagacctgggctccctccctgcggcagagccaccccctgcacccgagtcaggcctagaggacaa

SEQ ID NO: 349475 - DNA, 291 bp, Homo sapiens
gagtgccaaagctggggttctacttgagatttccctcgtggtgccagggtccggcgagcatcacgccgaggcccattttccagacgaccacgacgaggccggggtcacgtaagtgcacgcatgcgccccctccgcgcggactgcgcgtgttcgaggagcggacccgcagatgtaggaggggagggacgcccccaatccccagtccccgcggcaggctcacgtttcgcagtccccggcctgtcgttattgcggatccgactgagttctgtagccttggaggtctaaagggtc

SEQ ID NO: 349476 - DNA, 3930 bp, Homo sapiens
gtccaaaccggaagaccgtgggtagctgcggcggggctgacccgtcccgagtgccaaagctggggttctacttgagatttccctcgtggtgccagggtccggcgagcatcacgccgaggcccattttccagacgaccacgacgaggccggggtcacgaactctggcgccccttaccagcttccagtctctcgaggtggccagtgtggtgcttggtccttgtttccaggatggacttccccagctccctccgccctgcattgtttctgaccggcccccttggtctgagcgacgtccctgacctctctttcatgtgcagctggcgagacgcactgactctgccagaggcccagccccagaactcagagaatggggcactgcatgtgaccaaggacctgctgtgggagccggcaacccctgggcctctccccatgctgcctcccctcatcgatccctgggaccctggcctgactgcccgggacctgcttttccgcggagggtaccggtatcggaagcggccccgagtcgtgctggatgtgactgagcagatcagccggttcctcttggatcatggagacgtagcctttgcgcccctggggaagctgatgctggagaatttcaagctggagggagcggggagccgcactaagaagaagacagtggtcagtgtgaagaagctgctccaggacctcggtggacaccagccctgggggtgtccctgggcttacctcagcaaccgacagcgccgcttctctatcctcgggggccccatcctgggcacgtcggtggcgagccacttggcagagctgctgcacgaggagctggtgctgcggtgggagcagctgcttctggatgaggcctgcactgggggcgcgctggcctgggttcctggaaggacaccccagttcgggcagctggtctaccctgctggaggcgcccaggacaggctgcatttccaagaggtcgttctgaccccaggtgacaatccccaattccttgggaaacctggacgcatccagctccagggacctgtccggcaagtggtgacatgcaccgtccagggagaaagtaaggcccttatatacactttcctccctcactggctgacctgctacctgacccctggccctttccatccctcctcagctctgctggccgtccgctctgactaccactgtgccgtgtggaagtttggtaaacagtggcagccaacccttctgcaggcaatgcaggtggagaaaggggccacggggatcagcctcagccctcacctgcccggggagctggccatctgcagccgctcgggagccgtctgcctgtggagccctgaggatgggctgcggcaaatctacagggaccctgagaccctcgtgttccgggactcctcttcgtggcgttgggcagacttcactgcgcaccctcgggtgctgaccgtgggtgaccgcaccggagtgaagatgctggacactcagggcccgccgggctgtggtctgttgctttttcgtttgggggcagaggcttcgtgccagaaaggggaacgtgtcctgcttacccagtacctggggcactccagccccaaatgcctcccccctactcttcatctcgtctgtacccagccccagttctctctctacctagtggacgagcgccttcccctggtgccgatgctgaagtggaaccatggcctcccctccccgctcctgctggcccgactgctgcctccgccccggcccagctgcgtgcagcccctgctcctcggaggccagggtgggcagctgcagctgctgcacctggcaggagaaggggcgtcggtgccccgcctggcaggccccccccagtctcttccttccaggatcgactccctccctgcatttcctctgctggagcctaagatccagtggcggctgcaggagcgcctgaaagcaccgaccataggtctggctgccgtcgtcccgcccttgccctcagcgcccacaccaggcctggtgctcttccagctctcggcggcgggagatgtcttctaccagcagctccgcccccaggtggactccagcctccgcagagatgctgggcctcctggcgacacccaacctgactgccatgcccccacagcttcctggacctcccaggacactgccggctgcagccagtggctgaaggccctgctaaaagtgcccctggctcctcctgtgtggacagcacccaccttcacccaccgccagatgctgggcagcacagagctgcggagggaggaagaggaagggcagcggctgggtgtgctccgcaaggccatggcccgagggcagctcctgctgcagagagacctgggctccctccctgcggcagagccaccccctgcacccgagtcaggcctagaggacaagctcagtgagcgcctgggggaagcctgggcaggccgaggggctgcctggtgggagaggcagcagggcaggacctcggagcccgggagacagaccaggcggcccaagcgccggacccagctgtccagcagcttttcgctcagtggccatgtggatccctcagaggacaccagctcccctcatagccctgagtggccacctgctgatgctctgcccctgccccccacgaccccgccctcccaggagttgactccggatgcatgcgcccagggcgtcccatcagagcagcggcagatgctccgtgactacatggccaagctaccaccccagagggacaccccaggctgtgccaccacacctccccactcccaggcctccagcgtccgggccactcgctcccagcagcacacacccgtcctctctagctctcagcccctccggaagaagcctcgaatgggcttctgaggacacaaggtgggctgccctcaagccccagagagcccctcatccttcctctgggaccagatgtgccttccacagttgaaacttgagaagcagagctcgccaccttctggaggccactgtgatgatgagccaagcaatttggagccaagttgaagggacagggcaacaaaatacagtagtagtttcttttgtattttgtatattcgcctgaagatcatcccgcaaggcaggctggaggtgccggtgggcctgtgttgctgggattttagtctgtgctgggaggcagggctccgctgcgcctcagctgtgggggcctcaggcaggtccctcagttctcacgccttcctgtccagtggaatgggggccaggagtgctggctcctcgtgtttggtgagggtggagtgaggcccctgcagagctgctgatgaggtgggcacagcggccgttggcagctgctgttgtgggttgctttgtcaatctctgccccggtctgatgtttcctacagggagatgccgtggatccaggttcagggactaaatacacttggcagctgaagatgaattggaatggtcacgttttttaggctggacagcgtcccgccacagctactacctgacactgagctcatgcagagagatgatggctgatgttccttctcccttgggacatgggtctggcacctgtgggctgtcgatagtgccctctgagcagagggtcacggtcatgtcagtttgggggaattctctgttgtgcctcacagactcccccctttctttcctccctccccttctcattttgatgtctaaagcatcaagtccctcttcctcggagtttctctagctgcagtggaagattctgttttcctgtggggaaaatgctcacttgagattttgcagggacccgggtctgtctggtttctgatgacatagtaagagaaaggtcttttttcaggttggctggtgaaaggaattgcatgtgactcacacaaacaggagctagcccaatcatacactgactcgcgtgggtgttaaaatgtttatcatgcctaagggagacatttataattaaaccatttatgctacata

SEQ ID NO: 349477 - DNA, 6062 bp, Homo sapiens
  misc_feature (4113)..(4113): n is a, c, g, or t
  misc_feature (4690)..(4690): n is a, c, g, or t
  misc_feature (5228)..(5228): n is a, c, g, or t
  misc_feature (5783)..(5783): n is a, c, g, or t
gtccaaaccggaagaccgtgggtagctgcggcggggctgacccgtcccgagtgccaaagctggggttctacttgagatttccctcgtggtgccagggtccggcgagcatcacgccgaggcccattttccagacgaccacgacgaggccggggtcacgaactctggcgccccttaccagcttccagtctctcgaggtggccagtgtggtgcttggtccttgtttccaggatggacttccccagctccctccgccctgcattgtttctgaccggcccccttggtctgagcgacgtccctgacctctctttcatgtgcagctggcgagacgcactgactctgccagaggcccagccccagaactcagagaatggggcactgcatgtgaccaaggacctgctgtgggagccggcaacccctgggcctctccccatgctgcctcccctcatcgatccctgggaccctggcctgactgcccgggacctgcttttccgcggagggtaccggtatcggaagcggccccgagtcgtgctggatgtgactgagcagatcagccggttcctcttggatcatggagacgtagcctttgcgcccctggggaagctgatgctggagaatctctgctggccgtccgctctgactaccactgtgccgtgtggaagtttggtaaacagtggcagccaacccttctgcaggcaatgcaggtggagaaaggggccacggggatcagcctcagccctcacctgcccggggagctggccatctgcagccgctcgggagccgtctgcctgtggagccctgaggatgggctgcggcaaatctacagggaccctgagaccctcgtgttccgggactcctcttcgtggcgttgggcagacttcactgcgcaccctcgggtgctgaccgtgggtgaccgcaccggagtgaagatgctggacactcagggcccgccgggctgtggtctgttgctttttcgtttgggggcagaggcttcgtgccagaaaggggaacgtgtcctgcttacccagtacctggggcactccagccccaaatgcctcccccctactcttcatctcgtctgtacccagccccagttctctctctacctagtggacgagcgccttcccctggtgccgatgctgaagtggaaccatggcctcccctccccgctcctgctggcccgactgctgcctccgccccggcccagctgcgtgcagcccctgctcctcggaggccagggtgggcagctgcagctgctgcacctggcaggagaaggggcgtcggtgccccgcctggcaggccccccccagtctcttccttccaggatcgactccctccctgcatttcctctgctggagcctaagatccagtggcggctgcaggagcgcctgaaagcaccgaccataggtctggctgccgtcgtcccgcccttgccctcagcgcccacaccaggcctggtgctcttccagctctcggcggcgggagatgtcttctaccagcagctccgcccccaggtggactccagcctccgcagagatgctgggcctcctggcgacacccaacctgactgccatgcccccacagcttcctggacctcccaggacactgccggctgcagccagtggctgaaggccctgctaaaagtgcccctggctcctcctgtgtggacagcacccaccttcacccaccgccagatgctgggcagcacagagctgcggagggaggaagaggaagggcagcggctgggtgtgctccgcaaggccatggcccgagggcagctcctgctgcagagagacctgggctccctccctgcggcagagccaccccctgcacccgagtcaggcctagaggacaagctcagtgagcgcctgggggaagcctgggcaggccgaggggctgcctggtgggagaggcagcagggcaggacctcggagcccgggagacagaccaggcggcccaagcgccggacccagctgtccagcagcttttcgctcagtggccatgtggatccctcagaggacaccagctcccctcatagccctgagtggccacctgctgatgctctgcccctgccccccacgaccccgccctcccaggagttgactccggatgcatgcgcccagggcgtcccatcagagcagcggcagatgctccgtgactacatggccaagctaccaccccagagggacaccccaggctgtgccaccacacctccccactcccaggcctccagcgtccgggccactcgctcccagcagcacacacccgtcctctctagctctcagcccctccggaagaagcctcgaatgggcttctgaggacacaaggtgggctgccctcaagccccagagagcccctcatccttcctctgggaccagatgtgccttccacagttgaaacttgagaagcagagctcgccaccttctggaggccactgtgatgatgagccaagcaatttggagccaagttgaagggacagggcaacaaaatacagtagtagtttcttttgtattttgtatattcgcctgaagatcatcccgcaaggcaggctggaggtgccggtgggcctgtgttgctgggattttagtctgtgctgggaggcagggctccgctgcgcctcagctgtgggggcctcaggcaggtccctcagttctcacgccttcctgtccagtggaatgggggccaggagtgctggctcctcgtgtttggtgagggtggagtgaggcccctgcagagctgctgatgaggtgggcacagcggccgttggcagctgctgttgtgggttgctttgtcaatctctgccccggtctgatgtttcctacagggagatgccgtggatccaggttcagggactaaatacacttggcagctgaagatgaattggaatggtcacgttttttaggctggacagcgtcccgccacagctactacctgacactgagctcatgcagagagatgatggctgatgttccttctcccttgggacatgggtctggcacctgtgggctgtcgatagtgccctctgagcagagggtcacggtcatgtcagtttgggggaattctctgttgtgcctcacagactcccccctttctttcctccctccccttctcattttgatgtctaaagcatcaagtccctcttcctcggagtttctctagctgcagtggaagattctgttttcctgtggggaaaatgctcacttgagattttgcagggacccgggtctgtctggtttctgatgacatagtaagagaaaggtcttttttcaggttggctggtgaaaggaattgcatgtgactcacacaaacaggagctagcccaatcatacactgactcgcgtgggtgttaaaatgtttatcatgcctaagggagacatttataattaaaccatttatgctacatataactggggaaaactatgatgctttcggtgctgggaatgcagtgaggtcccacgtgggcagagcttggctgggctgggcaactccgacacacgtctctgggggtgtggcggcgctctcagtcggcactgtggaaggaagggtgacctgtgctttctccctgtcactgtgactgcaaggacaggggggcagccttggggttcagtccaggccaaattcagtgtcctcaactgggcgtggtggctcatacctgtaatcccagcactttgggaggccgaggcaaacagatcacctgaggtcaggagttcgagaccagcctggtcaacatggtgaaaccccatctctactaaaaatacaaagattagctgggcgtggtggcaggcccctataataccagctactggggaggctgaggcaggaaaatcccttgacgggtgcctgtaatcccagctacttcagaggcggaggcaggagaattgcttgaacctaggaggcagaggttgcagtgagccaagatcacatgactgcattccagcctaggccacagtgcgagactgtctcaaacaaaacaaacaaaaacaaattattcaacgtcctccaggcctgcccccgcccgaggctgcacgggctccagctcagactgcacttttctgtgctggttcctagagtggaagagaaggccactcagtgttcccgggaaatgcactcaggccnctccctgcttcctgcctgcaagtctggagtcagccaggcagctgtcttcaggaaaaagcctggccaccgatgcgtgctggatgagagtagcacggtctgggctccacacagcccccaatttgggagtgcacctgaaggcagatgctgaatgaaaaaacagtcccagcttgcttgttctcagcactaaccggctgctccccaaaaccgcatctgccaggcacatgtaccagcctgcagtatgaggggaggccccggtacattcagcatgtttttctgggtcttctgcagccaggcctctggctgccgtccctgcctggtgcccctttgcccctttgccttccctgccttgaaggccactaggactggcctgtgattcacccgggcctgggtcactgtgaagcagccacgcccttgtgtggctgtcacctcgcttgccccacactccccagcagtggtgttggtggtcccctccaaaagccctggtctagaaaggctgaggccagggatggtgaggagggggtggaaatgcacggtcattaggcccccgccccaggagatctgcatgaccacagggggnttgtgacccccacacacagtcagactcggctgcccaagaggaggctggctcggtggcttcctggcccaggctggctaccagcaagtggcagcttcagacccgtgaactcaggaatgggaccttcagaggatctgtgtggtctgtcctgggtgacccctccagcaacatgaaagctcagggtaaggctgagtgactgccctgccccacccatcccaggccggggagccaacattgtctccactgtgctctcggccccacgctcttacccggagaagaggctgcaaggaagtcgctgtccctgtctccactggaagtgagtggtgcagcatctctttggcaggtggggggcatcagtagctggccagaggggtcctcgtcgctgagctcctggatcaggggtcttggggacttggtgtcttgttttcggatttccaagtccctcttagcttcttttttaaagatgtctgtgaagggcacccgagccgcctttgaggtgtctttagagactgcaaatatatttgacagagtgtctgtgggnaggttttccagcacagggagtgacgtgtagtccagttcagggtcactgtcatcactcaagctcgagatgacctcaatcttcggaaagcacatattctatttacagaagaaaaggtgtctgaaagtttctgttttcacaacagaatcgctctacaatgcaccatgccagttctgctttttcacccaatgtcacaaagtattctgttgccacatccaagaaaggcccaagggaacacaggactctgaaagttaggcctgggggtggccactccctgggcacagctcatgtctatgcccttctctctgccctctgctcccccagccactggctattcctcaccctcctggtacctgagagggcgcacccctgagccctgggctctgcttggcatgcccctgaaccccgtttccttcacagactctctgggacttagctccttggacagcagcccctccacagtaactgtgtctgttttcgtttgctgctgagctcgtgcacagagatgatggctgatgcctccttctccctcagggtacgggtctggcacgtgtgggntcctggtaatgccagtaatggcctctgggtggagtagggtcacgtcactctgagagaattccccattgtgcctcacagactcacccctttctttcccctctcctgttttcatttccttcccctatattcagacagacattcataggatggacatagaaatacatcttaatgacagaaagtactttcaggtaactatgcactgtactcagctgttacaaaccagcaatagattttcaagtggttcatcataaaatcttaaagaaattgaacaagaacaaa

SEQ ID NO: 349478 - DNA, 6297 bp, Homo sapiens
  misc_feature (4348)..(4348): n is a, c, g, or t
  misc_feature (4925)..(4925): n is a, c, g, or t
  misc_feature (5463)..(5463): n is a, c, g, or t
  misc_feature (6018)..(6018): n is a, c, g, or t
gtccaaaccggaagaccgtgggtagctgcggcggggctgacccgtcccgagtgccaaagctggggttctacttgagatttccctcgtggtgccagggtccggcgagcatcacgccgaggcccattttccagacgaccacgacgaggccggggtcacgaactctggcgccccttaccagcttccagtctctcgaggtggccagtgtggtgcttggtccttgtttccaggatggacttccccagctccctccgccctgcattgtttctgaccggcccccttggtctgagcgacgtccctgacctctctttcatgtgcagctggcgagacgcactgactctgccagaggcccagccccagaactcagagaatggggcactgcatgtgaccaaggacctgctgtgggagccggcaacccctgggcctctccccatgctgcctcccctcatcgatccctgggaccctggcctgactgcccgggacctgcttttccgcggagggtaccggtatcggaagcggccccgagtcgtggctggcctgggttcctggaaggacaccccagttcgggcagctggtctaccctgctggaggcgcccaggacaggctgcatttccaagaggtcgttctgaccccaggtgacaatccccaattccttgggaaacctggacgcatccagctccagggacctgtccggcaagtggtgacatgcaccgtccagggagaaactctgctggccgtccgctctgactaccactgtgccgtgtggaagtttggtaaacagtggcagccaacccttctgcaggcaatgcaggtggagaaaggggccacggggatcagcctcagccctcacctgcccggggagctggccatctgcagccgctcgggagccgtctgcctgtggagccctgaggatgggtatcgccgcttcctgtgaaaccccccaccctaacgaactgaactccgccctgttgagcatgtcgcgacccttgagccccttccccatcagcctgtccccctgcccacggcttgcctgtctccccaaggctgcggcaaatctacagggaccctgagaccctcgtgttccgggactcctcttcgtggcgttgggcagacttcactgcgcaccctcgggtgctgaccgtgggtgaccgcaccggagtgaagatgctggacactcagggcccgccgggctgtggtctgttgctttttcgtttgggggcagaggcttcgtgccagaaaggggaacgtgtcctgcttacccagtacctggggcactccagccccaaatgcctcccccctactcttcatctcgtctgtacccagccccagttctctctctacctagtggacgagcgccttcccctggtgccgatgctgaagtggaaccatggcctcccctccccgctcctgctggcccgactgctgcctccgccccggcccagctgcgtgcagcccctgctcctcggaggccagggtgggcagctgcagctgctgcacctggcaggagaaggggcgtcggtgccccgcctggcaggccccccccagtctcttccttccaggatcgactccctccctgcatttcctctgctggagcctaagatccagtggcggctgcaggagcgcctgaaagcaccgaccataggtctggctgccgtcgtcccgcccttgccctcagcgcccacaccaggcctggtgctcttccagctctcggcggcgggagatgtcttctaccagcagctccgcccccaggtggactccagcctccgcagagatgctgggcctcctggcgacacccaacctgactgccatgcccccacagcttcctggacctcccaggacactgccggctgcagccagtggctgaaggccctgctaaaagtgcccctggctcctcctgtgtggacagcacccaccttcacccaccgccagatgctgggcagcacagagctgcggagggaggaagaggaagggcagcggctgggtgtgctccgcaaggccatggcccgagggcagctcctgctgcagagagacctgggctccctccctgcggcagagccaccccctgcacccgagtcaggcctagaggacaagctcagtgagcgcctgggggaagcctgggcaggccgaggggctgcctggtgggagaggcagcagggcaggacctcggagcccgggagacagaccaggcggcccaagcgccggacccagctgtccagcagcttttcgctcagtggccatgtggatccctcagaggacaccagctcccctcatagccctgagtggccacctgctgatgctctgcccctgccccccacgaccccgccctcccaggagttgactccggatgcatgcgcccagggcgtcccatcagagcagcggcagatgctccgtgactacatggccaagctaccaccccagagggacaccccaggctgtgccaccacacctccccactcccaggcctccagcgtccgggccactcgctcccagcagcacacacccgtcctctctagctctcagcccctccggaagaagcctcgaatgggcttctgaggacacaaggtgggctgccctcaagccccagagagcccctcatccttcctctgggaccagatgtgccttccacagttgaaacttgagaagcagagctcgccaccttctggaggccactgtgatgatgagccaagcaatttggagccaagttgaagggacagggcaacaaaatacagtagtagtttcttttgtattttgtatattcgcctgaagatcatcccgcaaggcaggctggaggtgccggtgggcctgtgttgctgggattttagtctgtgctgggaggcagggctccgctgcgcctcagctgtgggggcctcaggcaggtccctcagttctcacgccttcctgtccagtggaatgggggccaggagtgctggctcctcgtgtttggtgagggtggagtgaggcccctgcagagctgctgatgaggtgggcacagcggccgttggcagctgctgttgtgggttgctttgtcaatctctgccccggtctgatgtttcctacagggagatgccgtggatccaggttcagggactaaatacacttggcagctgaagatgaattggaatggtcacgttttttaggctggacagcgtcccgccacagctactacctgacactgagctcatgcagagagatgatggctgatgttccttctcccttgggacatgggtctggcacctgtgggctgtcgatagtgccctctgagcagagggtcacggtcatgtcagtttgggggaattctctgttgtgcctcacagactcccccctttctttcctccctccccttctcattttgatgtctaaagcatcaagtccctcttcctcggagtttctctagctgcagtggaagattctgttttcctgtggggaaaatgctcacttgagattttgcagggacccgggtctgtctggtttctgatgacatagtaagagaaaggtcttttttcaggttggctggtgaaaggaattgcatgtgactcacacaaacaggagctagcccaatcatacactgactcgcgtgggtgttaaaatgtttatcatgcctaagggagacatttataattaaaccatttatgctacatataactggggaaaactatgatgctttcggtgctgggaatgcagtgaggtcccacgtgggcagagcttggctgggctgggcaactccgacacacgtctctgggggtgtggcggcgctctcagtcggcactgtggaaggaagggtgacctgtgctttctccctgtcactgtgactgcaaggacaggggggcagccttggggttcagtccaggccaaattcagtgtcctcaactgggcgtggtggctcatacctgtaatcccagcactttgggaggccgaggcaaacagatcacctgaggtcaggagttcgagaccagcctggtcaacatggtgaaaccccatctctactaaaaatacaaagattagctgggcgtggtggcaggcccctataataccagctactggggaggctgaggcaggaaaatcccttgacgggtgcctgtaatcccagctacttcagaggcggaggcaggagaattgcttgaacctaggaggcagaggttgcagtgagccaagatcacatgactgcattccagcctaggccacagtgcgagactgtctcaaacaaaacaaacaaaaacaaattattcaacgtcctccaggcctgcccccgcccgaggctgcacgggctccagctcagactgcacttttctgtgctggttcctagagtggaagagaaggccactcagtgttcccgggaaatgcactcaggccnctccctgcttcctgcctgcaagtctggagtcagccaggcagctgtcttcaggaaaaagcctggccaccgatgcgtgctggatgagagtagcacggtctgggctccacacagcccccaatttgggagtgcacctgaaggcagatgctgaatgaaaaaacagtcccagcttgcttgttctcagcactaaccggctgctccccaaaaccgcatctgccaggcacatgtaccagcctgcagtatgaggggaggccccggtacattcagcatgtttttctgggtcttctgcagccaggcctctggctgccgtccctgcctggtgcccctttgcccctttgccttccctgccttgaaggccactaggactggcctgtgattcacccgggcctgggtcactgtgaagcagccacgcccttgtgtggctgtcacctcgcttgccccacactccccagcagtggtgttggtggtcccctccaaaagccctggtctagaaaggctgaggccagggatggtgaggagggggtggaaatgcacggtcattaggcccccgccccaggagatctgcatgaccacagggggnttgtgacccccacacacagtcagactcggctgcccaagaggaggctggctcggtggcttcctggcccaggctggctaccagcaagtggcagcttcagacccgtgaactcaggaatgggaccttcagaggatctgtgtggtctgtcctgggtgacccctccagcaacatgaaagctcagggtaaggctgagtgactgccctgccccacccatcccaggccggggagccaacattgtctccactgtgctctcggccccacgctcttacccggagaagaggctgcaaggaagtcgctgtccctgtctccactggaagtgagtggtgcagcatctctttggcaggtggggggcatcagtagctggccagaggggtcctcgtcgctgagctcctggatcaggggtcttggggacttggtgtcttgttttcggatttccaagtccctcttagcttcttttttaaagatgtctgtgaagggcacccgagccgcctttgaggtgtctttagagactgcaaatatatttgacagagtgtctgtgggnaggttttccagcacagggagtgacgtgtagtccagttcagggtcactgtcatcactcaagctcgagatgacctcaatcttcggaaagcacatattctatttacagaagaaaaggtgtctgaaagtttctgttttcacaacagaatcgctctacaatgcaccatgccagttctgctttttcacccaatgtcacaaagtattctgttgccacatccaagaaaggcccaagggaacacaggactctgaaagttaggcctgggggtggccactccctgggcacagctcatgtctatgcccttctctctgccctctgctcccccagccactggctattcctcaccctcctggtacctgagagggcgcacccctgagccctgggctctgcttggcatgcccctgaaccccgtttccttcacagactctctgggacttagctccttggacagcagcccctccacagtaactgtgtctgttttcgtttgctgctgagctcgtgcacagagatgatggctgatgcctccttctccctcagggtacgggtctggcacgtgtgggntcctggtaatgccagtaatggcctctgggtggagtagggtcacgtcactctgagagaattccccattgtgcctcacagactcacccctttctttcccctctcctgttttcatttccttcccctatattcagacagacattcataggatggacatagaaatacatcttaatgacagaaagtactttcaggtaactatgcactgtactcagctgttacaaaccagcaatagattttcaagtggttcatcataaaatcttaaagaaattgaacaagaacaaa

SEQ ID NO: 349479 - DNA, 5109 bp, Homo sapiens
  misc_feature (3160)..(3160): n is a, c, g, or t
  misc_feature (3737)..(3737): n is a, c, g, or t
  misc_feature (4275)..(4275): n is a, c, g, or t
  misc_feature (4830)..(4830): n is a, c, g, or t
ggcacgtggaggctgatgggagatgctgctgcccctcagggctctgcactcacctggagagccacatggggcctggagggccactacacagctcagctcccaagttcggccacatcccccttccttctcgggccccagttctctctctacctagtggacgagcgccttcccctggtgccgatgctgaagtggaaccatggcctcccctccccgctcctgctggcccgactgctgcctccgccccggcccagctgcgtgcagcccctgctcctcggaggccagggtgggcagctgcagctgctgcacctggcaggagaaggggcgtcggtgccccgcctggcaggccccccccagtctcttccttccaggatcgactccctccctgcatttcctctgctggagcctaagatccagtggcggctgcaggagcgcctgaaagcaccgaccataggtctggctgccgtcgtcccgcccttgccctcagcgcccacaccaggcctggtgctcttccagctctcggcggcgggagatgtcttctaccagcagctccgcccccaggtggactccagcctccgcagagatgctgggcctcctggcgacacccaacctgactgccatgcccccacagcttcctggacctcccaggacactgccggctgcagccagtggctgaaggccctgctaaaagtgcccctggctcctcctgtgtggacagcacccaccttcacccaccgccagatgctgggcagcacagagctgcggagggaggaagaggaagggcagcggctgggtgtgctccgcaaggccatggcccgagggcagctcctgctgcagagagacctgggctccctccctgcggcagagccaccccctgcacccgagtcaggcctagaggacaagctcagtgagcgcctgggggaagcctgggcaggccgaggggctgcctggtgggagaggcagcagggcaggacctcggagcccgggagacagaccaggcggcccaagcgccggacccagctgtccagcagcttttcgctcagtggccatgtggatccctcagaggacaccagctcccctcatagccctgagtggccacctgctgatgctctgcccctgccccccacgaccccgccctcccaggagttgactccggatgcatgcgcccagggcgtcccatcagagcagcggcagatgctccgtgactacatggccaagctaccaccccagagggacaccccaggctgtgccaccacacctccccactcccaggcctccagcgtccgggccactcgctcccagcagcacacacccgtcctctctagctctcagcccctccggaagaagcctcgaatgggcttctgaggacacaaggtgggctgccctcaagccccagagagcccctcatccttcctctgggaccagatgtgccttccacagttgaaacttgagaagcagagctcgccaccttctggaggccactgtgatgatgagccaagcaatttggagccaagttgaagggacagggcaacaaaatacagtagtagtttcttttgtattttgtatattcgcctgaagatcatcccgcaaggcaggctggaggtgccggtgggcctgtgttgctgggattttagtctgtgctgggaggcagggctccgctgcgcctcagctgtgggggcctcaggcaggtccctcagttctcacgccttcctgtccagtggaatgggggccaggagtgctggctcctcgtgtttggtgagggtggagtgaggcccctgcagagctgctgatgaggtgggcacagcggccgttggcagctgctgttgtgggttgctttgtcaatctctgccccggtctgatgtttcctacagggagatgccgtggatccaggttcagggactaaatacacttggcagctgaagatgaattggaatggtcacgttttttaggctggacagcgtcccgccacagctactacctgacactgagctcatgcagagagatgatggctgatgttccttctcccttgggacatgggtctggcacctgtgggctgtcgatagtgccctctgagcagagggtcacggtcatgtcagtttgggggaattctctgttgtgcctcacagactcccccctttctttcctccctccccttctcattttgatgtctaaagcatcaagtccctcttcctcggagtttctctagctgcagtggaagattctgttttcctgtggggaaaatgctcacttgagattttgcagggacccgggtctgtctggtttctgatgacatagtaagagaaaggtcttttttcaggttggctggtgaaaggaattgcatgtgactcacacaaacaggagctagcccaatcatacactgactcgcgtgggtgttaaaatgtttatcatgcctaagggagacatttataattaaaccatttatgctacatataactggggaaaactatgatgctttcggtgctgggaatgcagtgaggtcccacgtgggcagagcttggctgggctgggcaactccgacacacgtctctgggggtgtggcggcgctctcagtcggcactgtggaaggaagggtgacctgtgctttctccctgtcactgtgactgcaaggacaggggggcagccttggggttcagtccaggccaaattcagtgtcctcaactgggcgtggtggctcatacctgtaatcccagcactttgggaggccgaggcaaacagatcacctgaggtcaggagttcgagaccagcctggtcaacatggtgaaaccccatctctactaaaaatacaaagattagctgggcgtggtggcaggcccctataataccagctactggggaggctgaggcaggaaaatcccttgacgggtgcctgtaatcccagctacttcagaggcggaggcaggagaattgcttgaacctaggaggcagaggttgcagtgagccaagatcacatgactgcattccagcctaggccacagtgcgagactgtctcaaacaaaacaaacaaaaacaaattattcaacgtcctccaggcctgcccccgcccgaggctgcacgggctccagctcagactgcacttttctgtgctggttcctagagtggaagagaaggccactcagtgttcccgggaaatgcactcaggccnctccctgcttcctgcctgcaagtctggagtcagccaggcagctgtcttcaggaaaaagcctggccaccgatgcgtgctggatgagagtagcacggtctgggctccacacagcccccaatttgggagtgcacctgaaggcagatgctgaatgaaaaaacagtcccagcttgcttgttctcagcactaaccggctgctccccaaaaccgcatctgccaggcacatgtaccagcctgcagtatgaggggaggccccggtacattcagcatgtttttctgggtcttctgcagccaggcctctggctgccgtccctgcctggtgcccctttgcccctttgccttccctgccttgaaggccactaggactggcctgtgattcacccgggcctgggtcactgtgaagcagccacgcccttgtgtggctgtcacctcgcttgccccacactccccagcagtggtgttggtggtcccctccaaaagccctggtctagaaaggctgaggccagggatggtgaggagggggtggaaatgcacggtcattaggcccccgccccaggagatctgcatgaccacagggggnttgtgacccccacacacagtcagactcggctgcccaagaggaggctggctcggtggcttcctggcccaggctggctaccagcaagtggcagcttcagacccgtgaactcaggaatgggaccttcagaggatctgtgtggtctgtcctgggtgacccctccagcaacatgaaagctcagggtaaggctgagtgactgccctgccccacccatcccaggccggggagccaacattgtctccactgtgctctcggccccacgctcttacccggagaagaggctgcaaggaagtcgctgtccctgtctccactggaagtgagtggtgcagcatctctttggcaggtggggggcatcagtagctggccagaggggtcctcgtcgctgagctcctggatcaggggtcttggggacttggtgtcttgttttcggatttccaagtccctcttagcttcttttttaaagatgtctgtgaagggcacccgagccgcctttgaggtgtctttagagactgcaaatatatttgacagagtgtctgtgggnaggttttccagcacagggagtgacgtgtagtccagttcagggtcactgtcatcactcaagctcgagatgacctcaatcttcggaaagcacatattctatttacagaagaaaaggtgtctgaaagtttctgttttcacaacagaatcgctctacaatgcaccatgccagttctgctttttcacccaatgtcacaaagtattctgttgccacatccaagaaaggcccaagggaacacaggactctgaaagttaggcctgggggtggccactccctgggcacagctcatgtctatgcccttctctctgccctctgctcccccagccactggctattcctcaccctcctggtacctgagagggcgcacccctgagccctgggctctgcttggcatgcccctgaaccccgtttccttcacagactctctgggacttagctccttggacagcagcccctccacagtaactgtgtctgttttcgtttgctgctgagctcgtgcacagagatgatggctgatgcctccttctccctcagggtacgggtctggcacgtgtgggntcctggtaatgccagtaatggcctctgggtggagtagggtcacgtcactctgagagaattccccattgtgcctcacagactcacccctttctttcccctctcctgttttcatttccttcccctatattcagacagacattcataggatggacatagaaatacatcttaatgacagaaagtactttcaggtaactatgcactgtactcagctgttacaaaccagcaatagattttcaagtggttcatcataaaatcttaaagaaattgaacaagaacaaa

SEQ ID NO: 349480 - DNA, 3755 bp, Homo sapiens
  misc_feature (3702)..(3702): n is a, c, g, or t
gtccaaaccggaagaccgtgggtagctgcggcggggctgacccgtcccgagtgccaaagctggggttctacttgagatttccctcgtggtgccagggtccggcgagcatcacgccgaggcccattttccagacgaccacgacgaggccggggtcacctggcgagacgcactgactctgccagaggcccagccccagaactcagagaatggggcactgcatgtgaccaaggacctgctgtgggagccggcaacccctgggcctctccccatgctgcctcccctcatcgatccctgggaccctggcctgactgcccgggacctgcttttccgcggagggtaccggtatcggaagcggccccgagtcgtgctggatgtgactgagcagatcagccggttcctcttggatcatggagacgtagcctttgcgcccctggggaagctgatgctggagaatttcaagctggagggagcggggagccgcactaagaagaagacagtggtcagtgtgaagaagctgctccaggacctcggtggacaccagccctgggggtgtccctgggcttacctcagcaaccgacagcgccgcttctctatcctcgggggccccatcctgggcacgtcggtggcgagccacttggcagagctgctgcacgaggagctggtgctgcggtgggagcagctgcttctggatgaggcctgcactgggggcgcgctggcctgggttcctggaaggacaccccagttcgggcagctggtctaccctgctggaggcgcccaggacaggctgcatttccaagaggtcgttctgaccccaggtgacaatccccaattccttgggaaacctggacgcatccagctccagggacctgtccggcaagtggtgacatgcaccgtccagggagaaactctgctggccgtccgctctgactaccactgtgccgtgtggaagtttggtaaacagtggcagccaacccttctgcaggcaatgcaggtggagaaaggggccacggggatcagcctcagccctcacctgcccggggagctggccatctgcagccgctcgggagccgtctgcctgtggagccctgaggatgggctgcggcaaatctacagggaccctgagaccctcgtgttccgggactcctcttcgtggcgttgggcagacttcactgcgcaccctcgggtgctgaccgtgggtgaccgcaccggagtgaagatgctggacactcagggcccgccgggctgtggtctgttgctttttcgtttgggggcagaggcttcgtgccagaaaggggaacgtgtcctgcttacccagtacctggggcactccagccccaaatgcctcccccctactcttcatctcgtctgtacccagccccagttctctctctacctagtggacgagcgccttcccctggtgccgatgctgaagtggaaccatggcctcccctccccgctcctgctggcccgactgctgcctccgccccggcccagctgcgtgcagcccctgctcctcggaggccagggtgggcagctgcagctgctgcacctggcaggagaaggggcgtcggtgccccgcctggcaggccccccccagtctcttccttccaggatcgactccctccctgcatttcctctgctggagcctaagatccagtggcggctgcaggagcgcctgaaagcaccgaccataggtctggctgccgtcgtcccgcccttgccctcagcgcccacaccaggcctggtgctcttccagctctcggcggcgggagatgtcttctaccagcagctccgcccccaggtggactccagcctccgcagagatgctgggcctcctggcgacacccaacctgactgccatgcccccacagcttcctggacctcccaggacactgccggctgcagccagtggctgaaggccctgctaaaagtgcccctggctcctcctgtgtggacagcacccaccttcacccaccgccagatgctgggcagcacagagctgcggagggaggaagaggaagggcagcggctgggtgtgctccgcaaggccatggcccgagggcagctcctgctgcagagagacctgggctccctccctgcggcagagccaccccctgcacccgagtcaggcctagaggacaagctcagtgagcgcctgggggaagcctgggcaggccgaggggctgcctggtgggagaggcagcagggcaggacctcggagcccgggagacagaccaggcggcccaagcgccggacccagctgtccagcagcttttcgctcagtggccatgtggatccctcagaggacaccagctcccctcatagccctgagtggccacctgctgatgctctgcccctgccccccacgaccccgccctcccaggagttgactccggatgcatgcgcccagggcgtcccatcagagcagcggcagatgctccgtgactacatggccaagctaccaccccagagggacaccccaggctgtgccaccacacctccccactcccaggcctccagcgtccgggccactcgctcccagcagcacacacccgtcctctctagctctcagcccctccggaagaagcctcgaatgggcttctgaggacacaaggtgggctgccctcaagccccagagagcccctcatccttcctctgggaccagatgtgccttccacagttgaaacttgagaagcagagctcgccaccttctggaggccactgtgatgatgagccaagcaatttggagccaagttgaagggacagggcaacaaaatacagtagtagtttcttttgtattttgtatattcgcctgaagatcatcccgcaaggcaggctggaggtgccggtgggcctgtgttgctgggattttagtctgtgctgggaggcagggctccgctgcgcctcagctgtgggggcctcaggcaggtccctcagttctcacgccttcctgtccagtggaatgggggccaggagtgctggctcctcgtgtttggtgagggtggagtgaggcccctgcagagctgctgatgaggtgggcacagcggccgttggcagctgctgttgtgggttgctttgtcaatctctgccccggtctgatgtttcctacagggagatgccgtggatccaggttcagggactaaatacacttggcagctgaagatgaattggaatggtcacgttttttaggctggacagcgtcccgccacagctactacctgacactgagctcatgcagagagatgatggctgatgttccttctcccttgggacatgggtctggcacctgtgggctgtcgatagtgccctctgagcagagggtcacggtcatgtcagtttgggggaattctctgttgtgcctcacagactcccccctttctttcctccctccccttctcattttgatgtctaaagcatcaagtccctcttcctcggagtttctctagctgcagtggaagattctgttttcctgtggggaaaatgctcacttgagattttgcagggacccgggtctgtctggtttctgatgacatagtaagagaaaggtcttttttcaggttggctggtgaaaggaattgcatgtgactcacacaaacaggagctagcccaatcatacactgactcgcgtgggtgttaaaatgtttatcatgcctaagggagacatttataattaaaccatttatgctacataaaaaaaaaaantcgacgcgggccgcgaatttagtattagtaggcggccgctctaaaagaaccaa

SEQ ID NO: 349481 - DNA, 1885 bp, Homo sapiens
gtccaaaccggaagaccgtgggtagctgcggcggggctgacccgtcccgagtgccaaagctggggttctacttgagatttccctcgtggtgccagggtccggcgagcatcacgccgaggcccattttccagacgaccacgacgaggccggggtcacctggcgagacgcactgactctgccagaggcccagccccagaactcagagaatggggcactgcatgtgaccaaggacctgctgtgggagccggcaacccctgggcctctccccatgctgcctcccctcatcgatccctgggaccctggcctgactgcccgggacctgcttttccgcggagggtaccggtatcggaagcggccccgagtcgtgctggatgtgactgagcagatcagccggttcctcttggatcatggagacgtagcctttgcgcccctggggaagctgatgctggagaatttcaagctggagggagcggggagccgcactaagaagaagacagtggtcagtgtgaagaagctgctccaggacctcggtggacaccagccctgggggtgtccctgggcttacctcagcaaccgacagcgccgcttctctatcctcgggggccccatcctgggcacgtcggtggcgagccacttggcagagctgctgcacgaggagctggtgctgcggtgggagcagctgcttctggatgaggcctgcactgggggcgcgctggcctgggttcctggaaggacaccccagttcgggcagctggtctaccctgctggaggcgcccaggacaggctgcatttccaagaggtcgttctgaccccaggtgacaatccccaattccttgggaaacctggacgcatccagctccagggacctgtccggcaagtggtgacatgcaccgtccagggagaaactctgctggccgtccgctctgactaccactgtgccgtgtggaagtttggtaaacagtggcagccaacccttctgcaggcaatgcaggtggagaaaggggccacggggatcagcctcagccctcacctgcccggggagctggccatctgcagccgctcgggagccgtctgcctgtggagccctgaggatgggctgcggcaaatctacagggaccctgagaccctcgtgttccgggactcctcttcgtggcgttgggcagacttcactgcgcaccctcgggtgctgaccgtgggtgaccgcaccggagtgaagatgctggacactcagggcccgccgggctgtggtctgttgctttttcgtttgggggcagaggcttcgtgccagaaaggggaacgtgtcctgcttacccagtacctggggcactccagccccaaatgcctcccccctactcttcatctcgtctgtacccaggtgagtggcacacaacaccgccccgccccacctctgctctgtctcagatggtcactagaggctgctgcttaccagcggctctgctgggcccagacaaccacccagcaaaccaaactcaaccctggatgaatctgtggcccaaacacgcagtggatcccacagtcggtgctaacaggcaggtggggaagctctcccagggcctccccttagtagagcttcgaggtgcagccaggggtggagcaggggaggaggggcctcggggtggggcttccgtgcagagctggagagtttctgctgtgcaggaggcgggggctctgaggaagcaggtctgtcctccacccgccctcccggggacattcgtaggcgtgcctcgagcacaggctcccgggtcaggagagtgggggtggctgcgagaaggccaggcaggtttctgctggcaaggctcccccacacctcttctgagcacccctttcccacttgttctgtctgtccaccggactgtcggtcaga

SEQ ID NO: 349482 - DNA, 1260 bp, Homo sapiens
gtccaaaccggaagaccgtgggtagctgcggcggggctgacccgtcccgagtgccaaagctggggttctacttgagatttccctcgtggtgccagggtccggcgagcatcacgccgaggcccattttccagacgaccacgacgaggccggggtcacctggcgagacgcactgactctgccagaggcccagccccagaactcagagaatggggcactgcatgtgaccaaggacctgctgtgggagccggcaacccctgggcctctccccatgctgcctcccctcatcgatccctgggaccctggcctgactgcccgggacctgcttttccgcggagggtaccggtatcggaagcggccccgagtcgtgctggatgtgactgagcagatcagccggttcctcttggatcatggagacgtagcctttgcgcccctggggaagctgatgctggagaatttcaagctggagggagcggggagccgcactaagaagaagacagtggtcagtgtgaagaagctgctccaggacctcggtggacaccagccctgggggtgtccctgggcttacctcagcaaccgacagcgccgcttctctatcctcgggggccccatcctgggcacgtcggtggcgagccacttggcagagctgctgcacgaggagctggtgctgcggtgggagcagctgcttctggatgaggcctgcactgggggcgcgctggcctgggttcctggaaggacaccccagttcgggcagctggtctaccctgctggaggcgcccaggacaggctgcatttccaagaggtcgttctgaccccaggtgacaatccccaattccttgggaaacctggacgcatccagctccagggacctgtccggcaagtggtgacatgcaccgtccagggagaaactctgctggccgtccgctctgactaccactgtgccgtgtggaagtttggtaaacagtggcagccaacccttctgcaggcaatgcaggtggagaaaggggccacggggatcagcctcagccctcacctgcccggggagctggccatctgcagccgctcgggagccgtctgcctgtggagccctgaggatgggctgcggcaaatctacagggaccctgagaccctcgtgttccgggactcctcttcgtggcgttgggcagacttcactgcgcaccctcgggtgctgaccgtgggtgaccgcaccggagtgaagatgctggacactcaggtacgggctggcggcagaggacccacccc

SEQ ID NO: 349483 - DNA, 433 bp, Homo sapiens
tctttcaaattccattcaggctacaactgacgaggaaggttctgtttctaatatagccacagaaataaaggatggagaaaaatctgggacagtgtcttctcagaaaaaaccagccttgaaggccacaagtgatgagaaagattctttttcgaatataaccagagaaaaaaaggatggagaaatatctaggacaggtatcagcaaacaggtgtccaaggtgatcaattcaggactcttccactgaagagatgtgaagttgtcttctcagaaaccaccagccttgaaggctacaagtgtcaaggaagattctgttttgaatatagccagagaaaaaaaggatggagaaaaatctaggacagtgtcttttgagcaaccaccaggcttgaaggctacaagagacgagaaagattctcttttgaatatagccagagga

SEQ ID NO: 349484 - DNA, 1070 bp, Homo sapiens
  misc_feature (9)..(9): n is a, c, g, or t
  misc_feature (17)..(17): n is a, c, g, or t
ctttatttnccttgttnctatttttctgaagatcatctgaaaaaataacattattagtcatctctcataattaaacctcaaacagtctcagaggacggtgactcgctttgctgtaattgtaagaatgtcatattactcattgatcaacatgaaatgaagtgtaaagattgtgttcacctattgaaaattaaaaatacattttgtttatggaaaagattaataaaacttaaagataaccactgtgagcaacttagagtaaaaattcgaaaactgaaaaataaggctagtgtactacaaaagagaatatctgaaaaagaagaaataaaatcgcagttaaagcatgaaatacttgaattggaaaaagaactctgtagtttgagatttgccatacagcaagaaaaaaagaaaagaagaaatgttgaagaggtgcaccaaaaagttagggaaaagttaagaataacagaagagcaatataggatagaagctgatgtgacaaaaccaattaaaccggctctcaaatcagcagaggtggaattgaagacaggaggaaataattcaaatcaggtttctgaaactgatgaaaaagaagacctgctgcatgaaaaccgcttgatgcaagatgaaattgccaggctcaggctggaaaaagacacaataaaaaaccaaaacctggaaaagaaatacttaaaagactttgaaattgtgaaaagaaagcatgaagaccttcaaaaggctctaaaacggaatggggaaacattagcaaaaacgatagcctgttatagtggacagcttgctgctctgacagatgaaaacacaacgctccgttccaaactggagaagcaaagagagagcaggcaaagactggaaacagaaatgcaatcataccattgtagactgaatgctgctcgatgtgatcatgatcaaagtcactcatcaaaaagagaccaagagcttgctttccagggcacagtagataaatgtcgtcacttacaggaaaatttgaattctcatgttctgattctttctctgcaactttctaaagctgagagtaagtccagagtcctcaaaac

SEQ ID NO: 349485 - DNA, 953 bp, Homo sapiens
gccacaagtgatgaggaaagattctttttcgaatataaccagagaaaaaaaggatggagaaatatctaggacagtgtcttctcagaaaccaccagccttgaaggctgcaagtgacaagacagattctgctttgaatacagctacagaaataaaggatggactacaatgtgggacagtgtcttctcagaaacaacaagccttgaaggctacaactgacgaggaaggttctgtttctaatatagccacagaaataaaggatggagaaaaatctgggacagtgtcttctcagaaaaaaccagccttgaaggctacaagtgacaagaaagattctgttccgaatatggccacagaaacaaaggatgaacaaatatctgggacagtgtcttctcagaaacaaccagccttgaaggctacaagtgacaagaaagattctgtttcgaatatacccacagaaataaaggatggacaacaatctggaacagtgtcttctcagaaacaaccggcctggaaggctacaagtgtcaagaaagattctgtttcgaatatagccacagaaataaaggatggacaaatacgtgggacagtgtcttctcagagacgaccagccttgaagactacaggtgatgagaaagattctgtttcgaatatagccagagaaataaaggatggagaaaaatctgggacagtgtctcctcagaaacaatcggcccagaaggttatatttaaaaagaaagtttctcttttgaatattgccacaagaataacgggcggtgggaaatctggaacagagtatcctgagaatctgcgcaccttgaaggctacaattgaaaataaagattctgtgactcaccggggcttccaccatgttgggcttgctgttcctcagtgtctttactgcatggaaaacatcgacaacattttgccgtttcaccatttcaacaacgatgcctata

SEQ ID NO: 349486 - DNA, 1160 bp, Homo sapiens
tttttttttacaggacctatctgagtttataactgtcacctttttatcttggttcttcactatactttaagctaaaacaatagcagaggtgttgtcttatctgcagaccttactataatatcttccaccttgtaggcactcaatatgtacatacttgttcaacgtatgaatgaatacatgttaaaaatgcacagtcctttatatccaaaaatctactcatgtattttatctctactttgttttttcctggttacagattgtgttcacctattgaaaattaaaaatacattttgtttatggaaaagattaataaaacttaaagataaccactgtgagcaacttagagtaaaaattcgaaaactgaaaaataaggctagtgtactacaaaagagaatatctgaaaaagaagaaataaaatcgcagttaaagcatgaaatacttgaattggaaaaagaactctgtagtttgagatttgccatacagcaagaaaaaaagaaaagaagaaatgttgaagaggtgcaccaaaaagttagggaaaagttaagaataacagaagagcaatataggatagaagctgatgtgacaaaaccaattaaaccggctctcaaatcagcagaggtggaattgaagacaggaggaaataattcaaatcaggtttctgaaactgatgaaaaagaagacctgctgcatgaaaaccgcttgatgcaagatgaaattgccaggctcaggctggaaaaagacacaataaaaaaccaaaacctggaaaagaaatacttaaaagactttgaaattgtgaaaagaaagcatgaagaccttcaaaaggctctaaaacggaatggggaaacattagcaaaaacgatagcctgttatagtggacagcttgctgctctgacagatgaaaacacaacgctccgttccaaactggagaagcaaagagagagcaggcaaagactggaaacagaaatgcaatcataccattgtagactgaatgctgctcgatgtgatcatgatcaaagtcactcatcaaaaagagaccaagagcttgctttccagggcacagtagataaatgtcgtcacttacaggaaaatttgaattctcatgttctgattctttctctgcaactttctaaagctgagagtaagtccagagtcctcaaaac

SEQ ID NO: 349487 - DNA, 1908 bp, Homo sapiens
gccacaagtgatgaggaaagattctttttcgaatataaccagagaaaaaaaggatggagaaatatctaggacagtgtcttctcagaaaccaccagccttgaaggctgcaagtgacaagacagattctgctttgaatacagctacagaaataaaggatggactacaatgtgggacagtgtcttctcagaaacaacaagccttgaaggctacaactgacgaggaaggttctgtttctaatatagccacagaaataaaggatggagaaaaatctgggacagtgtcttctcagaaaaaaccagccttgaaggctacaagtgacaagaaagattctgttccgaatatggccacagaaacaaaggatgaacaaatatctgggacagtgtcttctcagaaacaaccagccttgaaggctacaagtgacaagaaagattctgtttcgaatatacccacagaaataaaggatggacaacaatctggaacagtgtcttctcagaaacaaccggcctggaaggctacaagtgtcaagaaagattctgtttcgaatatagccacagaaataaaggatggacaaatacgtgggacagtgtctcctcagaaacaatcggcccagaaggttatatttaaaaagaaagtttctcttttgaatattgccacaagaataacgggcggtgggaaatctggaacagagtatcctgagaatctgcccaccttgaaggctacaattgaaaataaaaattctgttctgaatacagccaccaaaatgaaggatgtacaaacatccacaccagcagaacaagacttagaaatggcatcagagggagagcaaaagaggcttgaagaatatgaaaataaccagccacaggtgaaaaaccaaatacattctagggatgaccttgatgacataattcagtcatctcaaacagtctcagaggacggtgactcgctttgctgtaattgtaagaatgtcatattactcattgatcaacatgaaatgaagtgtaaagattgtgttcacctattgaaaattaaaaatacattttgtttatggaaaagattaataaaacttaaagataaccactgtgagcaacttagagtaaaaattcgaaaactgaaaaataaggctagtgtactacaaaagagaatatctgaaaaagaagaaataaaatcgcagttaaagcatgaaatacttgaattggaaaaagaactctgtagtttgagatttgccatacagcaagaaaaaaagaaaagaagaaatgttgaagaggtgcaccaaaaagttagggaaaagttaagaataacagaagagcaatataggatagaagctgatgtgacaaaaccaattaaaccggctctcaaatcagcagaggtggaattgaagacaggaggaaataattcaaatcaggtttctgaaactgatgaaaaagaagacctgctgcatgaaaaccgcttgatgcaagatgaaattgccaggctcaggctggaaaaagacacaataaaaaaccaaaacctggaaaagaaatacttaaaagactttgaaattgtgaaaagaaagcatgaagaccttcaaaaggctctaaaacggaatggggaaacattagcaaaaacgatagcctgttatagtggacagcttgctgctctgacagatgaaaacacaacgctccgttccaaactggagaagcaaagagagagcaggcaaagactggaaacagaaatgcaatcataccattgtagactgaatgctgctcgatgtgatcatgatcaaagtcactcatcaaaaagagaccaagagcttgctttccagggcacagtagataaatgtcgtcacttacaggaaaatttgaattctcatgttctgattctttctctgcaactttctaaagctgagagtaagtccagagtcctcaaaac

SEQ ID NO: 349488 - DNA, 1679 bp, Homo sapiens
gccacaagtgatgaggaaagattctttttcgaatataaccagagaaaaaaaggatggagaaatatctaggacagtgtcttctcagaaaccaccagccttgaaggctgcaagtgacaagacagattctgctttgaatacagctacagaaataaaggatggactacaatgtgggacagtgtcttctcagaaacaacaagccttgaaggctacaactgacgaggaaggttctgtttctaatatagccacagaaataaaggatggagaaaaatctgggacagtgtcttctcagaaaaaaccagccttgaaggctacaagtgacaagaaagattctgttccgaatatggccacagaaacaaaggatgaacaaatatctgggacagtgtcttctcagaaacaaccagccttgaaggctacaagtgacaagaaagattctgtttcgaatatacccacagaaataaaggatggacaacaatctggaacagtgtcttctcagaaacaaccggcctggaaggctacaagtgtcaagaaagattctgtttcgaatatagccacagaaataaaggatggacaaatacgtgggacagtgtctcctcagaaacaatcggcccagaaggttatatttaaaaagaaagtttctcttttgaatattgccacaagaataacgggcggtgggaaatctggaacagagtatcctgagaatctgcccaccttgaaggctacaattgaaaataaaaattctgttctgaatacagccaccaaaatgaaggatgtacaaacatccacaccagcagaacaagacttagaaatggcatcagagggagagcaaaagaggcttgaagaatatgaaaataaccagccacaggtgaaaaaccaaatacattctagggatgaccttgatgacataattcagtcatctcaaacagtctcagaggacggtgactcgctttgctgtaattgtaagaatgtcatattactcattgatcaacatgaaatgaagtgtaaagattgtgttcacctattgaaaattaaaaatacattttgtttatggaaaagattaataaaacttaaagataaccactgtgagcaacttagagtaaaaattcgaaaactgaaaaataaggctagtgtactacaaaagagaatatctgaaaaagaagaaataaaatcgcagttaaagcatgaaatacttgaattggaaaaagaactctgtagtttgaggtatgacctagttttaaataaatgtttgaactgtttgttttatattaaagacgtataaggagaagttttgtaattgcgaactttccttctaggatttaacagggaagaaagcttcttaatcttatggagtgtgaaattattggatataatatcacaagttcttaattgtgaatacttctctaataattaaatgcatattcttttaaatcatagttttaatggctgtatagaattttaccttttggaaatctcattatttaattgatgaattgaatttcaggttttaaaaagtttttgtaataatgctacaaggaacatcttttatatacacatagttttctacatttctaattatttacattggataaattcttctggttaaagtatagaaacttttttagatctgttttagatctgtgatcaatatttctaaattgttcttaaggatgttcatattaatt

SEQ ID NO: 349489 - DNA, 483 bp, Homo sapiens
aggtaggatttgaatctagacctctgagactcatcagtgctttttccattaaaccatcttcagcaggcagctttccataaaccttcctgcccttgccccatggcacacacacatacttggaaaaatatctcctctaactaggcatttataaccattcattcaaccttatggataaaaacatacctttgtttcttatttattgcagcactcatggttcactctctggtctaggactgatgggaataaaagaggaagaagaaagcgctggcccaggcctgtgttcgtgagtcggcctgccatgtttccatgtgccatttcttaccccttgtaggcaatggcaaagaatgtggtcaggctgtagcctccccaaccagcagacagttttatggaaacttggtatagcagctaaaagagtttagtttgtttatatggcatgtataagttttcaataaatgcctaaagttcaagcataaaaaaaaaaag

SEQ ID NO: 349490 - DNA, 2771 bp, Homo sapiens
agcgggccggaagtcgctcgacttctacttccggtccgttcaaaaagcccgcgaggctgaggggcggttgttgttggcagctgtggctaaggaggggagaacctctgctccccgcccgtcttctcttctgcgtttcccgggctagggggcgtggggagtggttttaggcggcgaagccgctcggcagcaccttccttctttgccaggcagacgcccgttgtagccgttggggaaccgttgagaatccgccatggagccagagagggaagggaccgagagacaccccaggaaggtcagggaaagcaggcaggccccaaataagctggtcggggcagctgaggcgatgaaagccggttgggatctcgaggagagtcagcccgaggccaagaaagcccgcttatctaccattttatttactgacaactgtgaagtaacccatgaccagctgtgtgaattgctgaagtatgcagttctgggcaaatccaatgttccaaaacccagctggtgccagctttttcatcaaaaccacctaaacaacgtagtggtttttgttctgcagggaatgagtcagctacacttttacaggttctatttggagtttggatgtcttcgaaaagcattcagacataaattccgcttgcctccaccatcatctgattttctagctgatgttgttgggctacaaactgaacaaagagctggagatctgcccaagacaatggaagggcctttaccttctaatgcaaaagccgccatcaaccttcaggatgatcccatcattcaaaagtatggctctaagaaagtgggcttgaccagatgccttctgacaaaggaggaaatgagaacgtttcactttccattacaaggttttcctgattgtgaaaactttttacttaccaaatgtaatggttctatagcagacaatagtcctctctttggacttgactgtgaaatgtgcctcacatccaaggggagagagctaacacgcatctcactggttgctgaaggaggctgctgtgttatggatgaactggtcaaacctgaaaacaagattctggactacctcaccagcttttcgggaatcacgaagaagattcttaacccagtgacgaccaaactcaaagatgtacagaggcagttaaaagcactgcttcctcctgatgctgtgttagtgggccactccttagatttggatctcagagcactgaaaatgatacatccatatgttattgatacatcgttgctttatgtcagagagcagggcagaagatttaagctcaagttcttagccaaagttattttggggaaggatatacagtgtccagacagacttggtcatgatgccacagaagatgctagaacaatccttgaattggctcggtatttccttaagcatggcccaaaaaagattgcagaactaaatctagaagcactagctaatcaccaagaaatacaagcagcaggccaagagcctaaaaacacagcagaagtacttcagcacccaaacacaagtgttttagaatgcttggattcagtgggtcagaagcttctttttttgacccgggagacagatgctggtgaacttccatcttccagaaattgtcaaactattaagtgtctttcaaataaagaggttcttgagcaggccagagtggaaatccccctgtttcccttcagcattgttcagttctcttttaaggccttttcacctgtcctcactgaggagatgaacaaaaggatgaggatcaagtggacagagatatcaactgtctatgctgggccatttagcaaaaattgcaatctcagggctctgaagaggctgtttaaaagctttggcccagtccagtcaatgacttttgttcttgaaacccgtcagcctcatctctgtatacagtatgaagtcctagaagctgcccagctggccatagagtccttggatggtattctggtagatggtatctgcatcaaggtgcagaggcctgtgacagagctcacgcttgattgtgacaccctcgtgaatgagctggaaggagattctgaaaaccaaggctctatatatctgtctggagtgagtgaaaccttcaaagaacagctattgcaggagccccgcctctttcttggcctggaagctgtgatcttgcctaaagatcttaaaagtggaaagcagaaaaaatactgtttcctgaaattcaaaagttttggcagtgcccagcaggccctcaacattctcacaggcaaggactggaagctgaaaggcaggcatgccctaacccccaggcacctccatgcctggctcagaggcttaccacctgaatcaacaaggctcccagggcttcgtgttgtacctcccccctttgaacaggaggccttgcagactctgaaactggaccacccgaagatagcagcctggcgctggagccggaagattggaaagctctacaacagcttgtgcccgggcactctctgcctcatcctgctgccaggaaccaagagcactcatggttcactctctggtctaggactgatgggaataaaagaggaagaagaaagcgctggcccaggcctgtgttcgtgagtcggcctgccatgtttccatgtgccatttcttaccccttgtaggcaatggcaaagaatgtggtcaggctgtagcctccccaaccagcagacagttttatggaaacttggtatagcagctaaaagagtttagtttgtttatatggcatgtataagttttcaataaatgcctaaagttcaagcataaaaaaaaaaag

SEQ ID NO: 349491 - DNA, 2879 bp, Homo sapiens
agcgggccggaagtcgctcgacttctacttccggtccgttcaaaaagcccgcgaggctgaggggcggttgttgttggcagctgtggctaaggaggggagaacctctgctccccgcccgtcttctcttctgcgtttcccgggctagggggcgtggggagtggttttaggcggcgaagccgctcggcagcaccttccttctttgccaggcagacgcccgttgtagccgttggggaaccgttgagaatccgccgatgcggacggtaaagccgtttgggttagagcggcgcgggtgtccagtccgcggaacggggagatcgttggcaccttcgcttttttaggggaacggggatagttcgccatggagccagagagggaagggaccgagagacaccccaggaaggtcagggaaagcaggcaggccccaaataagctggtcggggcagctgaggcgatgaaagccggttgggatctcgaggagagtcagcccgaggccaagaaagcccgcttatctaccattttatttactgacaactgtgaagtaacccatgaccagctgtgtgaattgctgaagtatgcagttctgggcaaatccaatgttccaaaacccagctggtgccagctttttcatcaaaaccacctaaacaacgtagtggtttttgttctgcagggaatgagtcagctacacttttacaggttctatttggagtttggatgtcttcgaaaagcattcagacataaattccgcttgcctccaccatcatctgattttctagctgatgttgttgggctacaaactgaacaaagagctggagatctgcccaagacaatggaagggcctttaccttctaatgcaaaagccgccatcaaccttcaggatgatcccatcattcaaaagtatggctctaagaaagtgggcttgaccagatgccttctgacaaaggaggaaatgagaacgtttcactttccattacaaggttttcctgattgtgaaaactttttacttaccaaatgtaatggttctatagcagacaatagtcctctctttggacttgactgtgaaatgtgcctcacatccaaggggagagagctaacacgcatctcactggttgctgaaggaggctgctgtgttatggatgaactggtcaaacctgaaaacaagattctggactacctcaccagcttttcgggaatcacgaagaagattcttaacccagtgacgaccaaactcaaagatgtacagaggcagttaaaagcactgcttcctcctgatgctgtgttagtgggccactccttagatttggatctcagagcactgaaaatgatacatccatatgttattgatacatcgttgctttatgtcagagagcagggcagaagatttaagctcaagttcttagccaaagttattttggggaaggatatacagtgtccagacagacttggtcatgatgccacagaagatgctagaacaatccttgaattggctcggtatttccttaagcatggcccaaaaaagattgcagaactaaatctagaagcactagctaatcaccaagaaatacaagcagcaggccaagagcctaaaaacacagcagaagtacttcagcacccaaacacaagtgttttagaatgcttggattcagtgggtcagaagcttctttttttgacccgggagacagatgctggtgaacttccatcttccagaaattgtcaaactattaagtgtctttcaaataaagaggttcttgagcaggccagagtggaaatccccctgtttcccttcagcattgttcagttctcttttaaggccttttcacctgtcctcactgaggagatgaacaaaaggatgaggatcaagtggacagagatatcaactgtctatgctgggccatttagcaaaaattgcaatctcagggctctgaagaggctgtttaaaagctttggcccagtccagtcaatgacttttgttcttgaaacccgtcagcctcatctctgtatacagtatgaagtcctagaagctgcccagctggccatagagtccttggatggtattctggtagatggtatctgcatcaaggtgcagaggcctgtgacagagctcacgcttgattgtgacaccctcgtgaatgagctggaaggagattctgaaaaccaaggctctatatatctgtctggagtgagtgaaaccttcaaagaacagctattgcaggagccccgcctctttcttggcctggaagctgtgatcttgcctaaagatcttaaaagtggaaagcagaaaaaatactgtttcctgaaattcaaaagttttggcagtgcccagcaggccctcaacattctcacaggcaaggactggaagctgaaaggcaggcatgccctaacccccaggcacctccatgcctggctcagaggcttaccacctgaatcaacaaggctcccagggcttcgtgttgtacctcccccctttgaacaggaggccttgcagactctgaaactggaccacccgaagatagcagcctggcgctggagccggaagattggaaagctctacaacagcttgtgcccgggcactctctgcctcatcctgctgccaggaaccaagagcactcatggttcactctctggtctaggactgatgggaataaaagaggaagaagaaagcgctggcccaggcctgtgttcgtgagtcggcctgccatgtttccatgtgccatttcttaccccttgtaggcaatggcaaagaatgtggtcaggctgtagcctccccaaccagcagacagttttatggaaacttggtatagcagctaaaagagtttagtttgtttatatggcatgtataagttttcaataaatgcctaaagttcaagcataaaaaaaaaaag

SEQ ID NO: 349492 - DNA, 3013 bp, Homo sapiens
agcgggccggaagtcgctcgacttctacttccggtccgttcaaaaagcccgcgaggctgaggggcggttgttgttggcagctgtggctaaggaggggagaacctctgctccccgcccgtcttctcttctgcgtttcccgggctagggggcgtggggagtggttttaggcggcgaagccgctcggcagcaccttccttctttgccaggcagacgcccgttgtagccgttggggaaccgttgagaatccgccgatgcggacggtaaagccgtttgggttagagcggcgcgggtgtccagtccgcggaacggggagatcgttggcaccttcgcttttttaggggaacggggatagttcggtaaactgaattgagaagcggatccgagggaggttgaaagctgtcaagcccgtgtagctctcccgctaggaggcggcacgcgggggaataggggcgctggagtttccccagctctacctcatctttctccacagccatggagccagagagggaagggaccgagagacaccccaggaaggtcagggaaagcaggcaggccccaaataagctggtcggggcagctgaggcgatgaaagccggttgggatctcgaggagagtcagcccgaggccaagaaagcccgcttatctaccattttatttactgacaactgtgaagtaacccatgaccagctgtgtgaattgctgaagtatgcagttctgggcaaatccaatgttccaaaacccagctggtgccagctttttcatcaaaaccacctaaacaacgtagtggtttttgttctgcagggaatgagtcagctacacttttacaggttctatttggagtttggatgtcttcgaaaagcattcagacataaattccgcttgcctccaccatcatctgattttctagctgatgttgttgggctacaaactgaacaaagagctggagatctgcccaagacaatggaagggcctttaccttctaatgcaaaagccgccatcaaccttcaggatgatcccatcattcaaaagtatggctctaagaaagtgggcttgaccagatgccttctgacaaaggaggaaatgagaacgtttcactttccattacaaggttttcctgattgtgaaaactttttacttaccaaatgtaatggttctatagcagacaatagtcctctctttggacttgactgtgaaatgtgcctcacatccaaggggagagagctaacacgcatctcactggttgctgaaggaggctgctgtgttatggatgaactggtcaaacctgaaaacaagattctggactacctcaccagcttttcgggaatcacgaagaagattcttaacccagtgacgaccaaactcaaagatgtacagaggcagttaaaagcactgcttcctcctgatgctgtgttagtgggccactccttagatttggatctcagagcactgaaaatgatacatccatatgttattgatacatcgttgctttatgtcagagagcagggcagaagatttaagctcaagttcttagccaaagttattttggggaaggatatacagtgtccagacagacttggtcatgatgccacagaagatgctagaacaatccttgaattggctcggtatttccttaagcatggcccaaaaaagattgcagaactaaatctagaagcactagctaatcaccaagaaatacaagcagcaggccaagagcctaaaaacacagcagaagtacttcagcacccaaacacaagtgttttagaatgcttggattcagtgggtcagaagcttctttttttgacccgggagacagatgctggtgaacttccatcttccagaaattgtcaaactattaagtgtctttcaaataaagaggttcttgagcaggccagagtggaaatccccctgtttcccttcagcattgttcagttctcttttaaggccttttcacctgtcctcactgaggagatgaacaaaaggatgaggatcaagtggacagagatatcaactgtctatgctgggccatttagcaaaaattgcaatctcagggctctgaagaggctgtttaaaagctttggcccagtccagtcaatgacttttgttcttgaaacccgtcagcctcatctctgtatacagtatgaagtcctagaagctgcccagctggccatagagtccttggatggtattctggtagatggtatctgcatcaaggtgcagaggcctgtgacagagctcacgcttgattgtgacaccctcgtgaatgagctggaaggagattctgaaaaccaaggctctatatatctgtctggagtgagtgaaaccttcaaagaacagctattgcaggagccccgcctctttcttggcctggaagctgtgatcttgcctaaagatcttaaaagtggaaagcagaaaaaatactgtttcctgaaattcaaaagttttggcagtgcccagcaggccctcaacattctcacaggcaaggactggaagctgaaaggcaggcatgccctaacccccaggcacctccatgcctggctcagaggcttaccacctgaatcaacaaggctcccagggcttcgtgttgtacctcccccctttgaacaggaggccttgcagactctgaaactggaccacccgaagatagcagcctggcgctggagccggaagattggaaagctctacaacagcttgtgcccgggcactctctgcctcatcctgctgccaggaaccaagagcactcatggttcactctctggtctaggactgatgggaataaaagaggaagaagaaagcgctggcccaggcctgtgttcgtgagtcggcctgccatgtttccatgtgccatttcttaccccttgtaggcaatggcaaagaatgtggtcaggctgtagcctccccaaccagcagacagttttatggaaacttggtatagcagctaaaagagtttagtttgtttatatggcatgtataagttttcaataaatgcctaaagttcaagcataaaaaaaaaaag

SEQ ID NO: 349493 - DNA, 2563 bp, Homo sapiens
agcgggccggaagtcgctcgacttctacttccggtccgttccatggagccagagagggaagggaccgagagacaccccaggaaggtcagggaaagcaggcaggccccaaataagctggtcggggcagctgaggcgatgaaagccggttgggatctcgaggagagtcagcccgaggccaagaaagcccgcttatctaccattttatttactgacaactgtgaagtaacccatgaccagctgtgtgaattgctgaagtatgcagttctgggcaaatccaatgttccaaaacccagctggtgccagctttttcatcaaaaccacctaaacaacgtagtggtttttgttctgcagggaatgagtcagctacacttttacaggttctatttggagtttggatgtcttcgaaaagcattcagacataaattccgcttgcctccaccatcatctgattttctagctgatgttgttgggctacaaactgaacaaagagctggagatctgcccaagacaatggaagggcctttaccttctaatgcaaaagccgccatcaaccttcaggatgatcccatcattcaaaagtatggctctaagaaagtgggcttgaccagatgccttctgacaaaggaggaaatgagaacgtttcactttccattacaaggttttcctgattgtgaaaactttttacttaccaaatgtaatggttctatagcagacaatagtcctctctttggacttgactgtgaaatgtgcctcacatccaaggggagagagctaacacgcatctcactggttgctgaaggaggctgctgtgttatggatgaactggtcaaacctgaaaacaagattctggactacctcaccagcttttcgggaatcacgaagaagattcttaacccagtgacgaccaaactcaaagatgtacagaggcagttaaaagcactgcttcctcctgatgctgtgttagtgggccactccttagatttggatctcagagcactgaaaatgatacatccatatgttattgatacatcgttgctttatgtcagagagcagggcagaagatttaagctcaagttcttagccaaagttattttggggaaggatatacagtgtccagacagacttggtcatgatgccacagaagatgctagaacaatccttgaattggctcggtatttccttaagcatggcccaaaaaagattgcagaactaaatctagaagcactagctaatcaccaagaaatacaagcagcaggccaagagcctaaaaacacagcagaagtacttcagcacccaaacacaagtgttttagaatgcttggattcagtgggtcagaagcttctttttttgacccgggagacagatgctggtgaacttccatcttccagaaattgtcaaactattaagtgtctttcaaataaagaggttcttgagcaggccagagtggaaatccccctgtttcccttcagcattgttcagttctcttttaaggccttttcacctgtcctcactgaggagatgaacaaaaggatgaggatcaagtggacagagatatcaactgtctatgctgggccatttagcaaaaattgcaatctcagggctctgaagaggctgtttaaaagctttggcccagtccagtcaatgacttttgttcttgaaacccgtcagcctcatctctgtatacagtatgaagtcctagaagctgcccagctggccatagagtccttggatggtattctggtagatggtatctgcatcaaggtgcagaggcctgtgacagagctcacgcttgattgtgacaccctcgtgaatgagctggaaggagattctgaaaaccaaggctctatatatctgtctggagtgagtgaaaccttcaaagaacagctattgcaggagccccgcctctttcttggcctggaagctgtgatcttgcctaaagatcttaaaagtggaaagcagaaaaaatactgtttcctgaaattcaaaagttttggcagtgcccagcaggccctcaacattctcacaggcaaggactggaagctgaaaggcaggcatgccctaacccccaggcacctccatgcctggctcagaggcttaccacctgaatcaacaaggctcccagggcttcgtgttgtacctcccccctttgaacaggaggccttgcagactctgaaactggaccacccgaagatagcagcctggcgctggagccggaagattggaaagctctacaacagcttgtgcccgggcactctctgcctcatcctgctgccaggaaccaagagcactcatggttcactctctggtctaggactgatgggaataaaagaggaagaagaaagcgctggcccaggcctgtgttcgtgagtcggcctgccatgtttccatgtgccatttcttaccccttgtaggcaatggcaaagaatgtggtcaggctgtagcctccccaaccagcagacagttttatggaaacttggtatagcagctaaaagagtttagtttgtttatatggcatgtataagttttcaataaatgcctaaagttcaagcataaaaaaaaaaag

SEQ ID NO: 349494 - DNA, 2713 bp, Homo sapiens
agcgggccggaagtcgctcgacttctacttccggtccgttcaaaaagcccgcgaggctgaggggcggttgttgttggcagctgtggctaaggaggggagaacctctgctccccgcccgtcttctcttctgcgtttcccgggctagggggcgtggggagtggttttaggcggcgaagccgctcggcagcaccttccttctttgccaggcagacgcccgttgtagccgttggggaaccgttgagaatccgccatggagccagagagggaagggaccgagagacaccccaggaaggtcagggaaagcaggcaggccccaaataagctggtcggggcagctgaggcgatgaaagccggttgggatctcgaggagagtcagcccgaggccaagaaagcccgcttatctaccattttatttactgacaactgtgaagtaacccatgaccagctgtgtgaattgctgaagtatgcagttctgggcaaatccaatgttccaaaacccagggaatgagtcagctacacttttacaggttctatttggagtttggatgtcttcgaaaagcattcagacataaattccgcttgcctccaccatcatctgattttctagctgatgttgttgggctacaaactgaacaaagagctggagatctgcccaagacaatggaagggcctttaccttctaatgcaaaagccgccatcaaccttcaggatgatcccatcattcaaaagtatggctctaagaaagtgggcttgaccagatgccttctgacaaaggaggaaatgagaacgtttcactttccattacaaggttttcctgattgtgaaaactttttacttaccaaatgtaatggttctatagcagacaatagtcctctctttggacttgactgtgaaatgtgcctcacatccaaggggagagagctaacacgcatctcactggttgctgaaggaggctgctgtgttatggatgaactggtcaaacctgaaaacaagattctggactacctcaccagcttttcgggaatcacgaagaagattcttaacccagtgacgaccaaactcaaagatgtacagaggcagttaaaagcactgcttcctcctgatgctgtgttagtgggccactccttagatttggatctcagagcactgaaaatgatacatccatatgttattgatacatcgttgctttatgtcagagagcagggcagaagatttaagctcaagttcttagccaaagttattttggggaaggatatacagtgtccagacagacttggtcatgatgccacagaagatgctagaacaatccttgaattggctcggtatttccttaagcatggcccaaaaaagattgcagaactaaatctagaagcactagctaatcaccaagaaatacaagcagcaggccaagagcctaaaaacacagcagaagtacttcagcacccaaacacaagtgttttagaatgcttggattcagtgggtcagaagcttctttttttgacccgggagacagatgctggtgaacttccatcttccagaaattgtcaaactattaagtgtctttcaaataaagaggttcttgagcaggccagagtggaaatccccctgtttcccttcagcattgttcagttctcttttaaggccttttcacctgtcctcactgaggagatgaacaaaaggatgaggatcaagtggacagagatatcaactgtctatgctgggccatttagcaaaaattgcaatctcagggctctgaagaggctgtttaaaagctttggcccagtccagtcaatgacttttgttcttgaaacccgtcagcctcatctctgtatacagtatgaagtcctagaagctgcccagctggccatagagtccttggatggtattctggtagatggtatctgcatcaaggtgcagaggcctgtgacagagctcacgcttgattgtgacaccctcgtgaatgagctggaaggagattctgaaaaccaaggctctatatatctgtctggagtgagtgaaaccttcaaagaacagctattgcaggagccccgcctctttcttggcctggaagctgtgatcttgcctaaagatcttaaaagtggaaagcagaaaaaatactgtttcctgaaattcaaaagttttggcagtgcccagcaggccctcaacattctcacaggcaaggactggaagctgaaaggcaggcatgccctaacccccaggcacctccatgcctggctcagaggcttaccacctgaatcaacaaggctcccagggcttcgtgttgtacctcccccctttgaacaggaggccttgcagactctgaaactggaccacccgaagatagcagcctggcgctggagccggaagattggaaagctctacaacagcttgtgcccgggcactctctgcctcatcctgctgccaggaaccaagagcactcatggttcactctctggtctaggactgatgggaataaaagaggaagaagaaagcgctggcccaggcctgtgttcgtgagtcggcctgccatgtttccatgtgccatttcttaccccttgtaggcaatggcaaagaatgtggtcaggctgtagcctccccaaccagcagacagttttatggaaacttggtatagcagctaaaagagtttagtttgtttatatggcatgtataagttttcaataaatgcctaaagttcaagcataaaaaaaaaaag

SEQ ID NO: 349495 - DNA, 2547 bp, Homo sapiens
agcgggccggaagtcgctcgacttctacttccggtccgttcaaaaagcccgcgaggctgaggggcggttgttgttggcagctgtggctaaggaggggagaacctctgctccccgcccgtcttctcttctgcgtttcccgggctagggggcgtggggagtggttttaggcggcgaagccgctcggcagcaccttccttctttgccaggcagacgcccgttgtagccgttggggaaccgttgagaatccgccatggagccagagagggaagggaccgagagacaccccaggaaggtcagggaaagcaggcaggccccaaataagctggtcggggcagctgaggcgatgaaagccggttgggatctcgaggagagtcagcccgaggccaagaaagcccgcttatctaccattttatttactgacaactgtgaagtaacccatgaccagctgtgtgaattgctgaagtatgcagttctgggcaaatccaatgttccaaaacccagggcctttaccttctaatgcaaaagccgccatcaaccttcaggatgatcccatcattcaaaagtatggctctaagaaagtgggcttgaccagatgccttctgacaaaggaggaaatgagaacgtttcactttccattacaaggttttcctgattgtgaaaactttttacttaccaaatgtaatggttctatagcagacaatagtcctctctttggacttgactgtgaaatgtgcctcacatccaaggggagagagctaacacgcatctcactggttgctgaaggaggctgctgtgttatggatgaactggtcaaacctgaaaacaagattctggactacctcaccagcttttcgggaatcacgaagaagattcttaacccagtgacgaccaaactcaaagatgtacagaggcagttaaaagcactgcttcctcctgatgctgtgttagtgggccactccttagatttggatctcagagcactgaaaatgatacatccatatgttattgatacatcgttgctttatgtcagagagcagggcagaagatttaagctcaagttcttagccaaagttattttggggaaggatatacagtgtccagacagacttggtcatgatgccacagaagatgctagaacaatccttgaattggctcggtatttccttaagcatggcccaaaaaagattgcagaactaaatctagaagcactagctaatcaccaagaaatacaagcagcaggccaagagcctaaaaacacagcagaagtacttcagcacccaaacacaagtgttttagaatgcttggattcagtgggtcagaagcttctttttttgacccgggagacagatgctggtgaacttccatcttccagaaattgtcaaactattaagtgtctttcaaataaagaggttcttgagcaggccagagtggaaatccccctgtttcccttcagcattgttcagttctcttttaaggccttttcacctgtcctcactgaggagatgaacaaaaggatgaggatcaagtggacagagatatcaactgtctatgctgggccatttagcaaaaattgcaatctcagggctctgaagaggctgtttaaaagctttggcccagtccagtcaatgacttttgttcttgaaacccgtcagcctcatctctgtatacagtatgaagtcctagaagctgcccagctggccatagagtccttggatggtattctggtagatggtatctgcatcaaggtgcagaggcctgtgacagagctcacgcttgattgtgacaccctcgtgaatgagctggaaggagattctgaaaaccaaggctctatatatctgtctggagtgagtgaaaccttcaaagaacagctattgcaggagccccgcctctttcttggcctggaagctgtgatcttgcctaaagatcttaaaagtggaaagcagaaaaaatactgtttcctgaaattcaaaagttttggcagtgcccagcaggccctcaacattctcacaggcaaggactggaagctgaaaggcaggcatgccctaacccccaggcacctccatgcctggctcagaggcttaccacctgaatcaacaaggctcccagggcttcgtgttgtacctcccccctttgaacaggaggccttgcagactctgaaactggaccacccgaagatagcagcctggcgctggagccggaagattggaaagctctacaacagcttgtgcccgggcactctctgcctcatcctgctgccaggaaccaagagcactcatggttcactctctggtctaggactgatgggaataaaagaggaagaagaaagcgctggcccaggcctgtgttcgtgagtcggcctgccatgtttccatgtgccatttcttaccccttgtaggcaatggcaaagaatgtggtcaggctgtagcctccccaaccagcagacagttttatggaaacttggtatagcagctaaaagagtttagtttgtttatatggcatgtataagttttcaataaatgcctaaagttcaagcataaaaaaaaaaag

SEQ ID NO: 349496 - DNA, 2790 bp, Homo sapiens
agcgggccggaagtcgctcgacttctacttccggtccgttcaaaaagcccgcgaggctgaggggcggttgttgttggcagctgtggctaaggaggggagaacctctgctccccgcccgtcttctcttctgcgtttcccgggctagggggcgtggggagtggttttaggcggcgaagccgctcggcagcaccttccttctttgccaggcagacgcccgttgtagccgttggggaaccgttgagaatccgccgatgcggacggtaaagccgtttgggttagagcggcgcgggtgtccagtccgcggaacggggagatcgttggcaccttcgcttttttaggggaacggggatagttcgccatggagccagagagggaagggaccgagagacaccccaggaaggtcagggaaagcaggcaggccccaaataagctggtcggggcagctgaggcgatgaaagccggttgggatctcgaggagagtcagcccgaggccaagaaagcccgcttatctaccattttatttactgacaactgtgaagtaacccatgaccagctgtgtgaattgctgaagtatgcagttctgggcaaatccaatgttccaaaacccagctggtgccagctttttcatcaaaaccacctaaacaacgtagtggtttttgttctgcagggaatgagtcagctacacttttacaggttctatttggagtttggatgtcttcgaaaagcattcagacataaattccgcttgcctccaccatcatctgattttctagctgatgttgttgggctacaaactgaacaaagagctggagatctgcccaagacaatggaagggcctttaccttctaatgcaaaagccgccatcaaccttcaggatgatcccatcattcaaaagtatggctctaagaaagtgggcttgaccagatgccttctgacaaaggaggaaatgagaacgtttcactttccattacaagtgcctcacatccaaggggagagagctaacacgcatctcactggttgctgaaggaggctgctgtgttatggatgaactggtcaaacctgaaaacaagattctggactacctcaccagcttttcgggaatcacgaagaagattcttaacccagtgacgaccaaactcaaagatgtacagaggcagttaaaagcactgcttcctcctgatgctgtgttagtgggccactccttagatttggatctcagagcactgaaaatgatacatccatatgttattgatacatcgttgctttatgtcagagagcagggcagaagatttaagctcaagttcttagccaaagttattttggggaaggatatacagtgtccagacagacttggtcatgatgccacagaagatgctagaacaatccttgaattggctcggtatttccttaagcatggcccaaaaaagattgcagaactaaatctagaagcactagctaatcaccaagaaatacaagcagcaggccaagagcctaaaaacacagcagaagtacttcagcacccaaacacaagtgttttagaatgcttggattcagtgggtcagaagcttctttttttgacccgggagacagatgctggtgaacttccatcttccagaaattgtcaaactattaagtgtctttcaaataaagaggttcttgagcaggccagagtggaaatccccctgtttcccttcagcattgttcagttctcttttaaggccttttcacctgtcctcactgaggagatgaacaaaaggatgaggatcaagtggacagagatatcaactgtctatgctgggccatttagcaaaaattgcaatctcagggctctgaagaggctgtttaaaagctttggcccagtccagtcaatgacttttgttcttgaaacccgtcagcctcatctctgtatacagtatgaagtcctagaagctgcccagctggccatagagtccttggatggtattctggtagatggtatctgcatcaaggtgcagaggcctgtgacagagctcacgcttgattgtgacaccctcgtgaatgagctggaaggagattctgaaaaccaaggctctatatatctgtctggagtgagtgaaaccttcaaagaacagctattgcaggagccccgcctctttcttggcctggaagctgtgatcttgcctaaagatcttaaaagtggaaagcagaaaaaatactgtttcctgaaattcaaaagttttggcagtgcccagcaggccctcaacattctcacaggcaaggactggaagctgaaaggcaggcatgccctaacccccaggcacctccatgcctggctcagaggcttaccacctgaatcaacaaggctcccagggcttcgtgttgtacctcccccctttgaacaggaggccttgcagactctgaaactggaccacccgaagatagcagcctggcgctggagccggaagattggaaagctctacaacagcttgtgcccgggcactctctgcctcatcctgctgccaggaaccaagagcactcatggttcactctctggtctaggactgatgggaataaaagaggaagaagaaagcgctggcccaggcctgtgttcgtgagtcggcctgccatgtttccatgtgccatttcttaccccttgtaggcaatggcaaagaatgtggtcaggctgtagcctccccaaccagcagacagttttatggaaacttggtatagcagctaaaagagtttagtttgtttatatggcatgtataagttttcaataaatgcctaaagttcaagcataaaaaaaaaaag

SEQ ID NO: 349497 - DNA, 2205 bp, Homo sapiens
agcgggccggaagtcgctcgacttctacttccggtccgttcaaaaagcccgcgaggctgaggggcggttgttgttggcagctgtggctaaggaggggagaacctctgctccccgcccgtcttctcttctgcgtttcccgggctagggggcgtggggagtggttttaggcggcgaagccgctcggcagcaccttccttctttgccaggcagacgcccgttgtagccgttggggaaccgttgagaatccgggcctttaccttctaatgcaaaagccgccatcaaccttcaggatgatcccatcattcaaaagtatggctctaagaaagtgggcttgaccagatgccttctgacaaaggaggaaatgagaacgtttcactttccattacaagtgcctcacatccaaggggagagagctaacacgcatctcactggttgctgaaggaggctgctgtgttatggatgaactggtcaaacctgaaaacaagattctggactacctcaccagcttttcgggaatcacgaagaagattcttaacccagtgacgaccaaactcaaagatgtacagaggcagttaaaagcactgcttcctcctgatgctgtgttagtgggccactccttagatttggatctcagagcactgaaaatgatacatccatatgttattgatacatcgttgctttatgtcagagagcagggcagaagatttaagctcaagttcttagccaaagttattttggggaaggatatacagtgtccagacagacttggtcatgatgccacagaagatgctagaacaatccttgaattggctcggtatttccttaagcatggcccaaaaaagattgcagaactaaatctagaagcactagctaatcaccaagaaatacaagcagcaggccaagagcctaaaaacacagcagaagtacttcagcacccaaacacaagtgttttagaatgcttggattcagtgggtcagaagcttctttttttgacccgggagacagatgctggtgaacttccatcttccagaaattgtcaaactattaagtgtctttcaaataaagaggttcttgagcaggccagagtggaaatccccctgtttcccttcagcattgttcagttctcttttaaggccttttcacctgtcctcactgaggagatgaacaaaaggatgaggatcaagtggacagagatatcaactgtctatgctgggccatttagcaaaaattgcaatctcagggctctgaagaggctgtttaaaagctttggcccagtccagtcaatgacttttgttcttgaaacccgtcagcctcatctctgtatacagtatgaagtcctagaagctgcccagctggccatagagtccttggatggtattctggtagatggtatctgcatcaaggtgcagaggcctgtgacagagctcacgcttgattgtgacaccctcgtgaatgagctggaaggagattctgaaaaccaaggctctatatatctgtctggagtgagtgaaaccttcaaagaacagctattgcaggagccccgcctctttcttggcctggaagctgtgatcttgcctaaagatcttaaaagtggaaagcagaaaaaatactgtttcctgaaattcaaaagttttggcagtgcccagcaggccctcaacattctcacaggcaaggactggaagctgaaaggcaggcatgccctaacccccaggcacctccatgcctggctcagaggcttaccacctgaatcaacaaggctcccagggcttcgtgttgtacctcccccctttgaacaggaggccttgcagactctgaaactggaccacccgaagatagcagcctggcgctggagccggaagattggaaagctctacaacagcttgtgcccgggcactctctgcctcatcctgctgccaggaaccaagagcactcatggttcactctctggtctaggactgatgggaataaaagaggaagaagaaagcgctggcccaggcctgtgttcgtgagtcggcctgccatgtttccatgtgccatttcttaccccttgtaggcaatggcaaagaatgtggtcaggctgtagcctccccaaccagcagacagttttatggaaacttggtatagcagctaaaagagtttagtttgtttatatggcatgtataagttttcaataaatgcctaaagttcaagcataaaaaaaaaaag

SEQ ID NO: 349498 - DNA, 2431 bp, Homo sapiens
gaaataggatttccctgcttaagttcccctcgtgctttgctttatctaattgtagtaagcctcttttcaaagacagtgcatcccctctcagtactcaggaaacagtttctcaattcttaatagagtaactaagacctaaaatttgagaatctgacatatcagggtgtatatcctgtccttgcctgttagtggctatgtcgccttagacaaatacccctaacctatcagcctcggcttctccctctgtgaagtgggggtaataataaagcctacctcaaaaggtaattatgagagtggcatatataaaattcttagtacagcactagctgataatagaatgggcttcataaaaattacctattagtggtatttagcataatactggatatagtacacactccataaatggtagatacaattattaatattatttgcattcatcttctttgtgcagactacactgtgttgatcctcttaagtgtaacattcagcagcctgcccagctttaatttcactcacactagatcctctagaaagcaagtttgtgccattgctgcagggaccctggtagattacagtagatggcagttgacatagtgtaaatagtaagaagaagcaataacttccacagttcagcagcctgactacatgttggtctttcagtgcctcacatccaaggggagagagctaacacgcatctcactggttgctgaaggaggctgctgtgttatggatgaactggtcaaacctgaaaacaagattctggactacctcaccagcttttcgggaatcacgaagaagattcttaacccagtgacgaccaaactcaaagatgtacagaggcagttaaaagcactgcttcctcctgatgctgtgttagtgggccactccttagatttggatctcagagcactgaaacagggcagaagatttaagctcaagttcttagccaaagttattttggggaaggatatacagtgtccagacagacttggtcatgatgccacagaagatgctagaacaatccttgaattggctcggtatttccttaagcatggcccaaaaaagattgcagaactaaatctagaagcactagctaatcaccaagaaatacaagcagcaggccaagagcctaaaaacacagcagaagtacttcagcacccaaacacaagtgttttagaatgcttggattcagtgggtcagaagcttctttttttgacccgggagacagatgctggtgaacttccatcttccagaaattgtcaaactattaagtgtctttcaaataaagaggttcttgagcaggccagagtggaaatccccctgtttcccttcagcattgttcagttctcttttaaggccttttcacctgtcctcactgaggagatgaacaaaaggatgaggatcaagtggacagagatatcaactgtctatgctgggccatttagcaaaaattgcaatctcagggctctgaagaggctgtttaaaagctttggcccagtccagtcaatgacttttgttcttgaaacccgtcagcctcatctctgtatacagtatgaagtcctagaagctgcccagctggccatagagtccttggatggtattctggtagatggtatctgcatcaaggtgcagaggcctgtgacagagctcacgcttgattgtgacaccctcgtgaatgagctggaaggagattctgaaaaccaaggctctatatatctgtctggagtgagtgaaaccttcaaagaacagctattgcaggagccccgcctctttcttggcctggaagctgtgatcttgcctaaagatcttaaaagtggaaagcagaaaaaatactgtttcctgaaattcaaaagttttggcagtgcccagcaggccctcaacattctcacaggcaaggactggaagctgaaaggcaggcatgccctaacccccaggcacctccatgcctggctcagaggcttaccacctgaatcaacaaggctcccagggcttcgtgttgtacctcccccctttgaacaggaggccttgcagactctgaaactggaccacccgaagatagcagcctggcgctggagccggaagattggaaagctctacaacagcttgtgcccgggcactctctgcctcatcctgctgccaggaaccaagagcactcatggttcactctctggtctaggactgatgggaataaaagaggaagaagaaagcgctggcccaggcctgtgttcgtgagtcggcctgccatgtttccatgtgccatttcttaccccttgtaggcaatggcaaagaatgtggtcaggctgtagcctccccaaccagcagacagttttatggaaacttggtatagcagctaaaagagtttagtttgtttatatggcatgtataagttttcaataaatgcctaaagttcaagcataaaaaaaaaaag

SEQ ID NO: 349499 - DNA, 293 bp, Homo sapiens
ccttagaggcagaggaagagtgttgcagcccttccaaaggtaacgagagagtgttctggctgagtatcgacacatggctttgatcccagactctgaaactggaccacccgaagatagcagcctggcgctggagccggaagattggaaagctctacaacagcttgtgcccgggcactctctgcctcatcctgctgccaggaaccaagaggtaaggactagaaagggtatcccttcaggactctgtcccctggatttcagctgttcttagagaaaaagccttttgctgatattta

SEQ ID NO: 349500 - DNA, 358 bp, Homo sapiens
gtttacatgaaaatatgtatttatcaattaagtctctaacataattctgtgaggccattatctttagtttccttttacagaaaagaaaagaaacggaaaattttaggaaactgaaaaatgaagttattagtaatggcaacaacttgctagtatccaataggcctgaggattaaattgattttctaccactaacaccaactttccttggttaggtgcagaggcctgtgacagagctcacgcttgattgtgacaccctcgtgaatgagctggaaggagattctgaaaaccaaggctctatatatctgtctggagtgagtgaaaccttcaaagaacagctattgcaggagccccgcctctt

SEQ ID NO: 349501 - DNA, 359 bp, Homo sapiens
ttgtatttatttgagcatcaaatgctctgcaagcaattatatttttaccactttgttttcttcaagattgcagaactaaatctagaagcactagctaatcaccaagaaatacaagcagcaggccaagagcctaaaaacacagcagaagtacttcagcacccaaacacaaggtaatattttcagtttgaaacaagagcaaagacaaatggagtatctagtttcttatttaacaacacctgagaatgtttttatcctcttttgagtctattaaaaactatttaccaaaaaatgataacatctatcacaaaaaccacggaaaaaataccaccttctagccttaatatatagtatttaatttc

SEQ ID NO: 349502 - DNA, 2678 bp, Homo sapiens
agcgggccggaagtcgctcgacttctacttccggtccgttcaaaaagcccgcgaggctgaggggcggttgttgttggcagctgtggctaaggaggggagaacctctgctccccgcccgtcttctcttctgcgtttcccgggctagggggcgtggggagtggttttaggcggcgaagccgctcggcagcaccttccttctttgccaggcagacgcccgttgtagccgttggggaaccgttgagaatccgccatggagccagagagggaagggaccgagagacaccccaggaaggtcagggaaagcaggcaggccccaaataagctggtcggggcagctgaggcgatgaaagccggttgggatctcgaggagagtcagcccgaggccaagaaagcccgcttatctaccattttatttactgacaactgtgaagtaacccatgaccagctgtgtgaattgctgaagtatgcagttctgggcaaatccaatgttccaaaacccagctggtgccagctttttcatcaaaaccacctaaacaacgtagtggtttttgttctgcagggaatgagtcagctacacttttacaggttctatttggagtttggatgtcttcgaaaagcattcagacataaattccgcttgcctccaccatcatctgattttctagctgatgttgttgggctacaaactgaacaaagagctggagatctgcccaagacaatggaagggcctttaccttctaatgcaaaagccgccatcaaccttcaggatgatcccatcattcaaaagtatggctctaagaaagtgggcttgaccagatgccttctgacaaaggaggaaatgagaacgtttcactttccattacaaggttttcctgattgtgaaaactttttacttaccaaatgtaatggttctatagcagacaatagtcctctctttggacttgactgtgaaatgtgcctcacatccaaggggagagagctaacacgcatctcactggttgctgaaggaggctgctgtgttatggatgaactggtcaaacctgaaaacaagattctggactacctcaccagcttttcgggaatcacgaagaagattcttaacccagtgacgaccaaactcaaagatgtacagaggcagttaaaagcactgcttcctcctgatgctgtgttagtgggccactccttagatttggatctcagagcactgaaaatgatacatccatatgttattgatacatcgttgctttatgtcagagagcagggcagaagatttaagctcaagttcttagccaaagttattttggggaaggatatacagtgtccagacagacttggtcatgatgccacagaagatgctagaacaatccttgaattggctcggtatttccttaagcatggcccaaaaaagattgcagaactaaatctagaagcactagctaatcaccaagaaatacaagcagcaggccaagagcctaaaaacacagcagaagtacttcagcacccaaacacaagtgttttagaatgcttggattcagtgggtcagaagcttctttttttgacccgggagacagatgctggtgaacttccatcttccagaaattgtcaaactattaagtgtctttcaaataaagaggttcttgagcaggccagagtggaaatccccctgtttcccttcagcattgttcagttctcttttaaggccttttcacctgtcctcactgaggagatgaacaaaaggatgaggatcaagtggacagagatatcaactgtctatgctgggccatttagcaaaaattgcaatctcagggctctgaagaggctgtttaaaagctttggcccagtccagtcaatgacttttgttcttgaaacccgtcaggtgcagaggcctgtgacagagctcacgcttgattgtgacaccctcgtgaatgagctggaaggagattctgaaaaccaaggctctatatatctgtctggagtgagtgaaaccttcaaagaacagctattgcaggagccccgcctctttcttggcctggaagctgtgatcttgcctaaagatcttaaaagtggaaagcagaaaaaatactgtttcctgaaattcaaaagttttggcagtgcccagcaggccctcaacattctcacaggcaaggactggaagctgaaaggcaggcatgccctaacccccaggcacctccatgcctggctcagaggcttaccacctgaatcaacaaggctcccagggcttcgtgttgtacctcccccctttgaacaggaggccttgcagactctgaaactggaccacccgaagatagcagcctggcgctggagccggaagattggaaagctctacaacagcttgtgcccgggcactctctgcctcatcctgctgccaggaaccaagagcactcatggttcactctctggtctaggactgatgggaataaaagaggaagaagaaagcgctggcccaggcctgtgttcgtgagtcggcctgccatgtttccatgtgccatttcttaccccttgtaggcaatggcaaagaatgtggtcaggctgtagcctccccaaccagcagacagttttatggaaacttggtatagcagctaaaagagtttagtttgtttatatggcatgtataagttttcaataaatgcctaaagttcaagcataaaaaaaaaaag

SEQ ID NO: 349503 - DNA, 2682 bp, Homo sapiens
agcgggccggaagtcgctcgacttctacttccggtccgttcaaaaagcccgcgaggctgaggggcggttgttgttggcagctgtggctaaggaggggagaacctctgctccccgcccgtcttctcttctgcgtttcccgggctagggggcgtggggagtggttttaggcggcgaagccgctcggcagcaccttccttctttgccaggcagacgcccgttgtagccgttggggaaccgttgagaatccgccatggagccagagagggaagggaccgagagacaccccaggaaggtcagggaaagcaggcaggccccaaataagctggtcggggcagctgaggcgatgaaagccggttgggatctcgaggagagtcagcccgaggccaagaaagcccgcttatctaccattttatttactgacaactgtgaagtaacccatgaccagctgtgtgaattgctgaagtatgcagttctgggcaaatccaatgttccaaaacccagctggtgccagctttttcatcaaaaccacctaaacaacgtagtggtttttgttctgcagggaatgagtcagctacacttttacaggttctatttggagtttggatgtcttcgaaaagcattcagacataaattccgcttgcctccaccatcatctgattttctagctgatgttgttgggctacaaactgaacaaagagctggagatctgcccaagacaatggaagggcctttaccttctaatgcaaaagccgccatcaaccttcaggatgatcccatcattcaaaagtatggctctaagaaagtgggcttgaccagatgccttctgacaaaggaggaaatgagaacgtttcactttccattacaagtgcctcacatccaaggggagagagctaacacgcatctcactggttgctgaaggaggctgctgtgttatggatgaactggtcaaacctgaaaacaagattctggactacctcaccagcttttcgggaatcacgaagaagattcttaacccagtgacgaccaaactcaaagatgtacagaggcagttaaaagcactgcttcctcctgatgctgtgttagtgggccactccttagatttggatctcagagcactgaaaatgatacatccatatgttattgatacatcgttgctttatgtcagagagcagggcagaagatttaagctcaagttcttagccaaagttattttggggaaggatatacagtgtccagacagacttggtcatgatgccacagaagatgctagaacaatccttgaattggctcggtatttccttaagcatggcccaaaaaagattgcagaactaaatctagaagcactagctaatcaccaagaaatacaagcagcaggccaagagcctaaaaacacagcagaagtacttcagcacccaaacacaagtgttttagaatgcttggattcagtgggtcagaagcttctttttttgacccgggagacagatgctggtgaacttccatcttccagaaattgtcaaactattaagtgtctttcaaataaagaggttcttgagcaggccagagtggaaatccccctgtttcccttcagcattgttcagttctcttttaaggccttttcacctgtcctcactgaggagatgaacaaaaggatgaggatcaagtggacagagatatcaactgtctatgctgggccatttagcaaaaattgcaatctcagggctctgaagaggctgtttaaaagctttggcccagtccagtcaatgacttttgttcttgaaacccgtcagcctcatctctgtatacagtatgaagtcctagaagctgcccagctggccatagagtccttggatggtattctggtagatggtatctgcatcaaggtgcagaggcctgtgacagagctcacgcttgattgtgacaccctcgtgaatgagctggaaggagattctgaaaaccaaggctctatatatctgtctggagtgagtgaaaccttcaaagaacagctattgcaggagccccgcctctttcttggcctggaagctgtgatcttgcctaaagatcttaaaagtggaaagcagaaaaaatactgtttcctgaaattcaaaagttttggcagtgcccagcaggccctcaacattctcacaggcaaggactggaagctgaaaggcaggcatgccctaacccccaggcacctccatgcctggctcagaggcttaccacctgaatcaacaaggctcccagggcttcgtgttgtacctcccccctttgaacaggaggccttgcagactctgaaactggaccacccgaagatagcagcctggcgctggagccggaagattggaaagctctacaacagcttgtgcccgggcactctctgcctcatcctgctgccaggaaccaagagcactcatggttcactctctggtctaggactgatgggaataaaagaggaagaagaaagcgctggcccaggcctgtgttcgtgagtcggcctgccatgtttccatgtgccatttcttaccccttgtaggcaatggcaaagaatgtggtcaggctgtagcctccccaaccagcagacagttttatggaaacttggtatagcagctaaaagagtttagtttgtttatatggcatgtataagttttcaataaatgcctaaagttcaagcataaaaaaaaaaag

SEQ ID NO: 349504 - DNA, 2573 bp, Homo sapiens
agcgggccggaagtcgctcgacttctacttccggtccgttcaaaaagcccgcgaggctgaggggcggttgttgttggcagctgtggctaaggaggggagaacctctgctccccgcccgtcttctcttctgcgtttcccgggctagggggcgtggggagtggttttaggcggcgaagccgctcggcagcaccttccttctttgccaggcagacgcccgttgtagccgttggggaaccgttgagaatccgccatggagccagagagggaagggaccgagagacaccccaggaaggtcagggaaagcaggcaggccccaaataagctggtcggggcagctgaggcgatgaaagccggttgggatctcgaggagagtcagcccgaggccaagaaagcccgcttatctaccattttatttactgacaactgtgaagtaacccatgaccagctgtgtgaattgctgaagtatgcagttctgggcaaatccaatgttccaaaacccagctggtgccagctttttcatcaaaaccacctaaacaacgtagtggtttttgttctgcagggaatgagtcagctacacttttacaggttctatttggagtttggatgtcttcgaaaagcattcagacataaattccgcttgcctccaccatcatctgattttctagctgatgttgttgggctacaaactgaacaaagagctggagatctgcccaagacaatggaagggcctttaccttctaatgcaaaagccgccatcaaccttcaggatgatcccatcattcaaaagtatggctctaagaaagtgggcttgaccagatgccttctgacaaaggaggaaatgagaacgtttcactttccattacaaggttttcctgattgtgaaaactttttacttaccaaatgtaatggttctatagcagacaatagtcctctctttggacttgactgtgaaatgtgcctcacatccaaggggagagagctaacacgcatctcactggttgctgaaggaggctgctgtgttatggatgaactggtcaaacctgaaaacaagattctggactacctcaccagcttttcgggaatcacgaagaagattcttaacccagtgacgaccaaactcaaagatgtacagaggcagttaaaagcactgcttcctcctgatgctgtgttagtgggccactccttagatttggatctcagagcactgaaaatgatacatccatatgttattgatacatcgttgctttatgtcagagagcagggcagaagatttaagctcaagttcttagccaaagttattttggggaaggatatacagtgtccagacagacttggtcatgatgccacagaagatgctagaacaatccttgaattggctcggtatttccttaagcatggcccaaaaaagattgcagaactaaatctagaagcactagctaatcaccaagaaatacaagcagcaggccaagagcctaaaaacacagcagaagtacttcagcacccaaacacaagtgttttagaatgcttggattcagtgggtcagaagcttctttttttgacccgggagacagatgctggtgaacttccatcttccagaaattgtcaaactattaagtgtctttcaaataaagagatgaggatcaagtggacagagatatcaactgtctatgctgggccatttagcaaaaattgcaatctcagggctctgaagaggctgtttaaaagctttggcccagtccagtcaatgacttttgttcttgaaacccgtcaggtgcagaggcctgtgacagagctcacgcttgattgtgacaccctcgtgaatgagctggaaggagattctgaaaaccaaggctctatatatctgtctggagtgagtgaaaccttcaaagaacagctattgcaggagccccgcctctttcttggcctggaagctgtgatcttgcctaaagatcttaaaagtggaaagcagaaaaaatactgtttcctgaaattcaaaagttttggcagtgcccagcaggccctcaacattctcacaggcaaggactggaagctgaaaggcaggcatgccctaacccccaggcacctccatgcctggctcagaggcttaccacctgaatcaacaaggctcccagggcttcgtgttgtacctcccccctttgaacaggaggccttgcagactctgaaactggaccacccgaagatagcagcctggcgctggagccggaagattggaaagctctacaacagcttgtgcccgggcactctctgcctcatcctgctgccaggaaccaagagcactcatggttcactctctggtctaggactgatgggaataaaagaggaagaagaaagcgctggcccaggcctgtgttcgtgagtcggcctgccatgtttccatgtgccatttcttaccccttgtaggcaatggcaaagaatgtggtcaggctgtagcctccccaaccagcagacagttttatggaaacttggtatagcagctaaaagagtttagtttgtttatatggcatgtataagttttcaataaatgcctaaagttcaagcataaaaaaaaaaag

SEQ ID NO: 349505 - DNA, 2590 bp, Homo sapiens
cgccgtcgggggcactggattcgggcgggctctccgccctggcctctccgaacctgatccctgatcattaaaatgggaatgagtgtaataccaccttcctgcaacaaggctgtcattggctgtcactgggatagtgagtcggccgagtgcggtggctcatgcctgtaattccagcactttgggaggccgaggcgggcggatcacgagaaagcccgcttatctaccattttatttactgacaactgtgaagtaacccatgaccagctgtgtgaattgctgaagtatgcagttctgggcaaatccaatgttccaaaacccagctggtgccagctttttcatcaaaaccacctaaacaacgtagtggtttttgttctgcagggaatgagtcagctacacttttacaggttctatttggagtttggatgtcttcgaaaagcattcagacataaattccgcttgcctccaccatcatctgattttctagctgatgttgttgggctacaaactgaacaaagagctggagatctgcccaagacaatggaagggcctttaccttctaatgcaaaagccgccatcaaccttcaggatgatcccatcattcaaaagtatggctctaagaaagtgggcttgaccagatgccttctgacaaaggaggaaatgagaacgtttcactttccattacaaggttttcctgattgtgaaaactttttacttaccaaatgtaatggttctatagcagacaatagtcctctctttggacttgactgtgaaatgtgcctcacatccaaggggagagagctaacacgcatctcactggttgctgaaggaggctgctgtgttatggatgaactggtcaaacctgaaaacaagattctggactacctcaccagcttttcgggaatcacgaagaagattcttaacccagtgacgaccaaactcaaagatgtacagaggcagttaaaagcactgcttcctcctgatgctgtgttagtgggccactccttagatttggatctcagagcactgaaaatgatacatccatatgttattgatacatcgttgctttatgtcagagagcagggcagaagatttaagctcaagttcttagccaaagttattttggggaaggatatacagtgtccagacagacttggtcatgatgccacagaagatgctagaacaatccttgaattggctcggtatttccttaagcatggcccaaaaaagattgcagaactaaatctagaagcactagctaatcaccaagaaatacaagcagcaggccaagagcctaaaaacacagcagaagtacttcagcacccaaacacaagtgttttagaatgcttggattcagtgggtcagaagcttctttttttgacccgggagacagatgctggtgaacttccatcttccagaaattgtcaaactattaagtgtctttcaaataaagaggttcttgagcaggccagagtggaaatccccctgtttcccttcagcattgttcagttctcttttaaggccttttcacctgtcctcactgaggagatgaacaaaaggatgaggatcaagtggacagagatatcaactgtctatgctgggccatttagcaaaaattgcaatctcagggctctgaagaggctgtttaaaagctttggcccagtccagtcaatgacttttgttcttgaaacccgtcagcctcatctctgtatacagtatgaagtcctagaagctgcccagctggccatagagtccttggatggtattctggtagatggtatctgcatcaaggtgcagaggcctgtgacagagctcacgcttgattgtgacaccctcgtgaatgagctggaaggagattctgaaaaccaaggctctatatatctgtctggagtgagtgaaaccttcaaagaacagctattgcaggagccccgcctctttcttggcctggaagctgtgatcttgcctaaagatcttaaaagtggaaagcagaaaaaatactgtttcctgaaattcaaaagttttggcagtgcccagcaggccctcaacattctcacaggcaaggactggaagctgaaaggcaggcatgccctaacccccaggcacctccatgcctggctcagaggcttaccacctgaatcaacaaggctcccagggcttcgtgttgtacctcccccctttgaacaggaggccttgcagactctgaaactggaccacccgaagatagcagcctggcgctggagccggaagattggaaagctctacaacagcttgtgcccgggcactctctgcctcatcctgctgccaggaaccaagagcactcatggttcactctctggtctaggactgatgggaataaaagaggaagaagaaagcgctggcccaggcctgtgttcgtgagtcggcctgccatgtttccatgtgccatttcttaccccttgtaggcaatggcaaagaatgtggtcaggctgtagcctccccaaccagcagacagttttatggaaacttggtatagcagctaaaagagtttagtttgtttatatggcatgtataagttttcaataaatgcctaaagttcaagcataaaaaaaaaaag

SEQ ID NO: 349506 - DNA, 2479 bp, Homo sapiens
gaaataggatttccctgcttaagttcccctcgtgctttgctttatctaattgtagtaagcctcttttcaaagacagtgcatcccctctcagtactcaggaaacagtttctcaattcttaatagagtaactaagacctaaaatttgagaatctgacatatcagggtgtatatcctgtccttgcctgttagtggctatgtcgccttagacaaatacccctaacctatcagcctcggcttctccctctgtgaagtgggggtaataataaagcctacctcaaaaggtaattatgagagtggcatatataaaattcttagtacagcactagctgataatagaatgggcttcataaaaattacctattagtggtatttagcataatactggatatagtacacactccataaatggtagatacaattattaatattatttgcattcatcttctttgtgcagactacactgtgttgatcctcttaagtgtaacattcagcagcctgcccagctttaatttcactcacactagatcctctagaaagcaagtttgtgccattgctgcagggaccctggtagattacagtagatggcagttgacatagtgtaaatagtaagaagaagcaataacttccacagttcagcagcctgactacatgttggtctttcagtgcctcacatccaaggggagagagctaacacgcatctcactggttgctgaaggaggctgctgtgttatggatgaactggtcaaacctgaaaacaagattctggactacctcaccagcttttcgggaatcacgaagaagattcttaacccagtgacgaccaaactcaaagatgtacagaggcagttaaaagcactgcttcctcctgatgctgtgttagtgggccactccttagatttggatctcagagcactgaaaatgatacatccatatgttattgatacatcgttgctttatgtcagagagcagggcagaagatttaagctcaagttcttagccaaagttattttggggaaggatatacagtgtccagacagacttggtcatgatgccacagaagatgctagaacaatccttgaattggctcggtatttccttaagcatggcccaaaaaagattgcagaactaaatctagaagcactagctaatcaccaagaaatacaagcagcaggccaagagcctaaaaacacagcagaagtacttcagcacccaaacacaagtgttttagaatgcttggattcagtgggtcagaagcttctttttttgacccgggagacagatgctggtgaacttccatcttccagaaattgtcaaactattaagtgtctttcaaataaagaggttcttgagcaggccagagtggaaatccccctgtttcccttcagcattgttcagttctcttttaaggccttttcacctgtcctcactgaggagatgaacaaaaggatgaggatcaagtggacagagatatcaactgtctatgctgggccatttagcaaaaattgcaatctcagggctctgaagaggctgtttaaaagctttggcccagtccagtcaatgacttttgttcttgaaacccgtcagcctcatctctgtatacagtatgaagtcctagaagctgcccagctggccatagagtccttggatggtattctggtagatggtatctgcatcaaggtgcagaggcctgtgacagagctcacgcttgattgtgacaccctcgtgaatgagctggaaggagattctgaaaaccaaggctctatatatctgtctggagtgagtgaaaccttcaaagaacagctattgcaggagccccgcctctttcttggcctggaagctgtgatcttgcctaaagatcttaaaagtggaaagcagaaaaaatactgtttcctgaaattcaaaagttttggcagtgcccagcaggccctcaacattctcacaggcaaggactggaagctgaaaggcaggcatgccctaacccccaggcacctccatgcctggctcagaggcttaccacctgaatcaacaaggctcccagggcttcgtgttgtacctcccccctttgaacaggaggccttgcagactctgaaactggaccacccgaagatagcagcctggcgctggagccggaagattggaaagctctacaacagcttgtgcccgggcactctctgcctcatcctgctgccaggaaccaagagcactcatggttcactctctggtctaggactgatgggaataaaagaggaagaagaaagcgctggcccaggcctgtgttcgtgagtcggcctgccatgtttccatgtgccatttcttaccccttgtaggcaatggcaaagaatgtggtcaggctgtagcctccccaaccagcagacagttttatggaaacttggtatagcagctaaaagagtttagtttgtttatatggcatgtataagttttcaataaatgcctaaagttcaagcataaaaaaaaaaag

SEQ ID NO: 349507 - DNA, 1142 bp, Homo sapiens
agcgggccggaagtcgctcgacttctacttccggtccgttcaaaaagcccgcgaggctgaggggcggttgttgttggcagctgtggctaaggaggggagaacctctgctccccgcccgtcttctcttctgcgtttcccgggctagggggcgtggggagtggttttaggcggcgaagccgctcggcagcaccttccttctttgccaggcagacgcccgttgtagccgttggggaaccgttgagaatccgccgatgcggacggtaaagccgtttgggttagagcggcgcgggtgtccagtccgcggaacggggagatcgttggcaccttcgcttttttaggggaacggggatagttcggtaaactgaattgagaagcggatccgagggaggttgaaagctgtcaagcccgtgtagctctcccgctaggaggcggcacgcgggggaataggggcgctggagtttccccagctctacctcatctttctccacagccatggagccagagagggaagggaccgagagacaccccaggaaggtcagggaaagcaggcaggccccaaataagctggtcggggcagctgaggcgatgaaagccggttgggatctcgaggagagtcagcccgaggccaagaaagcccgcttatctaccattttatttactgacaactgtgaagtaacccatgaccagctgtgtgaattgctgaagtatgcagttctgggcaaatccaatgttccaaaacccagctggtgccagctttttcatcaaaaccacctaaacaacgtagtggtttttgttctgcagggaatgagtcagctacacttttacaggttctatttggagtttggatgtcttcgaaaagcattcagacataaattccgcttgcctccaccatcatctgattttctagctgatgttgttgggctacaaactgaacaaagagctggagatctgcccaagacaatggaagggcctttaccttctaatgcaaaagccgccatcaaccttcaggatgatcccatcattcaaaagtatggctctaagaaagtgggcttgaccagatgccttctgacaaaggaggaaatgagaacgtttcactttccattacaagggttggcttaggcttactctgatattgctaacaa

SEQ ID NO: 349508 - DNA, 352 bp, Homo sapiens
aggctggggggcaggagagagaaaaccagaaaggagagaaaaacggagagaggaaagaaagaaaaagagaaaacaagccaaaaagcatgtaagaacaagaaaacaaacagagctggcaacagcaaatcagagtgacaaaaagagaaggagaaggacataggaagatgaagataatagagttcggattcccagaacagtgactcattggttgtatgaaataacagaatgctgctatttagaaactgttccccaccctctttccttgtctaaattctgaactccttaactactaaaatggtgccctattcatttttcatctcatgcatggaaacactacctgactccatagtac

SEQ ID NO: 349509 - DNA, 682 bp, Homo sapiens
tctgaacacatccaaacatcagaaggaacaaactccggacacgcagcctttaagaattgtaacactcaccgcgagggtccgtggcttcattcttgaagtcagtgagacgaagaacccaccaattccggtaggagtaggaaatcacatcaccttcttttaatcagtctcaaatacctggccccttgtggaacctgcaagagccaggtttggcgaatgcaatgataagcaattgtctaatcactgccttgaaaaagagcagagcatttgagtatgctgtctcctcctctccctcacttcagttgggcccaacatgacagtcttaatggaagctcgggggtcaaaggctggtggcttacttcacgtatattgcagcatttcagtactgctctgcacgtgtgctcccccgcctgatgaggtaagtgttaaacagggatgatcacagcttcaagtaagcaatgggaattggatgttttatgtcctctggcgccatcttcagcagagaaatatataggtcacttttacttgtctggttttggtcttgaaatatgtactgaaacttgtgaaggagcagacctatattaggatagagtaaaagagggaaagacaaaaacctcttgggcttttcaggagacttggttcattctctgcttttcaagccatctcatggccacatgcctgcttt

SEQ ID NO: 349510 - DNA, 4993 bp, Homo sapiens
  misc_feature (2209)..(2209): n is a, c, g, or t
acttacaaactgataggcttttaattgagcgcctccgccgagcccgagatgaaagggaagcggcggtgaaaggcggcccgcctgccctccggcctcaatactgattagccatctcgacagtgaatagttcaaggcattttcaaacttttttcctcagctctttccccttccttctcctcctcccaccccctcctccaatatctgccttgcccactccttttttagagaaaacaaatcatttccattgtttgcaaataaaatccgcaggacatccacgccaactgctgctgggggttggaggctttaggcctggcgcagagtaattaatggcccccactcccgggcccgcgccggccttcgggggtttggcctcctgcgcgaggtgcgcaggctcggacgctggcgcctcccaaaagccccgggcgcgcaggcccccaggcgcccccatgcgctcggaccctcggagtggagttttgagaaaagcgaacgcacgctgaccacgacccgcacccacgcagcacagcgcagccccacgagcgtgtgtggccacaccgggggacgcaggagccactccacggcccccccaggcttcaggtgctgaggctgcctcccctgagccgccggcgtaataagctgctggaattagaggagagggggaagagctgagtctggaggctggggagggacgcccttggctgcgtcccccccggccctgtcgcaggccccagaatttcagtgcccgggcctcgcggggaggccgcggcgatagcggcccaaaggtgggctcgcggcgttaggagcactaccattggttgggtcgacacctagacggccgcgcactcagtaaccaggcacacatggacacacccgaaggataagagtgcttcacagacgcgctgccccgcagagacagcgtaggactgtcccgccctccgaaacgcgcacctgggacttgctccccggagaccagacaaccgcctccctcagcgtggggcctcgccacccgctcgccgactcacctccctcagatgtcgcacggacactacaaacccccttgaatgcaggtgtgctcttacacgctcacactgacaaacaccagccccaagcacacaccgcctcactcccctcttctctccaaatgagcttcagtcaagttaccatttcataaagtttaccaacccaaagaatcaagggataaaatccaaacgcagaaaaagaatgcctaggagcaaattctaaaactcaccccggaaagttctcggtacccgtgcggagtgggagacagagaaagaagccggggaggggagtcaggtgggggaggggagtgagatgggccaagaggagagggcgagcataccaagggcagttccagacccgacccccgcgcgcacccggctcagccccaggtgcgcgccggtcgaaaccgggtctccaggctcggcccccgccccccacgcgggcacagactggctcccgactcccagagctcccagccccaccatttatcaaaaggacttgacaacaaaagaagagccggggcggaaaagcggaggaggggagattcaaagtcttctaagtcgttccgaggaagggggtgtgtcctcctccccaccccctctaatttctgcgagttcctggaggagaccctcgaacccgctccggacgctatcagagccccgataactcacgcagcgccacaggcatgcatacacactgggcatccaggtccaggtacccggtggcacgcacagcgcctccccttttcttcccaaacaacccgagtgacggtgcaaatcgaggggaacgcggcagtcccgctccgcttccctggaagaacccgcgttcccacaggcagccgccccctccctctctcgctccttccctcggctctcctagcgcagctcattccgactcggcgttccaataaattcgagagagcagccccgagttaccctggctccccagcctgcggggatggcggcaggtgggagaaggtcggggagggggcatgagtgagcctgagatgtttcttcccccatacacccatggccaggcctcttcttcgcagcctcttagccctgcttacgacccgagggggtcaaagaattgaggcgaggtttgccccaccattgacctccaggactagaagttccttggtggtgtggctcttagaagtctccgagtttggggttagggaactacagagggnggcagcctgacctccgcacgcaacacgccccgcgaggactcgcggcggcggggtggggtggcgggaaatctcccgtgttagaagttgccgccgctggtctcgggtacccggagccgcgcccgaactccgcgaccccaacagaccgaggctcccagaggtggaagggcgtctctccgacaccgagagggcaggcgcacactccaggcctgcgcgcccctctcggcgccctgggcgcacctgcgcactttactctcgctattcattttcctgacaccgtgcgcctctttcattctttttcttagagcccccaccccacccccatcccaggaggccgctcctcttttcccctcctccagttccctctcaatctcctccttcctctccgtctctctctccctctctctttttcccttcaagtcgcacccgccttgtaatcagcaacaaaagctgacataaatcacgggaggattgacaagagctgacaaataactgattgattgcggtcgaggaacattgacaattgatggaggggtggagatgcccaaagaagggggggagggaggaaaacagggtgggagagtaagaatggggggttgggggacagactgagggtgaaacagaggaaacatgtgacccccgctgctgccccaatctacgcgtccccgggcgtcacgtggccgggaagggcggagagcccagcgctcctcgcggtgttgagccgccgccgctgcgactgcccatctagcttctggtttctccgccgcggaatctgaggaaattagagcgggcgggcgggcttcttccagctccggctccccaccttgccttcttaccctggtggctgcgctgcgccgcgcgggatctcgattactgcgaaggaaaaaacactgggtgtgcaggttcccttcgcccctggagttgacagtccggccggtgtccacactcccaccggtgctccttctggacaccccccgcagtctgttcctcacgcgcaccccccttcaaaagaaggtttcagtttattttcgagctggggaaaggaagaacgacgaggaggaaaaaagagggaggcggcggatggcaaacgtagaataaatgtccatctcgtcctcccagcgaaatcgagggaggggacacacaggggggcggcgaagagggagctgcccattaaaaccggcactgagagtcctggcagcggcggcggcggcggcgcgggacgcgtcacatccccttgaccctccaatcacctcgggctcccatttgattggaaggcggcaaaggctttaatctcccccttggtgcagctgcttttgaagtgagtttcctcgccagagccccggctggacacgcagcggctcgcatcgcagagcgcagcgccggcgcggggccgcgagaacgcagcgcaggggagcagcccgaggcggacaccgcgagccgcccggcactcccgcagtccagccggctcctctagcccggccacggctccgctgcgggccacccaggattactcgcgtctggctccaggcgccgagaaggcgcgctgggcgcccgtggccgccgcgccagctcctcctcctcccgctgctcctgctcccggggcgagcgcgcagccccgagcccgccccgcgcctcccggagccctcccccccgctgctcccatgcgcgcgggtgggtcatgagcacagcgccctcgctttctgccctaagaagcagtaagcacagcggcggcggcggcggcggaggcggaggcggcggtgcagaccctgcctggaccagcgcgctctctggaaatagctccggccccggcccaggctcgtccccggccggcagcaccaagccttttgtgcacgccgtgcccccctctgaccccctgcgccaggccaaccgcctgccaatcaaggtgctgaagatgctgacggcacgaactggccacattttgcaccccgagtacctgcagcccctgccttccacgccggtcagccccatcgagctcgatgccaagaagagcccgctggcgctgttggcgcaaacatgttcgcagatcgggaagcccgacccctcgcccctccctggccggccaccccctctacccctacggctttatgctccctaacgacccactcccccacatctgcaactgggtgtcggccaacgggccgtgcgacaagcgcttcgccacgtccgaagagctgctgagccacttgcggacccatacggcatttcccgggacagacaaactgctgtcgggctaccccagctcgtcgtctctggccagcgctgccgcggccgccatggcttgccacatgcacatccccacctcgggcgcaccgggcagccctgggacgctggcgctgcgcagcccccaccacgcgctgggactcagcagccgctaccacccctactccaagagcccgcttcccacgcctggcgcccccgtgccggtgcccgccgccaccggaccgtactactccccctacgccctctacggacagagactgaccaccgcctcggcgctggggtatcagtgagggcggccgggagggcgagcgagggagaggagggagagggggaggggaggagtccagggagaggcgggatcacggcccaggctgctgacacccgcgcgtggggaggactcgggccacgaaaggaaagaaatgtataccgtatctatctacccgacagcagcgaccgagacccggtgggacactccccttctccccactttcacctccccacccaaactttataaaagttgaaaaaatatcatttgactttttatag

SEQ ID NO: 349511 - DNA, 4305 bp, Homo sapiens
  misc_feature (2209)..(2209): n is a, c, g, or t
acttacaaactgataggcttttaattgagcgcctccgccgagcccgagatgaaagggaagcggcggtgaaaggcggcccgcctgccctccggcctcaatactgattagccatctcgacagtgaatagttcaaggcattttcaaacttttttcctcagctctttccccttccttctcctcctcccaccccctcctccaatatctgccttgcccactccttttttagagaaaacaaatcatttccattgtttgcaaataaaatccgcaggacatccacgccaactgctgctgggggttggaggctttaggcctggcgcagagtaattaatggcccccactcccgggcccgcgccggccttcgggggtttggcctcctgcgcgaggtgcgcaggctcggacgctggcgcctcccaaaagccccgggcgcgcaggcccccaggcgcccccatgcgctcggaccctcggagtggagttttgagaaaagcgaacgcacgctgaccacgacccgcacccacgcagcacagcgcagccccacgagcgtgtgtggccacaccgggggacgcaggagccactccacggcccccccaggcttcaggtgctgaggctgcctcccctgagccgccggcgtaataagctgctggaattagaggagagggggaagagctgagtctggaggctggggagggacgcccttggctgcgtcccccccggccctgtcgcaggccccagaatttcagtgcccgggcctcgcggggaggccgcggcgatagcggcccaaaggtgggctcgcggcgttaggagcactaccattggttgggtcgacacctagacggccgcgcactcagtaaccaggcacacatggacacacccgaaggataagagtgcttcacagacgcgctgccccgcagagacagcgtaggactgtcccgccctccgaaacgcgcacctgggacttgctccccggagaccagacaaccgcctccctcagcgtggggcctcgccacccgctcgccgactcacctccctcagatgtcgcacggacactacaaacccccttgaatgcaggtgtgctcttacacgctcacactgacaaacaccagccccaagcacacaccgcctcactcccctcttctctccaaatgagcttcagtcaagttaccatttcataaagtttaccaacccaaagaatcaagggataaaatccaaacgcagaaaaagaatgcctaggagcaaattctaaaactcaccccggaaagttctcggtacccgtgcggagtgggagacagagaaagaagccggggaggggagtcaggtgggggaggggagtgagatgggccaagaggagagggcgagcataccaagggcagttccagacccgacccccgcgcgcacccggctcagccccaggtgcgcgccggtcgaaaccgggtctccaggctcggcccccgccccccacgcgggcacagactggctcccgactcccagagctcccagccccaccatttatcaaaaggacttgacaacaaaagaagagccggggcggaaaagcggaggaggggagattcaaagtcttctaagtcgttccgaggaagggggtgtgtcctcctccccaccccctctaatttctgcgagttcctggaggagaccctcgaacccgctccggacgctatcagagccccgataactcacgcagcgccacaggcatgcatacacactgggcatccaggtccaggtacccggtggcacgcacagcgcctccccttttcttcccaaacaacccgagtgacggtgcaaatcgaggggaacgcggcagtcccgctccgcttccctggaagaacccgcgttcccacaggcagccgccccctccctctctcgctccttccctcggctctcctagcgcagctcattccgactcggcgttccaataaattcgagagagcagccccgagttaccctggctccccagcctgcggggatggcggcaggtgggagaaggtcggggagggggcatgagtgagcctgagatgtttcttcccccatacacccatggccaggcctcttcttcgcagcctcttagccctgcttacgacccgagggggtcaaagaattgaggcgaggtttgccccaccattgacctccaggactagaagttccttggtggtgtggctcttagaagtctccgagtttggggttagggaactacagagggnggcagcctgacctccgcacgcaacacgccccgcgaggactcgcggcggcggggtggggtggcgggaaatctcccgtgttagaagttgccgccgctggtctcgggtacccggagccgcgcccgaactccgcgaccccaacagaccgaggctcccagaggtggaagggcgtctctccgacaccgagagggcaggcgcacactccaggcctgcgcgcccctctcggcgccctgggcgcacctgcgcactttactctcgctattcattttcctgacaccgtgcgcctctttcattctttttcttagagcccccaccccacccccatcccaggaggccgctcctcttttcccctcctccagttccctctcaatctcctccttcctctccgtctctctctccctctctctttttcccttcaagtcgcacccgccttgtaatcagcaacaaaagctgacataaatcacgggaggattgacaagagctgacaaataactgattgattgcggtcgaggaacattgacaattgatggaggggtggagatgcccaaagaagggggggagggaggaaaacagggtgggagagtaagaatggggggttgggggacagactgagggtgaaacagaggaaacatgtgacccccgctgctgccccaatctacgcgtccccgggcgtcacgtggccgggaagggcggagagcccagcgctcctcgcggtgttgagccgccgccgctgcgactgcccatctagcttctggtttctccgccgcggaatctgaggaaattagagcgggcgggcgggcttcttccagctccggctccccaccttgccttcttaccctggtggctgcgctgcgccgcgcgggatctcgattactgcgaaggaaaaaacactgggtgtgcaggttcccttcgcccctggagttgacagtccggccggtgtccacactcccaccggtgctccttctggacaccccccgcagtctgttcctcacgcgcaccccccttcaaaagaaggtttcagtttattttcgagctggggaaaggaagaacgacgaggaggaaaaaagagggaggcggcggatggcaaacgtagaataaatgtccatctcgtcctcccagcgaaatcgagggaggggacacacaggggggcggcgaagagggagctgcccattaaaaccggcactgagagtcctggcagcggcggcggcggcggcgcgggacgcgtcacatccccttgaccctccaatcacctcgggctcccatttgattggaaggcggcaaaggctttaatctcccccttggtgcagctgcttttgaagtgagtttcctcgccagagccccggctggacacgcagcggctcgcatcgcagagcgcagcgccggcgcggggccgcgagaacgcagcgcaggggagcagcccgaggcggacaccgcgagccgcccggcactcccgcagtccagccggctcctctagcccggccacggctccgctgcgggccacccaggattactcgcgtctggctccaggcgccgagaaggcgcgctgggcgcccgtggccgccgcgccagctcctcctcctcccgctgctcctgctcccggggcgagcgcgcagccccgagcccgccccgcgcctcccggagccctcccccccgctgctcccatgcgcgcgggtgggtcatgagcacagcgccctcgctttctgccctaagaagcagtaagcacagcggcggcggcggcggcggaggcggaggcggcggtgcagaccctgcctggaccagcgcgctctctggaaatagctccggccccggcccaggctcgtccccggccggcagcaccaagccttttgtgcacgccgtgcccccctctgaccccctgcgccaggccaaccgcctgccaatcaaggtgctgaagatgctgacggcacgaactggccacattttgcaccccgagtacctgcagcccctgccttccacgccggtcagccccatcgaggtaaggaccctctctctggatcgcactgggaccactaccctggctgccaccctagggctttctttttctcgggatctgggcggaggtgggggggtcggagtgattc

SEQ ID NO: 349512 - DNA, 7559 bp, Homo sapiens
  misc_feature (2209)..(2209): n is a, c, g, or t
  misc_feature (6739)..(6739): n is a, c, g, or t
  misc_feature (6746)..(6746): n is a, c, g, or t
acttacaaactgataggcttttaattgagcgcctccgccgagcccgagatgaaagggaagcggcggtgaaaggcggcccgcctgccctccggcctcaatactgattagccatctcgacagtgaatagttcaaggcattttcaaacttttttcctcagctctttccccttccttctcctcctcccaccccctcctccaatatctgccttgcccactccttttttagagaaaacaaatcatttccattgtttgcaaataaaatccgcaggacatccacgccaactgctgctgggggttggaggctttaggcctggcgcagagtaattaatggcccccactcccgggcccgcgccggccttcgggggtttggcctcctgcgcgaggtgcgcaggctcggacgctggcgcctcccaaaagccccgggcgcgcaggcccccaggcgcccccatgcgctcggaccctcggagtggagttttgagaaaagcgaacgcacgctgaccacgacccgcacccacgcagcacagcgcagccccacgagcgtgtgtggccacaccgggggacgcaggagccactccacggcccccccaggcttcaggtgctgaggctgcctcccctgagccgccggcgtaataagctgctggaattagaggagagggggaagagctgagtctggaggctggggagggacgcccttggctgcgtcccccccggccctgtcgcaggccccagaatttcagtgcccgggcctcgcggggaggccgcggcgatagcggcccaaaggtgggctcgcggcgttaggagcactaccattggttgggtcgacacctagacggccgcgcactcagtaaccaggcacacatggacacacccgaaggataagagtgcttcacagacgcgctgccccgcagagacagcgtaggactgtcccgccctccgaaacgcgcacctgggacttgctccccggagaccagacaaccgcctccctcagcgtggggcctcgccacccgctcgccgactcacctccctcagatgtcgcacggacactacaaacccccttgaatgcaggtgtgctcttacacgctcacactgacaaacaccagccccaagcacacaccgcctcactcccctcttctctccaaatgagcttcagtcaagttaccatttcataaagtttaccaacccaaagaatcaagggataaaatccaaacgcagaaaaagaatgcctaggagcaaattctaaaactcaccccggaaagttctcggtacccgtgcggagtgggagacagagaaagaagccggggaggggagtcaggtgggggaggggagtgagatgggccaagaggagagggcgagcataccaagggcagttccagacccgacccccgcgcgcacccggctcagccccaggtgcgcgccggtcgaaaccgggtctccaggctcggcccccgccccccacgcgggcacagactggctcccgactcccagagctcccagccccaccatttatcaaaaggacttgacaacaaaagaagagccggggcggaaaagcggaggaggggagattcaaagtcttctaagtcgttccgaggaagggggtgtgtcctcctccccaccccctctaatttctgcgagttcctggaggagaccctcgaacccgctccggacgctatcagagccccgataactcacgcagcgccacaggcatgcatacacactgggcatccaggtccaggtacccggtggcacgcacagcgcctccccttttcttcccaaacaacccgagtgacggtgcaaatcgaggggaacgcggcagtcccgctccgcttccctggaagaacccgcgttcccacaggcagccgccccctccctctctcgctccttccctcggctctcctagcgcagctcattccgactcggcgttccaataaattcgagagagcagccccgagttaccctggctccccagcctgcggggatggcggcaggtgggagaaggtcggggagggggcatgagtgagcctgagatgtttcttcccccatacacccatggccaggcctcttcttcgcagcctcttagccctgcttacgacccgagggggtcaaagaattgaggcgaggtttgccccaccattgacctccaggactagaagttccttggtggtgtggctcttagaagtctccgagtttggggttagggaactacagagggnggcagcctgacctccgcacgcaacacgccccgcgaggactcgcggcggcggggtggggtggcgggaaatctcccgtgttagaagttgccgccgctggtctcgggtacccggagccgcgcccgaactccgcgaccccaacagaccgaggctcccagaggtggaagggcgtctctccgacaccgagagggcaggcgcacactccaggcctgcgcgcccctctcggcgccctgggcgcacctgcgcactttactctcgctattcattttcctgacaccgtgcgcctctttcattctttttcttagagcccccaccccacccccatcccaggaggccgctcctcttttcccctcctccagttccctctcaatctcctccttcctctccgtctctctctccctctctctttttcccttcaagtcgcacccgccttgtaatcagcaacaaaagctgacataaatcacgggaggattgacaagagctgacaaataactgattgattgcggtcgaggaacattgacaattgatggaggggtggagatgcccaaagaagggggggagggaggaaaacagggtgggagagtaagaatggggggttgggggacagactgagggtgaaacagaggaaacatgtgacccccgctgctgccccaatctacgcgtccccgggcgtcacgtggccgggaagggcggagagcccagcgctcctcgcggtgttgagccgccgccgctgcgactgcccatctagcttctggtttctccgccgcggaatctgaggaaattagagcgggcgggcgggcttcttccagctccggctccccaccttgccttcttaccctggtggctgcgctgcgccgcgcgggatctcgattactgcgaaggaaaaaacactgggtgtgcaggttcccttcgcccctggagttgacagtccggccggtgtccacactcccaccggtgctccttctggacaccccccgcagtctgttcctcacgcgcaccccccttcaaaagaaggtttcagtttattttcgagctggggaaaggaagaacgacgaggaggaaaaaagagggaggcggcggatggcaaacgtagaataaatgtccatctcgtcctcccagcgaaatcgagggaggggacacacaggggggcggcgaagagggagctgcccattaaaaccggcactgagagtcctggcagcggcggcggcggcggcgcgggacgcgtcacatccccttgaccctccaatcacctcgggctcccatttgattggaaggcggcaaaggctttaatctcccccttggtgcagctgcttttgaagtgagtttcctcgccagagccccggctggacacgcagcggctcgcatcgcagagcgcagcgccggcgcggggccgcgagaacgcagcgcaggggagcagcccgaggcggacaccgcgagccgcccggcactcccgcagtccagccggctcctctagcccggccacggctccgctgcgggccacccaggattactcgcgtctggctccaggcgccgagaaggcgcgctgggcgcccgtggccgccgcgccagctcctcctcctcccgctgctcctgctcccggggcgagcgcgcagccccgagcccgccccgcgcctcccggagccctcccccccgctgctcccatgcgcgcgggtgggtcatgagcacagcgccctcgctttctgccctaagaagcagtaagcacagcggcggcggcggcggcggaggcggaggcggcggtgcagaccctgcctggaccagcgcgctctctggaaatagctccggccccggcccaggctcgtccccggccggcagcaccaagccttttgtgcacgccgtgcccccctctgaccccctgcgccaggccaaccgcctgccaatcaaggtgctgaagatgctgacggcacgaactggccacattttgcaccccgagtacctgcagcccctgccttccacgccggtcagccccatcgagctcgatgccaagaagagcccgctggcgctgttggcgcaaacatgttcgcagatcgggaagcccgacccctcgccctcctccaaactctcctcggttgcctccaacgggggcggcgcgggcggtgccggcggcggtgctgcgggcgacaaggacaccaaatcgggccccctgaagctgagcgacatcggcgtggaggacaagtcgagtttcaagccgtactccaaacccggctcggataagaaggagccgggaggcggcggtggaggcggtggcggtggcgggggcggcggcgggggtgtttcgtcggagaagtcgggattccgggtaccgagcgccacctgccagccattcacgcccaggacaggcagcccgagctccagcgcctcggcctgctcgccgggaggtatgctgtcctcggccgggggtgccccggagggcaaggacgacaagaaagacaccgacgtgggcggcggtggcaagggcaccgggggcgcctcggccgaagggggacccacggggctggcacacggccggattagctgcggcggcgggattaatgtggatgtgaaccagcatccggatgggggcccgggaggcaaggctctgggctcggactgcggcggttcatcgggctccagctccggctccggccccagcgcgcccacctcctcctcagtgttgggctctgggctggtggctcccgtgtcaccctacaagccgggccagacagtgttccctctgcctcccgcgggtatgacctacccaggcagcctggccggggcctacgccggctacccgccccagttcctgccacacggcgtggcacttgaccccaccaagccgggcagcctggtgggggcgcagctggcggcggccgcggccgggtctctgggctgcagtaagccggccggctccagccctttggccggagcgtctccgccgtccgtgatgacagccagtttgtgccgggacccttactgcctcagctaccactgcgctagccacctggcaggggcggcggccgccagcgcttcttgcgcacatgatccggctgctgcggctgcggcgctgaagtccggatacccgctggtgtaccccacgcacccgctgcacggtgtgcactcctcgctaacggccgccgcggctgctggcgccacaccgccctccctggccggccaccccctctacccctacggctttatgctccctaacgacccactcccccacatctgcaactgggtgtcggccaacgggccgtgcgacaagcgcttcgccacgtccgaagagctgctgagccacttgcggacccatacggcatttcccgggacagacaaactgctgtcgggctaccccagctcgtcgtctctggccagcgctgccgcggccgccatggcttgccacatgcacatccccacctcgggcgcaccgggcagccctgggacgctggcgctgcgcagcccccaccacgcgctgggactcagcagccgctaccacccctactccaagagcccgcttcccacgcctggcgcccccgtgccggtgcccgccgccaccggaccgtactactccccctacgccctctacggacagagactgaccaccgcctcggcgctggggtatcagtgagggcggccgggagggcgagcgagggagaggagggagagggggaggggaggagtccagggagaggcgggatcacggcccaggctgctgacacccgcgcgtggggaggactcgggccacgaaaggaaagaaatgtataccgtatctatctacccgacagcagcgaccgagacccggtgggacactccccttctccccactttcacctccccacccaaactttataaaagttgaaaaaatatcatttgactttttatagaaaaaaaaaggaaaaaataattgagaaagtgttcatctgaggactgcatcggtggacactggtatttatttatgttagctccaagcggaccggtggttcaaaagtgcattatttagtttgagctctgtaggtaaaaaggaggtgggaaaaattttaaaacttgagggtaaaaatgtggaaaacaaaccctcccatcccttgtagattataaataaaagcaaaaccgccacagaactagaggtcttctctttaatgttactttaaaattgctatgattgtattgtacgttatttaatgtctgattgaaacacaaatttacatgcatgtttgttacaaaaaaaatgaaaaaaaaagtcacaatttgtcagctctgatttcaaattgcaattatttttaaggtgtataccatcgaagagaatgggtatttttttgtatgtattctggaagaaaacaacaaaaaaaaaaagaaaaagaaaaaattctattccaaaacctcatttgccttattttgttctttaaaaggaacacttaactatttttaatttttaagtccacccgctgagaaggggacaaggtttacgtcatgtactaaaataatagacaatgtatcgctttaaagattaaaattccgtatatttgatgtaaaaaaaaaaaaaanaaaaaanaaaaaaaaaaaaaaaaaaaaaaaaaaaaaaaaaaaaaaaaaaaaaaagaagaaaaaaaaaaaaaaaacaaaaaaaaggaaaaacaaaaaaaaaacaaaaagaaaaacaagaacaaagacgaacaataaaaaaaagagaagaacaggaaaggcacacaaaagaactaaccacgaacgaacaacagaacaagaggagaggaacaaaacagcggacacaaagcaggagcacaacagtcggagacaagaggcacagcaccaatagcctcgggaaggcagcgagcgacgcaacgcacagacgtggagtgaagcgaacgaaccgcacacaagagaagagacagaaacaacaacacacacacacgccacgatgggtagagaagaaaacagagtagagcgaacgagaccgaaagacgaagagaggagagcgaaaatccagtagaggggagacaaacaaaaggaggaggagagagcaaacgaagaggcgagcgacagaaggcgcgacaaaagaaagaacagagcaacgacagcgcgccgcaacacgcaggagggagagacggcacaagatgacgtacggacgaaggggagaagagacaagatcatagtccataaggacgaacggcggcaggagcaagcgcgcaaggaacaaggagaaagagaagagcggcacagcgtggagcccagggagcggagcggcccagacagcggagaacgaacgacagaagcacgaagcagcagagagagcggaggagcagagaagaagtagaggagaagaggacgagcaagaacgatgcagccaggggcaggggccggcgggggg

SEQ ID NO: 349513 - DNA, 6725 bp, Homo sapiens
  misc_feature (2209)..(2209): n is a, c, g, or t
acttacaaactgataggcttttaattgagcgcctccgccgagcccgagatgaaagggaagcggcggtgaaaggcggcccgcctgccctccggcctcaatactgattagccatctcgacagtgaatagttcaaggcattttcaaacttttttcctcagctctttccccttccttctcctcctcccaccccctcctccaatatctgccttgcccactccttttttagagaaaacaaatcatttccattgtttgcaaataaaatccgcaggacatccacgccaactgctgctgggggttggaggctttaggcctggcgcagagtaattaatggcccccactcccgggcccgcgccggccttcgggggtttggcctcctgcgcgaggtgcgcaggctcggacgctggcgcctcccaaaagccccgggcgcgcaggcccccaggcgcccccatgcgctcggaccctcggagtggagttttgagaaaagcgaacgcacgctgaccacgacccgcacccacgcagcacagcgcagccccacgagcgtgtgtggccacaccgggggacgcaggagccactccacggcccccccaggcttcaggtgctgaggctgcctcccctgagccgccggcgtaataagctgctggaattagaggagagggggaagagctgagtctggaggctggggagggacgcccttggctgcgtcccccccggccctgtcgcaggccccagaatttcagtgcccgggcctcgcggggaggccgcggcgatagcggcccaaaggtgggctcgcggcgttaggagcactaccattggttgggtcgacacctagacggccgcgcactcagtaaccaggcacacatggacacacccgaaggataagagtgcttcacagacgcgctgccccgcagagacagcgtaggactgtcccgccctccgaaacgcgcacctgggacttgctccccggagaccagacaaccgcctccctcagcgtggggcctcgccacccgctcgccgactcacctccctcagatgtcgcacggacactacaaacccccttgaatgcaggtgtgctcttacacgctcacactgacaaacaccagccccaagcacacaccgcctcactcccctcttctctccaaatgagcttcagtcaagttaccatttcataaagtttaccaacccaaagaatcaagggataaaatccaaacgcagaaaaagaatgcctaggagcaaattctaaaactcaccccggaaagttctcggtacccgtgcggagtgggagacagagaaagaagccggggaggggagtcaggtgggggaggggagtgagatgggccaagaggagagggcgagcataccaagggcagttccagacccgacccccgcgcgcacccggctcagccccaggtgcgcgccggtcgaaaccgggtctccaggctcggcccccgccccccacgcgggcacagactggctcccgactcccagagctcccagccccaccatttatcaaaaggacttgacaacaaaagaagagccggggcggaaaagcggaggaggggagattcaaagtcttctaagtcgttccgaggaagggggtgtgtcctcctccccaccccctctaatttctgcgagttcctggaggagaccctcgaacccgctccggacgctatcagagccccgataactcacgcagcgccacaggcatgcatacacactgggcatccaggtccaggtacccggtggcacgcacagcgcctccccttttcttcccaaacaacccgagtgacggtgcaaatcgaggggaacgcggcagtcccgctccgcttccctggaagaacccgcgttcccacaggcagccgccccctccctctctcgctccttccctcggctctcctagcgcagctcattccgactcggcgttccaataaattcgagagagcagccccgagttaccctggctccccagcctgcggggatggcggcaggtgggagaaggtcggggagggggcatgagtgagcctgagatgtttcttcccccatacacccatggccaggcctcttcttcgcagcctcttagccctgcttacgacccgagggggtcaaagaattgaggcgaggtttgccccaccattgacctccaggactagaagttccttggtggtgtggctcttagaagtctccgagtttggggttagggaactacagagggnggcagcctgacctccgcacgcaacacgccccgcgaggactcgcggcggcggggtggggtggcgggaaatctcccgtgttagaagttgccgccgctggtctcgggtacccggagccgcgcccgaactccgcgaccccaacagaccgaggctcccagaggtggaagggcgtctctccgacaccgagagggcaggcgcacactccaggcctgcgcgcccctctcggcgccctgggcgcacctgcgcactttactctcgctattcattttcctgacaccgtgcgcctctttcattctttttcttagagcccccaccccacccccatcccaggaggccgctcctcttttcccctcctccagttccctctcaatctcctccttcctctccgtctctctctccctctctctttttcccttcaagtcgcacccgccttgtaatcagcaacaaaagctgacataaatcacgggaggattgacaagagctgacaaataactgattgattgcggtcgaggaacattgacaattgatggaggggtggagatgcccaaagaagggggggagggaggaaaacagggtgggagagtaagaatggggggttgggggacagactgagggtgaaacagaggaaacatgtgacccccgctgctgccccaatctacgcgtccccgggcgtcacgtggccgggaagggcggagagcccagcgctcctcgcggtgttgagccgccgccgctgcgactgcccatctagcttctggtttctccgccgcggaatctgaggaaattagagcgggcgggcgggcttcttccagctccggctccccaccttgccttcttaccctggtggctgcgctgcgccgcgcgggatctcgattactgcgaaggaaaaaacactgggtgtgcaggttcccttcgcccctggagttgacagtccggccggtgtccacactcccaccggtgctccttctggacaccccccgcagtctgttcctcacgcgcaccccccttcaaaagaaggtttcagtttattttcgagctggggaaaggaagaacgacgaggaggaaaaaagagggaggcggcggatggcaaacgtagaataaatgtccatctcgtcctcccagcgaaatcgagggaggggacacacaggggggcggcgaagagggagctgcccattaaaaccggcactgagagtcctggcagcggcggcggcggcggcgcgggacgcgtcacatccccttgaccctccaatcacctcgggctcccatttgattggaaggcggcaaaggctttaatctcccccttggtgcagctgcttttgaagtgagtttcctcgccagagccccggctggacacgcagcggctcgcatcgcagagcgcagcgccggcgcggggccgcgagaacgcagcgcaggggagcagcccgaggcggacaccgcgagccgcccggcactcccgcagtccagccggctcctctagcccggccacggctccgctgcgggccacccaggattactcgcgtctggctccaggcgccgagaaggcgcgctgggcgcccgtggccgccgcgccagctcctcctcctcccgctgctcctgctcccggggcgagcgcgcagccccgagcccgccccgcgcctcccggagccctcccccccgctgctcccatgcgcgcgggtgggtcatgagcacagcgccctcgctttctgccctaagaagcagtaagcacagcggcggcggcggcggcggaggcggaggcggcggtgcagaccctgcctggaccagcgcgctctctggaaatagctccggccccggcccaggctcgtccccggccggcagcaccaagccttttgtgcacgccgtgcccccctctgaccccctgcgccaggccaaccgcctgccaatcaaggtgctgaagatgctgacggcacgaactggccacattttgcaccccgagtacctgcagcccctgccttccacgccggtcagccccatcgagctcgatgccaagaagagcccgctggcgctgttggcgcaaacatgttcgcagatcgggaagcccgacccctcgccctcctccaaactctcctcggttgcctccaacgggggcggcgcgggcggtgccggcggcggtgctgcgggcgacaaggacaccaaatcgggccccctgaagctgagcgacatcggcgtggaggacaagtcgagtttcaagccgtactccaaacccggctcggataagaaggagccgggaggcggcggtggaggcggtggcggtggcgggggcggcggcgggggtgtttcgtcggagaagtcgggattccgggtaccgagcgccacctgccagccattcacgcccaggacaggcagcccgagctccagcgcctcggcctgctcgccgggaggtatgctgtcctcggccgggggtgccccggagggcaaggacgacaagaaagacaccgacgtgggcggcggtggcaagggcaccgggggcgcctcggccgaagggggacccacggggctggcacacggccggattagctgcggcggcgggattaatgtggatgtgaaccagcatccggatgggggcccgggaggcaaggctctgggctcggactgcggcggttcatcgggctccagctccggctccggccccagcgcgcccacctcctcctcagtgttgggctctgggctggtggctcccgtgtcaccctacaagccgggccagacagtgttccctctgcctcccgcgggtatgacctacccaggcagcctggccggggcctacgccggctacccgccccagttcctgccacacggcgtggcacttgaccccaccaagccgggcagcctggtgggggcgcagctggcggcggccgcggccgggtctctgggctgcagtaagccggccggctccagccctttggccggagcgtctccgccgtccgtgatgacagccagtttgtgccgggacccttactgcctcagctaccactgcgctagccacctggcaggggcggcggccgccagcgcttcttgcgcacatgatccggctgctgcggctgcggcgctgaagtccggatacccgctggtgtaccccacgcacccgctgcacggtgtgcactcctcgctaacggccgccgcggctgctggcgccacaccgccctccctggccggccaccccctctacccctacggctttatgctccctaacgacccactcccccacatctgcaactgggtgtcggccaacgggccgtgcgacaagcgcttcgccacgtccgaagagctgctgagccacttgcggacccatacggcatttcccgggacagacaaactgctgtcgggctaccccagctcgtcgtctctggccagcgctgccgcggccgccatggcttgccacatgcacatccccacctcgggcgcaccgggcagccctgggacgctggcgctgcgcagcccccaccacgcgctgggactcagcagccgctaccacccctactccaagagcccgcttcccacgcctggcgcccccgtgccggtgcccgccgccaccggaccgtactactccccctacgccctctacggacagagactgaccaccgcctcggcgctggggtatcagtgagggcggccgggagggcgagcgagggagaggagggagagggggaggggaggagtccagggagaggcgggatcacggcccaggctgctgacacccgcgcgtggggaggactcgggccacgaaaggaaagaaatgtataccgtatctatctacccgacagcagcgaccgagacccggtgggacactccccttctccccactttcacctccccacccaaactttataaaagttgaaaaaatatcatttgactttttatagaaaaaaaaaggaaaaaataattgagaaagtgttcatctgaggactgcatcggtggacactggtatttatttatgttagctccaagcggaccggtggttcaaaagtgcattatttagtttgagctctgtaggtaaaaaggaggtgggaaaaattttaaaacttgagggtaaaaatgtggaaaacaaaccctcccatcccttgtagattataaataaaagcaaaaccgccacagaactagaggtcttctctttaatgttactttaaaattgctatgattgtattgtacgttatttaatgtctgattgaaacacaaatttacatgcatgtttgttacaaaaaaaatgaaaaaaaaagtcacaatttgtcagctctgatttcaaattgcaattatttttaaggtgtataccatcgaagagaatgggtatttttttgtatgtattctggaagaaaacaacaaaaaaaaaaagaaaaagaaaaaattctattccaaaacctcatttgccttattttgttctttaaaaggaacacttaactatttttaatttttaagtccacccgctgagaaggggacaaggtttacgtcatgtactaaaataatagacaatgtatcgctttaaagattaaaattccgtatatttgatgta

SEQ ID NO: 349514 - DNA, 6081 bp, Homo sapiens
  misc_feature (2209)..(2209): n is a, c, g, or t
acttacaaactgataggcttttaattgagcgcctccgccgagcccgagatgaaagggaagcggcggtgaaaggcggcccgcctgccctccggcctcaatactgattagccatctcgacagtgaatagttcaaggcattttcaaacttttttcctcagctctttccccttccttctcctcctcccaccccctcctccaatatctgccttgcccactccttttttagagaaaacaaatcatttccattgtttgcaaataaaatccgcaggacatccacgccaactgctgctgggggttggaggctttaggcctggcgcagagtaattaatggcccccactcccgggcccgcgccggccttcgggggtttggcctcctgcgcgaggtgcgcaggctcggacgctggcgcctcccaaaagccccgggcgcgcaggcccccaggcgcccccatgcgctcggaccctcggagtggagttttgagaaaagcgaacgcacgctgaccacgacccgcacccacgcagcacagcgcagccccacgagcgtgtgtggccacaccgggggacgcaggagccactccacggcccccccaggcttcaggtgctgaggctgcctcccctgagccgccggcgtaataagctgctggaattagaggagagggggaagagctgagtctggaggctggggagggacgcccttggctgcgtcccccccggccctgtcgcaggccccagaatttcagtgcccgggcctcgcggggaggccgcggcgatagcggcccaaaggtgggctcgcggcgttaggagcactaccattggttgggtcgacacctagacggccgcgcactcagtaaccaggcacacatggacacacccgaaggataagagtgcttcacagacgcgctgccccgcagagacagcgtaggactgtcccgccctccgaaacgcgcacctgggacttgctccccggagaccagacaaccgcctccctcagcgtggggcctcgccacccgctcgccgactcacctccctcagatgtcgcacggacactacaaacccccttgaatgcaggtgtgctcttacacgctcacactgacaaacaccagccccaagcacacaccgcctcactcccctcttctctccaaatgagcttcagtcaagttaccatttcataaagtttaccaacccaaagaatcaagggataaaatccaaacgcagaaaaagaatgcctaggagcaaattctaaaactcaccccggaaagttctcggtacccgtgcggagtgggagacagagaaagaagccggggaggggagtcaggtgggggaggggagtgagatgggccaagaggagagggcgagcataccaagggcagttccagacccgacccccgcgcgcacccggctcagccccaggtgcgcgccggtcgaaaccgggtctccaggctcggcccccgccccccacgcgggcacagactggctcccgactcccagagctcccagccccaccatttatcaaaaggacttgacaacaaaagaagagccggggcggaaaagcggaggaggggagattcaaagtcttctaagtcgttccgaggaagggggtgtgtcctcctccccaccccctctaatttctgcgagttcctggaggagaccctcgaacccgctccggacgctatcagagccccgataactcacgcagcgccacaggcatgcatacacactgggcatccaggtccaggtacccggtggcacgcacagcgcctccccttttcttcccaaacaacccgagtgacggtgcaaatcgaggggaacgcggcagtcccgctccgcttccctggaagaacccgcgttcccacaggcagccgccccctccctctctcgctccttccctcggctctcctagcgcagctcattccgactcggcgttccaataaattcgagagagcagccccgagttaccctggctccccagcctgcggggatggcggcaggtgggagaaggtcggggagggggcatgagtgagcctgagatgtttcttcccccatacacccatggccaggcctcttcttcgcagcctcttagccctgcttacgacccgagggggtcaaagaattgaggcgaggtttgccccaccattgacctccaggactagaagttccttggtggtgtggctcttagaagtctccgagtttggggttagggaactacagagggnggcagcctgacctccgcacgcaacacgccccgcgaggactcgcggcggcggggtggggtggcgggaaatctcccgtgttagaagttgccgccgctggtctcgggtacccggagccgcgcccgaactccgcgaccccaacagaccgaggctcccagaggtggaagggcgtctctccgacaccgagagggcaggcgcacactccaggcctgcgcgcccctctcggcgccctgggcgcacctgcgcactttactctcgctattcattttcctgacaccgtgcgcctctttcattctttttcttagagcccccaccccacccccatcccaggaggccgctcctcttttcccctcctccagttccctctcaatctcctccttcctctccgtctctctctccctctctctttttcccttcaagtcgcacccgccttgtaatcagcaacaaaagctgacataaatcacgggaggattgacaagagctgacaaataactgattgattgcggtcgaggaacattgacaattgatggaggggtggagatgcccaaagaagggggggagggaggaaaacagggtgggagagtaagaatggggggttgggggacagactgagggtgaaacagaggaaacatgtgacccccgctgctgccccaatctacgcgtccccgggcgtcacgtggccgggaagggcggagagcccagcgctcctcgcggtgttgagccgccgccgctgcgactgcccatctagcttctggtttctccgccgcggaatctgaggaaattagagcgggcgggcgggcttcttccagctccggctccccaccttgccttcttaccctggtggctgcgctgcgccgcgcgggatctcgattactgcgaaggaaaaaacactgggtgtgcaggttcccttcgcccctggagttgacagtccggccggtgtccacactcccaccggtgctccttctggacaccccccgcagtctgttcctcacgcgcaccccccttcaaaagaaggtttcagtttattttcgagctggggaaaggaagaacgacgaggaggaaaaaagagggaggcggcggatggcaaacgtagaataaatgtccatctcgtcctcccagcgaaatcgagggaggggacacacaggggggcggcgaagagggagctgcccattaaaaccggcactgagagtcctggcagcggcggcggcggcggcgcgggacgcgtcacatccccttgaccctccaatcacctcgggctcccatttgattggaaggcggcaaaggctttaatctcccccttggtgcagctgcttttgaagtgagtttcctcgccagagccccggctggacacgcagcggctcgcatcgcagagcgcagcgccggcgcggggccgcgagaacgcagcgcaggggagcagcccgaggcggacaccgcgagccgcccggcactcccgcagtccagccggctcctctagcccggccacggctccgctgcgggccacccaggattactcgcgtctggctccaggcgccgagaaggcgcgctgggcgcccgtggccgccgcgccagctcctcctcctcccgctgctcctgctcccggggcgagcgcgcagccccgagcccgccccgcgcctcccggagccctcccccccgctgctcccatgcgcgcgggtgggtcatgagcacagcgccctcgctttctgccctaagaagcagtaagcacagcggcggcggcggcggcggaggcggaggcggcggtgcagaccctgcctggaccagcgcgctctctggaaatagctccggccccggcccaggctcgtccccggccggcagcaccaagccttttgtgcacgccgtgcccccctctgaccccctgcgccaggccaaccgcctgccaatcaaggtgctgaagatgctgacggcacgaactggccacattttgcaccccgagtacctgcagcccctgccttccacgccggtcagccccatcgagctcgatgccaagaagagcccgctggcgctgttggcgcaaacatgttcgcagatcgggaagcccgacccctcgccctcctccaaactctcctcggttgcctccaacgggggcggcgcgggcggtgccggcggcggtgctgcgggcgacaaggacaccaaatcgggccccctgaagctgagcgacatcggcgtggaggacaagtcgagtttcaagccgtactccaaacccggctcggataagaaggagccgggaggcggcggtggaggcggtggcggtggcgggggcggcggcgggggtgtttcgtcggagaagtcgggattccgggtaccgagcgccacctgccagccattcacgcccaggacaggcagcccgagctccagcgcctcggcctgctcgccgggaggtatgctgtcctcggccgggggtgccccggagggcaaggacgacaagaaagacaccgacgtgggcggcggtggcaagggcaccgggggcgcctcggccgaagggggacccacggggctggcacacggccggattagctgcggcggcgggattaatgtggatgtgaaccagcatccggatgggggcccgggaggcaaggctctgggctcggactgcggcggttcatcgggctccagctccggctccggccccagcgcgcccacctcctcctcagtgttgggctctgggctggtggctcccgtgtcaccctacaagccgggccagacagtgttccctctgcctcccgcgggtatgacctacccaggcagcctggccggggcctacgccggctacccgccccagttcctgccacacggcgtggcacttgaccccaccaagccgggcagcctggtgggggcgcagctggcggcggccgcggccgggtctctgggctgcagtaagccggccggctccagccctttggccggagcgtctccgccgtccgtgatgacagccagtttgtgccgggacccttactgcctcagctaccactgcgctagccacctggcaggggcggcggccgccagcgcttcttgcgcacatgatccggctgctgcggctgcggcgctgaagtccggatacccgctggtgtaccccacgcacccgctgcacggtgtgcactcctcgctaacggccgccgcggctgctggcgccacaccgccctccctggccggccaccccctctacccctacggctttatgctccctaacgacccactcccccacatctgcaactgggtgtcggccaacgggccgtgcgacaagcgcttcgccacgtccgaagagctgctgagccacttgcggacccatacggcatttcccgggacagacaaactgctgtcgggctaccccagctcgtcgtctctggccagcgctgccgcggccgccatggcttgccacatgcacatccccacctcgggcgcaccgggcagccctgggacgctggcgctgcgcagcccccaccacgcgctgggactcagcagccgctaccacccctactccaagagcccgcttcccacgcctggcgcccccgtgccggtgcccgccgccaccggaccgtactactccccctacgccctctacggacagagactgaccaccgcctcggcgctggggtatcagtgagggcggccgggagggcgagcgagggagaggagggagagggggaggggaggagtccagggagaggcgggatcacggcccaggctgctgacacccgcgcgtggggaggactcgggccacgaaaggaaagaaatgtataccgtatctatctacccgacagcagcgaccgagacccggtgggacactccccttctccccactttcacctccccacccaaactttataaaagttgaaaaaatatcatttgactttttatag

SEQ ID NO: 349515 - DNA, 1963 bp, Homo sapiens
  misc_feature (1143)..(1143): n is a, c, g, or t
  misc_feature (1150)..(1150): n is a, c, g, or t
atgctcattctaacctatcaccctactgttcattcatggaaccctaccgctggacagacaatgccacgcgcggcgtacgtgaaaactggtatctgcccgtactgtcgtgagcccgcttcccacgcctggcgcccccgtgccggtgcccgccgccaccggaccgtactactccccctacgccctctacggacagagactgaccaccgcctcggcgctggggtatcagtgagggcggccgggagggcgagcgagggagaggagggagagggggaggggaggagtccagggagaggcgggatcacggcccaggctgctgacacccgcgcgtggggaggactcgggccacgaaaggaaagaaatgtataccgtatctatctacccgacagcagcgaccgagacccggtgggacactccccttctccccactttcacctccccacccaaactttataaaagttgaaaaaatatcatttgactttttatagaaaaaaaaaggaaaaaataattgagaaagtgttcatctgaggactgcatcggtggacactggtatttatttatgttagctccaagcggaccggtggttcaaaagtgcattatttagtttgagctctgtaggtaaaaaggaggtgggaaaaattttaaaacttgagggtaaaaatgtggaaaacaaaccctcccatcccttgtagattataaataaaagcaaaaccgccacagaactagaggtcttctctttaatgttactttaaaattgctatgattgtattgtacgttatttaatgtctgattgaaacacaaatttacatgcatgtttgttacaaaaaaaatgaaaaaaaaagtcacaatttgtcagctctgatttcaaattgcaattatttttaaggtgtataccatcgaagagaatgggtatttttttgtatgtattctggaagaaaacaacaaaaaaaaaaagaaaaagaaaaaattctattccaaaacctcatttgccttattttgttctttaaaaggaacacttaactatttttaatttttaagtccacccgctgagaaggggacaaggtttacgtcatgtactaaaataatagacaatgtatcgctttaaagattaaaattccgtatatttgatgtaaaaaaaaaaaaaanaaaaaanaaaaaaaaaaaaaaaaaaaaaaaaaaaaaaaaaaaaaaaaaaaaaaagaagaaaaaaaaaaaaaaaacaaaaaaaaggaaaaacaaaaaaaaaacaaaaagaaaaacaagaacaaagacgaacaataaaaaaaagagaagaacaggaaaggcacacaaaagaactaaccacgaacgaacaacagaacaagaggagaggaacaaaacagcggacacaaagcaggagcacaacagtcggagacaagaggcacagcaccaatagcctcgggaaggcagcgagcgacgcaacgcacagacgtggagtgaagcgaacgaaccgcacacaagagaagagacagaaacaacaacacacacacacgccacgatgggtagagaagaaaacagagtagagcgaacgagaccgaaagacgaagagaggagagcgaaaatccagtagaggggagacaaacaaaaggaggaggagagagcaaacgaagaggcgagcgacagaaggcgcgacaaaagaaagaacagagcaacgacagcgcgccgcaacacgcaggagggagagacggcacaagatgacgtacggacgaaggggagaagagacaagatcatagtccataaggacgaacggcggcaggagcaagcgcgcaaggaacaaggagaaagagaagagcggcacagcgtggagcccagggagcggagcggcccagacagcggagaacgaacgacagaagcacgaagcagcagagagagcggaggagcagagaagaagtagaggagaagaggacgagcaagaacgatgcagccaggggcaggggccggcgggggg

SEQ ID NO: 349516 - DNA, 6202 bp, Homo sapiens
  misc_feature (2209)..(2209): n is a, c, g, or t
acttacaaactgataggcttttaattgagcgcctccgccgagcccgagatgaaagggaagcggcggtgaaaggcggcccgcctgccctccggcctcaatactgattagccatctcgacagtgaatagttcaaggcattttcaaacttttttcctcagctctttccccttccttctcctcctcccaccccctcctccaatatctgccttgcccactccttttttagagaaaacaaatcatttccattgtttgcaaataaaatccgcaggacatccacgccaactgctgctgggggttggaggctttaggcctggcgcagagtaattaatggcccccactcccgggcccgcgccggccttcgggggtttggcctcctgcgcgaggtgcgcaggctcggacgctggcgcctcccaaaagccccgggcgcgcaggcccccaggcgcccccatgcgctcggaccctcggagtggagttttgagaaaagcgaacgcacgctgaccacgacccgcacccacgcagcacagcgcagccccacgagcgtgtgtggccacaccgggggacgcaggagccactccacggcccccccaggcttcaggtgctgaggctgcctcccctgagccgccggcgtaataagctgctggaattagaggagagggggaagagctgagtctggaggctggggagggacgcccttggctgcgtcccccccggccctgtcgcaggccccagaatttcagtgcccgggcctcgcggggaggccgcggcgatagcggcccaaaggtgggctcgcggcgttaggagcactaccattggttgggtcgacacctagacggccgcgcactcagtaaccaggcacacatggacacacccgaaggataagagtgcttcacagacgcgctgccccgcagagacagcgtaggactgtcccgccctccgaaacgcgcacctgggacttgctccccggagaccagacaaccgcctccctcagcgtggggcctcgccacccgctcgccgactcacctccctcagatgtcgcacggacactacaaacccccttgaatgcaggtgtgctcttacacgctcacactgacaaacaccagccccaagcacacaccgcctcactcccctcttctctccaaatgagcttcagtcaagttaccatttcataaagtttaccaacccaaagaatcaagggataaaatccaaacgcagaaaaagaatgcctaggagcaaattctaaaactcaccccggaaagttctcggtacccgtgcggagtgggagacagagaaagaagccggggaggggagtcaggtgggggaggggagtgagatgggccaagaggagagggcgagcataccaagggcagttccagacccgacccccgcgcgcacccggctcagccccaggtgcgcgccggtcgaaaccgggtctccaggctcggcccccgccccccacgcgggcacagactggctcccgactcccagagctcccagccccaccatttatcaaaaggacttgacaacaaaagaagagccggggcggaaaagcggaggaggggagattcaaagtcttctaagtcgttccgaggaagggggtgtgtcctcctccccaccccctctaatttctgcgagttcctggaggagaccctcgaacccgctccggacgctatcagagccccgataactcacgcagcgccacaggcatgcatacacactgggcatccaggtccaggtacccggtggcacgcacagcgcctccccttttcttcccaaacaacccgagtgacggtgcaaatcgaggggaacgcggcagtcccgctccgcttccctggaagaacccgcgttcccacaggcagccgccccctccctctctcgctccttccctcggctctcctagcgcagctcattccgactcggcgttccaataaattcgagagagcagccccgagttaccctggctccccagcctgcggggatggcggcaggtgggagaaggtcggggagggggcatgagtgagcctgagatgtttcttcccccatacacccatggccaggcctcttcttcgcagcctcttagccctgcttacgacccgagggggtcaaagaattgaggcgaggtttgccccaccattgacctccaggactagaagttccttggtggtgtggctcttagaagtctccgagtttggggttagggaactacagagggnggcagcctgacctccgcacgcaacacgccccgcgaggactcgcggcggcggggtggggtggcgggaaatctcccgtgttagaagttgccgccgctggtctcgggtacccggagccgcgcccgaactccgcgaccccaacagaccgaggctcccagaggtggaagggcgtctctccgacaccgagagggcaggcgcacactccaggcctgcgcgcccctctcggcgccctgggcgcacctgcgcactttactctcgctattcattttcctgacaccgtgcgcctctttcattctttttcttagagcccccaccccacccccatcccaggaggccgctcctcttttcccctcctccagttccctctcaatctcctccttcctctccgtctctctctccctctctctttttcccttcaagtcgcacccgccttgtaatcagcaacaaaagctgacataaatcacgggaggattgacaagagctgacaaataactgattgattgcggtcgaggaacattgacaattgatggaggggtggagatgcccaaagaagggggggagggaggaaaacagggtgggagagtaagaatggggggttgggggacagactgagggtgaaacagaggaaacatgtgacccccgctgctgccccaatctacgcgtccccgggcgtcacgtggccgggaagggcggagagcccagcgctcctcgcggtgttgagccgccgccgctgcgactgcccatctagcttctggtttctccgccgcggaatctgaggaaattagagcgggcgggcgggcttcttccagctccggctccccaccttgccttcttaccctggtggctgcgctgcgccgcgcgggatctcgattactgcgaaggaaaaaacactgggtgtgcaggttcccttcgcccctggagttgacagtccggccggtgtccacactcccaccggtgctccttctggacaccccccgcagtctgttcctcacgcgcaccccccttcaaaagaaggtttcagtttattttcgagctggggaaaggaagaacgacgaggaggaaaaaagagggaggcggcggatggcaaacgtagaataaatgtccatctcgtcctcccagcgaaatcgagggaggggacacacaggggggcggcgaagagggagctgcccattaaaaccggcactgagagtcctggcagcggcggcggcggcggcgcgggacgcgtcacatccccttgaccctccaatcacctcgggctcccatttgattggaaggcggcaaaggctttaatctcccccttggtgcagctgcttttgaagtgagtttcctcgccagagccccggctggacacgcagcggctcgcatcgcagagcgcagcgccggcgcggggccgcgagaacgcagcgcaggggagcagcccgaggcggacaccgcgagccgcccggcactcccgcagtccagccggctcctctagcccggccacggctccgctgcgggccacccaggattactcgcgtctggctccaggcgccgagaaggcgcgctgggcgcccgtggccgccgcgccagctcctcctcctcccgctgctcctgctcccggggcgagcgcgcagccccgagcccgccccgcgcctcccggagccctcccccccgctgctcccatgcgcgcgggtgggtcatgagcacagcgccctcgctttctgccctaagaagcagtaagcacagcggcggcggcggcggcggaggcggaggcggcggtgcagaccctgcctggaccagcgcgctctctggaaatagctccggccccggcccaggctcgtccccggccggcagcaccaagccttttgtgcacgccgtgcccccctctgaccccctgcgccaggccaaccgcctgccaatcaaggtgctgaagatgctgacggcacgaactggccacattttgcaccccgagtacctgcagcccctgccttccacgccggtcagccccatcgagctcgatgccaagaagagcccgctggcgctgttggcgcaaacatgttcgcagatcgggaagcccgacccctcgccctcctccaaactctcctcggttgcctccaacgggggcggcgcgggcggtgccggcggcggtgctgcgggcgacaaggacaccaaatcgggccccctgaagctgagcgacatcggcgtggaggacaagtcgagtttcaagccgtactccaaacccggctcggataagaaggagccgggaggcggcggtggaggcggtggcggtggcgggggcggcggcgggggtgtttcgtcggagaagtcgggattccgggtaccgagcgccacctgccagccattcacgcccaggacaggcagcccgagctccagcgcctcggccgaagggggacccacggggctggcacacggccggattagctgcggcggcgggattaatgtggatgtgaaccagcatccggatgggggcccgggaggcaaggctctgggctcggactgcggcggttcatcgggctccagctccggctccggccccagcgcgcccacctcctcctcagtgttgggctctgggctggtggctcccgtgtcaccctacaagccgggccagacagtgttccctctgcctcccgcgggtatgacctacccaggcagcctggccggggcctacgccggctacccgccccagttcctgccacacggcgtggcacttgaccccaccaagccgggcagcctggtgggggcgcagctggcggcggccgcggccgggtctctgggctgcagtaagccggccggctccagccctttggccggagcgtctccgccgtccgtgatgacagccagtttgtgccgggacccttactgcctcagctaccactgcgctagccacctggcaggggcggcggccgccagcgcttcttgcgcacatgatccggctgctgcggctgcggcgctgaagtccggatacccgctggtgtaccccacgcacccgctgcacggtgtgcactcctcgctaacggccgccgcggctgctggcgccacaccgccctccctggccggccaccccctctacccctacggctttatgctccctaacgacccactcccccacatctgcaactgggtgtcggccaacgggccgtgcgacaagcgcttcgccacgtccgaagagctgctgagccacttgcggacccatacggcatttcccgggacagacaaactgctgtcgggctaccccagctcgtcgtctctggccagcgctgccgcggccgccatggcttgccacatgcacatccccacctcgggcgcaccgggcagccctgggacgctggcgctgcgcagcccccaccacgcgctgggactcagcagccgctaccacccctactccaagagcccgcttcccacgcctggcgcccccgtgccggtgcccgccgccaccggaccgtactactccccctacgccctctacggacagagactgaccaccgcctcggcgctggggtatcagtgagggcggccgggagggcgagcgagggagaggagggagagggggaggggaggagtccagggagaggcgggatcacggcccaggctgctgacacccgcgcgtggggaggactcgggccacgaaaggaaagaaatgtataccgtatctatctacccgacagcagcgaccgagacccggtgggacactccccttctccccactttcacctccccacccaaactttataaaagttgaaaaaatatcatttgactttttatagaaaaaaaaaggaaaaaataattgagaaagtgttcatctgaggactgcatcggtggacactggtatttatttatgttagctccaagcggaccggtggttcaaaagtgcattatttagtttgagctctgtaggtaaaaaggaggtgggaaaaattttaaaacttgagggtaaaaatgtggaaaacaaaccctcccatcccttgtagattataaataaaagcaaaaccgccacag

SEQ ID NO: 349517 - DNA, 6955 bp, Homo sapiens
  misc_feature (2209)..(2209): n is a, c, g, or t
  misc_feature (6135)..(6135): n is a, c, g, or t
  misc_feature (6142)..(6142): n is a, c, g, or t
acttacaaactgataggcttttaattgagcgcctccgccgagcccgagatgaaagggaagcggcggtgaaaggcggcccgcctgccctccggcctcaatactgattagccatctcgacagtgaatagttcaaggcattttcaaacttttttcctcagctctttccccttccttctcctcctcccaccccctcctccaatatctgccttgcccactccttttttagagaaaacaaatcatttccattgtttgcaaataaaatccgcaggacatccacgccaactgctgctgggggttggaggctttaggcctggcgcagagtaattaatggcccccactcccgggcccgcgccggccttcgggggtttggcctcctgcgcgaggtgcgcaggctcggacgctggcgcctcccaaaagccccgggcgcgcaggcccccaggcgcccccatgcgctcggaccctcggagtggagttttgagaaaagcgaacgcacgctgaccacgacccgcacccacgcagcacagcgcagccccacgagcgtgtgtggccacaccgggggacgcaggagccactccacggcccccccaggcttcaggtgctgaggctgcctcccctgagccgccggcgtaataagctgctggaattagaggagagggggaagagctgagtctggaggctggggagggacgcccttggctgcgtcccccccggccctgtcgcaggccccagaatttcagtgcccgggcctcgcggggaggccgcggcgatagcggcccaaaggtgggctcgcggcgttaggagcactaccattggttgggtcgacacctagacggccgcgcactcagtaaccaggcacacatggacacacccgaaggataagagtgcttcacagacgcgctgccccgcagagacagcgtaggactgtcccgccctccgaaacgcgcacctgggacttgctccccggagaccagacaaccgcctccctcagcgtggggcctcgccacccgctcgccgactcacctccctcagatgtcgcacggacactacaaacccccttgaatgcaggtgtgctcttacacgctcacactgacaaacaccagccccaagcacacaccgcctcactcccctcttctctccaaatgagcttcagtcaagttaccatttcataaagtttaccaacccaaagaatcaagggataaaatccaaacgcagaaaaagaatgcctaggagcaaattctaaaactcaccccggaaagttctcggtacccgtgcggagtgggagacagagaaagaagccggggaggggagtcaggtgggggaggggagtgagatgggccaagaggagagggcgagcataccaagggcagttccagacccgacccccgcgcgcacccggctcagccccaggtgcgcgccggtcgaaaccgggtctccaggctcggcccccgccccccacgcgggcacagactggctcccgactcccagagctcccagccccaccatttatcaaaaggacttgacaacaaaagaagagccggggcggaaaagcggaggaggggagattcaaagtcttctaagtcgttccgaggaagggggtgtgtcctcctccccaccccctctaatttctgcgagttcctggaggagaccctcgaacccgctccggacgctatcagagccccgataactcacgcagcgccacaggcatgcatacacactgggcatccaggtccaggtacccggtggcacgcacagcgcctccccttttcttcccaaacaacccgagtgacggtgcaaatcgaggggaacgcggcagtcccgctccgcttccctggaagaacccgcgttcccacaggcagccgccccctccctctctcgctccttccctcggctctcctagcgcagctcattccgactcggcgttccaataaattcgagagagcagccccgagttaccctggctccccagcctgcggggatggcggcaggtgggagaaggtcggggagggggcatgagtgagcctgagatgtttcttcccccatacacccatggccaggcctcttcttcgcagcctcttagccctgcttacgacccgagggggtcaaagaattgaggcgaggtttgccccaccattgacctccaggactagaagttccttggtggtgtggctcttagaagtctccgagtttggggttagggaactacagagggnggcagcctgacctccgcacgcaacacgccccgcgaggactcgcggcggcggggtggggtggcgggaaatctcccgtgttagaagttgccgccgctggtctcgggtacccggagccgcgcccgaactccgcgaccccaacagaccgaggctcccagaggtggaagggcgtctctccgacaccgagagggcaggcgcacactccaggcctgcgcgcccctctcggcgccctgggcgcacctgcgcactttactctcgctattcattttcctgacaccgtgcgcctctttcattctttttcttagagcccccaccccacccccatcccaggaggccgctcctcttttcccctcctccagttccctctcaatctcctccttcctctccgtctctctctccctctctctttttcccttcaagtcgcacccgccttgtaatcagcaacaaaagctgacataaatcacgggaggattgacaagagctgacaaataactgattgattgcggtcgaggaacattgacaattgatggaggggtggagatgcccaaagaagggggggagggaggaaaacagggtgggagagtaagaatggggggttgggggacagactgagggtgaaacagaggaaacatgtgacccccgctgctgccccaatctacgcgtccccgggcgtcacgtggccgggaagggcggagagcccagcgctcctcgcggtgttgagccgccgccgctgcgactgcccatctagcttctggtttctccgccgcggaatctgaggaaattagagcgggcgggcgggcttcttccagctccggctccccaccttgccttcttaccctggtggctgcgctgcgccgcgcgggatctcgattactgcgaaggaaaaaacactgggtgtgcaggttcccttcgcccctggagttgacagtccggccggtgtccacactcccaccggtgctccttctggacaccccccgcagtctgttcctcacgcgcaccccccttcaaaagaaggtttcagtttattttcgagctggggaaaggaagaacgacgaggaggaaaaaagagggaggcggcggatggcaaacgtagaataaatgtccatctcgtcctcccagcgaaatcgagggaggggacacacaggggggcggcgaagagggagctgcccattaaaaccggcactgagagtcctggcagcggcggcggcggcggcgcgggacgcgtcacatccccttgaccctccaatcacctcgggctcccatttgattggaaggcggcaaaggctttaatctcccccttggtgcagctgcttttgaagtgagtttcctcgccagagccccggctggacacgcagcggctcgcatcgcagagcgcagcgccggcgcggggccgcgagaacgcagcgcaggggagcagcccgaggcggacaccgcgagccgcccggcactcccgcagtccagccggctcctctagcccggccacggctccgctgcgggccacccaggattactcgcgtctggctccaggcgccgagaaggcgcgctgggcgcccgtggccgccgcgccagctcctcctcctcccgctgctcctgctcccggggcgagcgcgcagccccgagcccgccccgcgcctcccggagccctcccccccgctgctcccatgcgcgcgggtgggtcatgagcacagcgccctcgctttctgccctaagaagcagtaagcacagcggcggcggcggcggcggaggcggaggcggcggtgcagaccctgcctggaccagcgcgctctctggaaatagctccggccccggcccaggctcgtccccggccggcagcaccaagccttttgtgcacgccgtgcccccctctgaccccctgcgccaggccaaccgcctgccaatcaaggtgctgaagatgctgacggcacgaactggccacattttgcaccccgagtacctgcagcccctgccttccacgccggtcagccccatcgagctcgatgccaagaagagcccgctggcgctgttggcgcaaacatgttcgcagatcgggaagcccgacccctcgccctcctccaaactctcctcggttgcctccaacgggggcggcgcgggcggtgccggcggcggtgctgcgggcgacaaggacaccaaatcgggccccctgaagctgagcgacatcggcgtggaggacaagtcgagtttcaagccgtactccaaacccggctcggataagaaggagccgggaggcggcggtggaggcggtggcggtggcgggggcggcggcgggggtgtttcgtcggagaagtcgggattccgggtaccgagcgccacctgccagccattcacgcccaggacaggcagcccgagctccagcgcctcggcctgctcgccgggaggtatgctgtcctcggccgggggtgccccggagggcaaggacgacaagaaagacaccgacgtgggcggcggtggcaagggcaccgggggcgcctcggccgaagggggacccacggggctggcacacggccggattagctgcggcggcgggattaatgtggatgtgaaccagcatccggatgggggcccgggaggcaaggctctgggctcggactgcggcggttcatcgggctccagctccggctccggccccagcgcgcccacctcctcctcagtgttgggctctgggctggtggctcccgtgtcaccctacaagccgggccagacagtgttccctctgcctcccgcgggtatgacctacccaggcagcctggccggggcctacgccggctacccgccccagttcctgccacacggcgtggcacttgaccccaccaagccgggcagcctggtgggggcgcagctggcggcggccgcggccgggtctctgggctgcagtaagccggccggctccagccctttggccggagcgtctccgccgtccgtgatgacagccagtttgtgccgggacccttactgcctcagctaccactgcgctagccacctggcaggggcggcggccgccagcgcttcttgcgcacatgatccggctgctgcggctgcggcgctgaagtccggatacccgctggtgtaccccacgcacccgctgcacggtgtgcactcctcgctaacggccgccgcggctgctggcgccacaccgccctccctggccggccaccccctctacccctacggctttatactccccttctccccactttcacctccccacccaaactttataaaagttgaaaaaatatcatttgactttttatagaaaaaaaaaggaaaaaataattgagaaagtgttcatctgaggactgcatcggtggacactggtatttatttatgttagctccaagcggaccggtggttcaaaagtgcattatttagtttgagctctgtaggtaaaaaggaggtgggaaaaattttaaaacttgagggtaaaaatgtggaaaacaaaccctcccatcccttgtagattataaataaaagcaaaaccgccacagaactagaggtcttctctttaatgttactttaaaattgctatgattgtattgtacgttatttaatgtctgattgaaacacaaatttacatgcatgtttgttacaaaaaaaatgaaaaaaaaagtcacaatttgtcagctctgatttcaaattgcaattatttttaaggtgtataccatcgaagagaatgggtatttttttgtatgtattctggaagaaaacaacaaaaaaaaaaagaaaaagaaaaaattctattccaaaacctcatttgccttattttgttctttaaaaggaacacttaactatttttaatttttaagtccacccgctgagaaggggacaaggtttacgtcatgtactaaaataatagacaatgtatcgctttaaagattaaaattccgtatatttgatgtaaaaaaaaaaaaaanaaaaaanaaaaaaaaaaaaaaaaaaaaaaaaaaaaaaaaaaaaaaaaaaaaaaagaagaaaaaaaaaaaaaaaacaaaaaaaaggaaaaacaaaaaaaaaacaaaaagaaaaacaagaacaaagacgaacaataaaaaaaagagaagaacaggaaaggcacacaaaagaactaaccacgaacgaacaacagaacaagaggagaggaacaaaacagcggacacaaagcaggagcacaacagtcggagacaagaggcacagcaccaatagcctcgggaaggcagcgagcgacgcaacgcacagacgtggagtgaagcgaacgaaccgcacacaagagaagagacagaaacaacaacacacacacacgccacgatgggtagagaagaaaacagagtagagcgaacgagaccgaaagacgaagagaggagagcgaaaatccagtagaggggagacaaacaaaaggaggaggagagagcaaacgaagaggcgagcgacagaaggcgcgacaaaagaaagaacagagcaacgacagcgcgccgcaacacgcaggagggagagacggcacaagatgacgtacggacgaaggggagaagagacaagatcatagtccataaggacgaacggcggcaggagcaagcgcgcaaggaacaaggagaaagagaagagcggcacagcgtggagcccagggagcggagcggcccagacagcggagaacgaacgacagaagcacgaagcagcagagagagcggaggagcagagaagaagtagaggagaagaggacgagcaagaacgatgcagccaggggcaggggccggcgggggg

SEQ ID NO: 349518 - DNA, 1731 bp, Homo sapiens
  misc_feature (18)..(18): n is a, c, g, or t
  misc_feature (911)..(911): n is a, c, g, or t
  misc_feature (918)..(918): n is a, c, g, or t
tgtcccgggaaatgccgntgggtccgcaagtggctcagcagctcttcgccgtggcgaacgcttgtcgcacggcccaggctgctgacacccgcgcgtggggaggactcgggccacgaaaggaaagaaatgtataccgtatctatctacccgacagcagcgaccgagacccggtgggacactccccttctccccactttcacctccccacccaaactttataaaagttgaaaaaatatcatttgactttttatagaaaaaaaaaggaaaaaataattgagaaagtgttcatctgaggactgcatcggtggacactggtatttatttatgttagctccaagcggaccggtggttcaaaagtgcattatttagtttgagctctgtaggtaaaaaggaggtgggaaaaattttaaaacttgagggtaaaaatgtggaaaacaaaccctcccatcccttgtagattataaataaaagcaaaaccgccacagaactagaggtcttctctttaatgttactttaaaattgctatgattgtattgtacgttatttaatgtctgattgaaacacaaatttacatgcatgtttgttacaaaaaaaatgaaaaaaaaagtcacaatttgtcagctctgatttcaaattgcaattatttttaaggtgtataccatcgaagagaatgggtatttttttgtatgtattctggaagaaaacaacaaaaaaaaaaagaaaaagaaaaaattctattccaaaacctcatttgccttattttgttctttaaaaggaacacttaactatttttaatttttaagtccacccgctgagaaggggacaaggtttacgtcatgtactaaaataatagacaatgtatcgctttaaagattaaaattccgtatatttgatgtaaaaaaaaaaaaaanaaaaaanaaaaaaaaaaaaaaaaaaaaaaaaaaaaaaaaaaaaaaaaaaaaaaagaagaaaaaaaaaaaaaaaacaaaaaaaaggaaaaacaaaaaaaaaacaaaaagaaaaacaagaacaaagacgaacaataaaaaaaagagaagaacaggaaaggcacacaaaagaactaaccacgaacgaacaacagaacaagaggagaggaacaaaacagcggacacaaagcaggagcacaacagtcggagacaagaggcacagcaccaatagcctcgggaaggcagcgagcgacgcaacgcacagacgtggagtgaagcgaacgaaccgcacacaagagaagagacagaaacaacaacacacacacacgccacgatgggtagagaagaaaacagagtagagcgaacgagaccgaaagacgaagagaggagagcgaaaatccagtagaggggagacaaacaaaaggaggaggagagagcaaacgaagaggcgagcgacagaaggcgcgacaaaagaaagaacagagcaacgacagcgcgccgcaacacgcaggagggagagacggcacaagatgacgtacggacgaaggggagaagagacaagatcatagtccataaggacgaacggcggcaggagcaagcgcgcaaggaacaaggagaaagagaagagcggcacagcgtggagcccagggagcggagcggcccagacagcggagaacgaacgacagaagcacgaagcagcagagagagcggaggagcagagaagaagtagaggagaagaggacgagcaagaacgatgcagccaggggcaggggccggcgggggg

SEQ ID NO: 349519 - DNA, 4884 bp, Homo sapiens
gctggctccggggagatagcgcctgtcagtcggtgggtcggtcctcgcgccggccctccccctccccggtctccgggggaggcgcggtggagtccgcccccggggttctccgatgggggagaagcggcgacggcggcagtggagtaaccgagccggagcgtgagcggccccggtgccccgttccccacggaggccatgggcgacccagcccccgcccgcagcctggacgacatcgacctgtccgccctgcgggaccctgctgggatctttgagcttgtggaggtggtcggcaatggaacctacggacaggtgtacaagggtcggcatgtcaagacggggcagctggctgccatcaaggtcatggatgtcacggaggacgaggaggaagagatcaaacaggagatcaacatgctgaaaaagtactctcaccaccgcaacatcgccacctactacggagccttcatcaagaagagccccccgggaaacgatgaccagctctggctggtgatggagttctgtggtgctggttcagtgactgacctggtaaagaacacaaaaggcaacgccctgaaggaggactgtatcgcctatatctgcagggagatcctcaggggtctggcccatctccatgcccacaaggtgatccatcgagacatcaaggggcagaatgtgctgctgacagagaatgctgaggtcaagctagtggattttggggtgagtgctcagctggaccgcaccgtgggcagacggaacactttcattgggactccctactggatggctccagaggtcatcgcctgtgatgagaaccctgatgccacctatgattacaggagtgatatttggtctctaggaatcacagccatcgagatggcagagggagccccccctctgtgtgacatgcaccccatgcgagccctcttcctcattcctcggaaccctccgcccaggctcaagtccaagaagtggtctaagaagttcattgacttcattgacacatgtctcatcaagacttacctgagccgcccacccacggagcagctactgaagtttcccttcatccgggaccagcccacggagcggcaggtccgcatccagcttaaggaccacattgaccgatcccggaagaagcggggtgagaaagaggagacagaatatgagtacagcggcagcgaggaggaagatgacagccatggagaggaaggagagccaagctccatcatgaacgtgcctggagagtcgactctacgccgggagtttctccggctccagcaggaaaataagagcaactcagaggctttaaaacagcagcagcagctgcagcagcagcagcagcgagaccccgaggcacacatcaaacacctgctgcaccagcggcagcggcgcatagaggagcagaaggaggagcggcgccgcgtggaggagcaacagcggcgggagcgggagcagcggaagctgcaggagaaggagcagcagcggcggctggaggacatgcaggctctgcggcgggaggaggagcggcggcaggcggagcgcgagcaggaatacaagcggaagcagctggaggagcagcggcagtcagaacgtctccagaggcagctgcagcaggagcatgcctacctcaagtccctgcagcagcagcaacagcagcagcagcttcagaaacagcagcagcagcagctcctgcctggggacaggaagcccctgtaccattatggtcggggcatgaatcccgctgacaaaccagcctgggcccgagaggtagaagagagaacaaggatgaacaagcagcagaactctcccttggccaagagcaagccaggcagcacggggcctgagccccccatcccccaggcctccccagggcccccaggacccctttcccagactcctcctatgcagaggccggtggagccccaggagggaccgcacaagagcctggtggcacaccgggtcccactgaagccatatgcagcacctgtaccccgatcccagtccctgcaggaccagcccacccgaaacctggctgccttcccagcctcccatgaccccgaccctgccatccccgcacccactgccacgcccagtgcccgaggagctgtcatccgccagaattcagaccccacctctgaaggacctggccccagcccgaatcccccagcctgggtccgcccagataacgaggccccacccaaggtgcctcagaggacctcatctatcgccactgcccttaacaccagtggggccggagggtcccggccagcccaggcagtccgtgccagtaaccccgacctcaggaggagcgaccctggctgggaacgctcggacagcgtccttccagcctctcacgggcacctcccccaggctggctcactggagcggaaccgcgtgggagtctcctccaaaccggacagctcccctgtgctctcccctgggaataaagccaagcccgacgaccaccgctcacggccaggccggcccgcaagctataagcgagcaattggtgaggactttgtgttgctgaaagagcggactctggacgaggcccctcggcctcccaagaaggccatggactactcgtcgtccagcgaggaggtggaaagcagtgaggacgacgaggaggaaggcgaaggcgggccagcagaggggagcagagatacccctgggggccgcagcgatggggatacagacagcgtcagcaccatggtggtccacgacgtcgaggagatcaccgggacccagcccccatacgggggcggcaccatggtggtccagcgcacccctgaagaggagcggaacctgctgcatgctgacagcaatgggtacacaaacctgcctgacgtggtccagcccagccactcacccaccgagaacagcaaaggccaaagcccaccctcgaaggatgggagtggtgactaccagtctcgtgggctggtaaaggcccctggcaagagctcgttcacgatgtttgtggatctagggatctaccagcctggaggcagtggggacagcatccccatcacagccctagtgggtggagagggcactcggctcgaccagctgcagtacgacgtgaggaagggttctgtggtcaacgtgaatcccaccaacacccgggcccacagtgagacccctgagatccggaagtacaagaagcgattcaactccgagatcctctgtgcagccctttggggggtcaacctgctggtgggcacggagaacgggctgatgttgctggaccgaagtgggcagggcaaggtgtatggactcattgggcggcgacgcttccagcagatggatgtgctggaggggctcaacctgctcatcaccatctcagggaaaaggaacaaactgcgggtgtattacctgtcctggctccggaacaagattctgcacaatgacccagaagtggagaagaagcagggctggaccaccgtgggggacatggagggctgcgggcactaccgtgttgtgaaatacgagcggattaagttcctggtcatcgccctcaagagctccgtggaggtgtatgcctgggcccccaaaccctaccacaaattcatggccttcaagtcctttgccgacctcccccaccgccctctgctggtcgacctgacagtagaggaggggcagcggctcaaggtcatctatggctccagtgctggcttccatgctgtggatgtcgactcggggaacagctatgacatctacatccctgtgcacatccagagccagatcacgccccatgccatcatcttcctccccaacaccgacggcatggagatgctgctgtgctacgaggacgagggtgtctacgtcaacacgtacgggcgcatcattaaggatgtggtgctgcagtggggggagatgcctacttctgtggcctacatctgctccaaccagataatgggctggggtgagaaagccattgagatccgctctgtggagacgggccacctcgacggggtcttcatgcacaaacgagctcagaggctcaagttcctgtgtgagcggaatgacaaggtgttttttgcctcagtccgctctgggggcagcagccaagtttacttcatgactctgaaccgtaactgcatcatgaactggtgacggggccctgggctggggctgtcccacactggacccagctctccccctgcagccaggcttcccgggccgcccctctttcccctccctgggcttttgcttttactggtttgatttcactggagcctgctgggaacgtgacctctgacccctgatgctttcgtgatcacgtgaccatcctcttccccaacatgtcctcttcccaaaactgtgcctgtccccagcttctggggagggacacagcttccccttcccaggaattgagtgggcctagcccctccccccttttctccatttgagaggagagtgcttggggcttgaaccccttaccccactgctgctgactgggcagggccctggacccctttatttgcacgtcaggggagccggctccccccttgaatgtaccagaccctggggggggtcactgggccctagatttttggggggtcaccagccactccaggggcagggaccatttcttcattttctgaaagcactttaatgattccccttcccccaaactccagggaatggaggggggaccccgccagccaaaacattccccccattcccgacccccatctcctcttctagcccatgcccttccccggtggagggagggagcagggagccctcactctccacgccccttgcttgcatctgtatatagtgtgagcagcaagtaacccttctcctccctcccccctcacccctcctcaatgtagtggccttggatatcctgtttgttaataaagacaattcaaccagctcccacca

SEQ ID NO: 349520 - DNA, 559 bp, Homo sapiens
atagtatcattataaggcattacttcattagcccaatatttctgcatgtggttacatctgatcgatccgctcatctcagcatattattttccggagtgatagctattaactaggattcttctcgtactgttgagcgaacacggatgagcaatgttcatatttcctacccagttatttggaacggcacatatggagtattcaaaatccgctccctgttgccgttagtggggggcttaagtctctctgattgaggtatagcctgtggacggtgtgagttgagtaccggccctcggtgttccgggcccgggtttttctggagtcgggttgcttgggaatgtagcccaaagcgggtggtaaaccccatctcctcttctagcccatgcccttccccggtggagggagggagcagggagccctcactctccacgccccttgcttgcatctgtatatagtgtgagcagcaagtaacccttctcctccctcccccctcacccctcctcaatgtagtggccttggatatcctgtttgttaataaagacaattcaaccagctcccacca

SEQ ID NO: 349521 - DNA, 867 bp, Homo sapiens
atctgcaaaggcgggcagagcggggcaccccaaagcctccagggccccctgctcagccccctggcccgcccaacgcctctagtaaccccgacctcaggaggagcgaccctggctgggaacgctcggacagcgtccttccagcctctcacgggcacctcccccaggctggctcactggagcggaaccgcgtgggagtctcctccaaaccggacagctcccctgtgctctcccctgggaataaagccaagcccgacgaccaccgctcacggccaggccggcccgcagtgagtcacctggtggcaggcatggcctgcctcatcctggtttggggcttagcctcagggtgctgggtgtcaggggtggggtctccgctgatctaccgagaagggctgtggggatggagggactggtgcttctcatggtgctaacctttcctaacctctctcctaacctctctcctaacctctcttctggctctttcttcccctgcggcccctcccagagctataagcgagcaattggtgaggttagtgagatgggcctgcttgtgggagcccctcctgtcgccctgctggggtgtcccggcaccctttgtctacctccacccaggcccagcttctccctgcccctcacgtggctcctccctgcaggactttgtgttgctgaaagagcggactctggacgaggcccctcggcctcccaagaaggccatggactactcgtcgtccagcgaggaggtggaaagcagtgaggacgacgaggaggaaggcgaaggcgggccagcagaggggagcagagatacccctgggggccggtacggcatcgggagtggggccctcccactccaaggcacagggagggagggga

SEQ ID NO: 349522 - DNA, 279 bp, Homo sapiens
ggaagaggtggggctttggggcaagtctgagggagagcggctcccttctctagagagtggggtgagggtgcaggttcctgtctctctcccgctgccctgtgtgttgtggggtggcctcttcaagtgcctgtctgcccctgtgccagcctgccctgtgtgccatgcagggaagcacctcacggtggagcaggggctacaccgtgagggtggagcaggttgtgttttgaatagagacaaaagcctgggctctggctgccatctgctgcctttggcacttct

SEQ ID NO: 349523 - DNA, 263 bp, Homo sapiens
agtagcaggcaccaagtaggggaaaggagcacacagcacagagcatagggcgggagtagttagggcaggtgggaccctcagttttgagaacagggaggcaagagctggcctgcttgacatcccttcacatcacaggtagaagagagaacaaggatgaacaagcagcagaactctcccttggccaagagcaagccaggcagcacggggcctgagccccccatcccccaggcaggaaggtgctataggaacttcgtaaaactagg

SEQ ID NO: 349524 - DNA, 4860 bp, Homo sapiens
gctggctccggggagatagcgcctgtcagtcggtgggtcggtcctcgcgccggccctccccctccccggtctccgggggaggcgcggtggagtccgcccccggggttctccgatgggggagaagcggcgacggcggcagtggagtaaccgagccggagcgtgagcggccccggtgccccgttccccacggaggccatgggcgacccagcccccgcccgcagcctggacgacatcgacctgtccgccctgcgggaccctgctgggatctttgagcttgtggaggtggtcggcaatggaacctacggacaggtgtacaagggtcggcatgtcaagacggggcagctggctgccatcaaggtcatggatgtcacggaggacgaggaggaagagatcaaacaggagatcaacatgctgaaaaagtactctcaccaccgcaacatcgccacctactacggagccttcatcaagaagagccccccgggaaacgatgaccagctctggctggtgatggagttctgtggtgctggttcagtgactgacctggtaaagaacacaaaaggcaacgccctgaaggaggactgtatcgcctatatctgcagggagatcctcaggggtctggcccatctccatgcccacaaggtgatccatcgagacatcaaggggcagaatgtgctgctgacagagaatgctgaggtcaagctagtggattttggggtgagtgctcagctggaccgcaccgtgggcagacggaacactttcattgggactccctactggatggctccagaggtcatcgcctgtgatgagaaccctgatgccacctatgattacaggagtgatatttggtctctaggaatcacagccatcgagatggcagagggagccccccctctgtgtgacatgcaccccatgcgagccctcttcctcattcctcggaaccctccgcccaggctcaagtccaagaagtggtctaagaagttcattgacttcattgacacatgtctcatcaagacttacctgagccgcccacccacggagcagctactgaagtttcccttcatccgggaccagcccacggagcggcaggtccgcatccagcttaaggaccacattgaccgatcccggaagaagcggggtgagaaagaggagacagaatatgagtacagcggcagcgaggaggaagatgacagccatggagaggaaggagagccaagctccatcatgaacgtgcctggagagtcgactctacgccgggagtttctccggctccagcaggaaaataagagcaactcagaggctttaaaacagcagcagcagctgcagcagcagcagcagcgagaccccgaggcacacatcaaacacctgctgcaccagcggcagcggcgcatagaggagcagaaggaggagcggcgccgcgtggaggagcaacagcggcgggagcgggagcagcggaagctgcaggagaaggagcagcagcggcggctggaggacatgcaggctctgcggcgggaggaggagcggcggcaggcggagcgcgagcaggaatacaagcggaagcagctggaggagcagcggcagtcagaacgtctccagaggcagctgcagcaggagcatgcctacctcaagtccctgcagcagcagcaacagcagcagcagcttcagaaacagcagcagcagcagctcctgcctggggacaggaagcccctgtaccattatggtcggggcatgaatcccgctgacaaaccagcctgggcccgagaggtagaagagagaacaaggatgaacaagcagcagaactctcccttggccaagagcaagccaggcagcacggggcctgagccccccatcccccaggcctccccagggcccccaggacccctttcccagactcctcctatgcagaggccggtggagccccaggagggaccgcacaagagcctggtggcacaccgggtcccactgaagccatatgcagcacctgtaccccgatcccagtccctgcaggaccagcccacccgaaacctggctgccttcccagcctcccatgaccccgaccctgccatccccgcacccactgccacgcccagtgcccgaggagctgtcatccgccagaattcagaccccacctctgaaggacctggccccagcccgaatcccccagcctgggtccgcccagataacgaggccccacccaaggtgcctcagaggacctcatctatcgccactgcccttaacaccagtggggccggagggtcccggccagcccaggcagtccgtgccagtaaccccgacctcaggaggagcgaccctggctgggaacgctcggacagcgtccttccagcctctcacgggcacctcccccaggctggctcactggagcggaaccgcgtgggagtctcctccaaaccggacagctcccctgtgctctcccctgggaataaagccaagcccgacgaccaccgctcacggccaggccggcccgcagactttgtgttgctgaaagagcggactctggacgaggcccctcggcctcccaagaaggccatggactactcgtcgtccagcgaggaggtggaaagcagtgaggacgacgaggaggaaggcgaaggcgggccagcagaggggagcagagatacccctgggggccgcagcgatggggatacagacagcgtcagcaccatggtggtccacgacgtcgaggagatcaccgggacccagcccccatacgggggcggcaccatggtggtccagcgcacccctgaagaggagcggaacctgctgcatgctgacagcaatgggtacacaaacctgcctgacgtggtccagcccagccactcacccaccgagaacagcaaaggccaaagcccaccctcgaaggatgggagtggtgactaccagtctcgtgggctggtaaaggcccctggcaagagctcgttcacgatgtttgtggatctagggatctaccagcctggaggcagtggggacagcatccccatcacagccctagtgggtggagagggcactcggctcgaccagctgcagtacgacgtgaggaagggttctgtggtcaacgtgaatcccaccaacacccgggcccacagtgagacccctgagatccggaagtacaagaagcgattcaactccgagatcctctgtgcagccctttggggggtcaacctgctggtgggcacggagaacgggctgatgttgctggaccgaagtgggcagggcaaggtgtatggactcattgggcggcgacgcttccagcagatggatgtgctggaggggctcaacctgctcatcaccatctcagggaaaaggaacaaactgcgggtgtattacctgtcctggctccggaacaagattctgcacaatgacccagaagtggagaagaagcagggctggaccaccgtgggggacatggagggctgcgggcactaccgtgttgtgaaatacgagcggattaagttcctggtcatcgccctcaagagctccgtggaggtgtatgcctgggcccccaaaccctaccacaaattcatggccttcaagtcctttgccgacctcccccaccgccctctgctggtcgacctgacagtagaggaggggcagcggctcaaggtcatctatggctccagtgctggcttccatgctgtggatgtcgactcggggaacagctatgacatctacatccctgtgcacatccagagccagatcacgccccatgccatcatcttcctccccaacaccgacggcatggagatgctgctgtgctacgaggacgagggtgtctacgtcaacacgtacgggcgcatcattaaggatgtggtgctgcagtggggggagatgcctacttctgtggcctacatctgctccaaccagataatgggctggggtgagaaagccattgagatccgctctgtggagacgggccacctcgacggggtcttcatgcacaaacgagctcagaggctcaagttcctgtgtgagcggaatgacaaggtgttttttgcctcagtccgctctgggggcagcagccaagtttacttcatgactctgaaccgtaactgcatcatgaactggtgacggggccctgggctggggctgtcccacactggacccagctctccccctgcagccaggcttcccgggccgcccctctttcccctccctgggcttttgcttttactggtttgatttcactggagcctgctgggaacgtgacctctgacccctgatgctttcgtgatcacgtgaccatcctcttccccaacatgtcctcttcccaaaactgtgcctgtccccagcttctggggagggacacagcttccccttcccaggaattgagtgggcctagcccctccccccttttctccatttgagaggagagtgcttggggcttgaaccccttaccccactgctgctgactgggcagggccctggacccctttatttgcacgtcaggggagccggctccccccttgaatgtaccagaccctggggggggtcactgggccctagatttttggggggtcaccagccactccaggggcagggaccatttcttcattttctgaaagcactttaatgattccccttcccccaaactccagggaatggaggggggaccccgccagccaaaacattccccccattcccgacccccatctcctcttctagcccatgcccttccccggtggagggagggagcagggagccctcactctccacgccccttgcttgcatctgtatatagtgtgagcagcaagtaacccttctcctccctcccccctcacccctcctcaatgtagtggccttggatatcctgtttgttaataaagacaattcaaccagctcccacca

SEQ ID NO: 349525 - DNA, 4985 bp, Homo sapiens
gctggctccggggagatagcgcctgtcagtcggtgggtcggtcctcgcgccggccctccccctccccggtctccgggggaggcgcggtggagtccgcccccggggttctccgatgggggagaagcggcgacggcggcagtggagtaaccgagccggagcgtgagcggccccggtgccccgttccccacggaggccatgggcgacccagcccccgcccgcagcctggacgacatcgacctgtccgccctgcgggaccctgctgggatctttgagcttgtggaggtggtcggcaatggaacctacggacaggtgtacaagggtcggcatgtcaagacggggcagctggctgccatcaaggtcatggatgtcacggaggacgaggaggaagagatcaaacaggagatcaacatgctgaaaaagtactctcaccaccgcaacatcgccacctactacggagccttcatcaagaagagccccccgggaaacgatgaccagctctggctggtgatggagttctgtggtgctggttcagtgactgacctggtaaagaacacaaaaggcaacgccctgaaggaggactgtatcgcctatatctgcagggagatcctcaggggtctggcccatctccatgcccacaaggtgatccatcgagacatcaaggggcagaatgtgctgctgacagagaatgctgaggtcaagctagtggattttggggtgagtgctcagctggaccgcaccgtgggcagacggaacactttcattgggactccctactggatggctccagaggtcatcgcctgtgatgagaaccctgatgccacctatgattacaggagtgatatttggtctctaggaatcacagccatcgagatggcagagggagccccccctctgtgtgacatgcaccccatgcgagccctcttcctcattcctcggaaccctccgcccaggctcaagtccaagaagtggtctaagaagttcattgacttcattgacacatgtctcatcaagacttacctgagccgcccacccacggagcagctactgaagtttcccttcatccgggaccagcccacggagcggcaggtccgcatccagcttaaggaccacattgaccgatcccggaagaagcggggtgagaaagaggagacagaatatgagtacagcggcagcgaggaggaagatgacagccatggagaggaaggagagccaagctccatcatgaacgtgcctggagagtcgactctacgccgggagtttctccggctccagcaggaaaataagagcaactcagaggctttaaaacagcagcagcagctgcagcagcagcagcagcgagaccccgaggcacacatcaaacacctgctgcaccagcggcagcggcgcatagaggagcagaaggaggagcggcgccgcgtggaggagcaacagcggcgggagcgggagcagcggaagctgcaggagaaggagcagcagcggcggctggaggacatgcaggctctgcggcgggaggaggagcggcggcaggcggagcgcgagcaggaatacaagcggaagcagctggaggagcagcggcagtcagaacgtctccagaggcagctgcagcaggagcatgcctacctcaagtccctgcagcagcagcaacagcagcagcagcttcagaaacagcagcagcagcagctcctgcctggggacaggaagcccctgtaccattatggtcggggcatgaatcccgctgacaaaccagcctgggcccgagaggtagaagagagaacaaggatgaacaagcagcagaactctcccttggccaagagcaagccaggcagcacggggcctgagccccccatcccccaggcctccccagggcccccaggacccctttcccagactcctcctatgcagaggccggtggagccccaggagggaccgcacaagagcctggtggcacaccgggtcccactgaagccatatgcagcacctgtaccccgatcccagtccctgcaggaccagcccacccgaaacctggctgccttcccagcctcccatgaccccgaccctgccatccccgcacccactgccacgcccagtgcccgaggagctgtcatccgccagaattcagaccccacctctgaaggacctggccccagcccgaatcccccagcctgggtccgcccagataacgaggccccacccaaggtgcctcagaggacctcatctatcgccactgcccttaacaccagtggggccggagggtcccggccagcccaggcagtccgtgccagtaaccccgacctcaggaggagcgaccctggctgggaacgctcggacagcgtccttccagcctctcacgggcacctcccccaggctggctcactggagcggaaccgcgtgggagtctcctccaaaccggacagctcccctgtgctctcccctgggaataaagccaagcccgacgaccaccgctcacggccaggccggcccgcagactttgtgttgctgaaagagcggactctggacgaggcccctcggcctcccaagaaggccatggactactcgtcgtccagcgaggaggtggaaagcagtgaggacgacgaggaggaaggcgaaggcgggccagcagaggggagcagagatacccctgggggccgcagcgatggggatacagacagcgtcagcaccatggtggtccacgacgtcgaggagatcaccgggacccagcccccatacgggggcggcaccatggtggtccagcgcacccctgaagaggagcggaacctgctgcatgctgacagcaatgggtacacaaacctgcctgacgtggtccagcccagccactcacccaccgagaacagcaaaggccaaagcccaccctcgaaggatgggagtggtgactaccagtctcgtgggctggtaaaggcccctggcaagagctcgttcacgatgtttgtggatctagggatctaccagcctggaggcagtggggacagcatccccatcacagccctagtgggtggagagggcactcggctcgaccagctgcagtacgacgtgaggaagggttctgtggtcaacgtgaatcccaccaacacccgggcccacagtgagacccctgagatccggaagtacaagaagcgattcaactccgagatcctctgtgcagccctttggggggtcaacctgctggtgggcacggagaacgggctgatgttgctggaccgaagtgggcagggcaaggtgtatggactcattgggcggcgacgcttccagcagatggatgtgctggaggggctcaacctgctcatcaccatctcagggaaaaggaacaaactgcgggtgtattacctgtcctggctccggaacaagattctgcacaatgacccagaagtggagaagaagcagggctggaccaccgtgggggacatggagggctgcgggcactaccgtgttgtgaaatacgagcggattaagttcctggtcatcgccctcaagagctccgtggaggtgtatgcctgggcccccaaaccctaccacaaattcatggccttcaagtcctttgccgacctcccccaccgccctctgctggtcgacctgacagtagaggaggggcagcggctcaaggtcatctatggctccagtgctggcttccatgctgtggatgtcgactcggggaacagctatgacatctacatccctgtgcacatccagagccagatcacgccccatgccatcatcttcctccccaacaccgacggcatggagatgctgctgtgctacgaggacgagggtgtctacgtcaacacgtacgggcgcatcattaaggatgtggtgctgcagtggggggagatgcctacttctgtggcctacatctgctccaaccagataatgggctggggtgagaaagccattgagatccgctctgtggagacgggccacctcgacggggtcttcatgcacaaacgagctcagaggctcaagttcctgtgtgagcggaatgacaaggtgttttttgcctcagtccgctctgggggcagcagccaagtttacttcatgactctgaaccgtaactgcatcatgaactggtgacggggccctgggctggggctgtcccacactggacccagctctccccctgcagccaggcttcccgggccgcccctctttcccctccctgggcttttgcttttactggtttgatttcactggagcctgctgggaacgtgacctctgacccctgatgctttcgtgatcacgtgaccatcctcttccccaacatgtcctcttcccaaaactgtgcctgtccccagcttctggggagggacacagcttccccttcccaggaattgagtgggcctagcccctccccccttttctccatttgagaggagagtgcttggggcttgaaccccttaccccactgctgctgactgggcagggccctggacccctttatttgcacgtcaggggagccggctccccccttgaatgtaccagaccctggggggggtcactgggccctagatttttggggggtcaccagccactccaggggcagggaccatttcttcattttctgaaagcactttaatgattccccttcccccaaactccagggaatggaggggggaccccgccagccaaaacattccccccattcccgacccccatctcctcttctagcccatgcccttccccggtggagggagggagcagggagccctcactctccacgccccttgcttgcatctgtatatagtgtgagcagcaagtaacccttctcctccctcccccctcacccctcctcaatgtagtggccttggatatcctgtttgttaataaagacaattcaaccagctcccaccatgcaggccgcatgtccttgctttctgtcagtactgtagactaggcagagagagcctccagggtggggaagaaaggggcagggtgggctgggatctgcaatgagtgagcctcatggggtgggatgg

SEQ ID NO: 349526 - DNA, 5124 bp, Homo sapiens
gctggctccggggagatagcgcctgtcagtcggtgggtcggtcctcgcgccggccctccccctccccggtctccgggggaggcgcggtggagtccgcccccggggttctccgatgggggagaagcggcgacggcggcagtggagtaaccgagccggagcgtgagcggccccggtgccccgttccccacggaggccatgggcgacccagcccccgcccgcagcctggacgacatcgacctgtccgccctgcgggaccctgctgggatctttgagcttgtggaggtggtcggcaatggaacctacggacaggtgtacaagggtcggcatgtcaagacggggcagctggctgccatcaaggtcatggatgtcacggaggacgaggaggaagagatcaaacaggagatcaacatgctgaaaaagtactctcaccaccgcaacatcgccacctactacggagccttcatcaagaagagccccccgggaaacgatgaccagctctggctggtgatggagttctgtggtgctggttcagtgactgacctggtaaagaacacaaaaggcaacgccctgaaggaggactgtatcgcctatatctgcagggagatcctcaggggtctggcccatctccatgcccacaaggtgatccatcgagacatcaaggggcagaatgtgctgctgacagagaatgctgaggtcaagctagtggattttggggtgagtgctcagctggaccgcaccgtgggcagacggaacactttcattgggactccctactggatggctccagaggtcatcgcctgtgatgagaaccctgatgccacctatgattacaggagtgatatttggtctctaggaatcacagccatcgagatggcagagggagccccccctctgtgtgacatgcaccccatgcgagccctcttcctcattcctcggaaccctccgcccaggctcaagtccaagaagtggtctaagaagttcattgacttcattgacacatgtctcatcaagacttacctgagccgcccacccacggagcagctactgaagtttcccttcatccgggaccagcccacggagcggcaggtccgcatccagcttaaggaccacattgaccgatcccggaagaagcggggtgagaaagaggagacagaatatgagtacagcggcagcgaggaggaagatgacagccatggagaggaaggagagccaagctccatcatgaacgtgcctggagagtcgactctacgccgggagtttctccggctccagcaggaaaataagagcaactcagaggctttaaaacagcagcagcagctgcagcagcagcagcagcgagaccccgaggcacacatcaaacacctgctgcaccagcggcagcggcgcatagaggagcagaaggaggagcggcgccgcgtggaggagcaacagcggcgggagcgggagcagcggaagctgcaggagaaggagcagcagcggcggctggaggacatgcaggctctgcggcgggaggaggagcggcggcaggcggagcgcgagcaggaatacaagcggaagcagctggaggagcagcggcagtcagaacgtctccagaggcagctgcagcaggagcatgcctacctcaagtccctgcagcagcagcaacagcagcagcagcttcagaaacagcagcagcagcagctcctgcctggggacaggaagcccctgtaccattatggtcggggcatgaatcccgctgacaaaccagcctgggcccgagaggtagaagagagaacaaggatgaacaagcagcagaactctcccttggccaagagcaagccaggcagcacggggcctgagccccccatcccccaggcctccccagggcccccaggacccctttcccagactcctcctatgcagaggccggtggagccccaggagggaccgcacaagagcctggtggcacaccgggtcccactgaagccatatgcagcacctgtaccccgatcccagtccctgcaggaccagcccacccgaaacctggctgccttcccagcctcccatgaccccgaccctgccatccccgcacccactgccacgcccagtgcccgaggagctgtcatccgccagaattcagaccccacctctgaaggacctggccccagcccgaatcccccagcctgggtccgcccagataacgaggccccacccaaggtgcctcagaggacctcatctatcgccactgcccttaacaccagtggggccggagggtcccggccagcccaggcagtccgtgccagtaaccccgacctcaggaggagcgaccctggctgggaacgctcggacagcgtccttccagcctctcacgggcacctcccccaggctggctcactggagcggaaccgcgtgggagtctcctccaaaccggacagctcccctgtgctctcccctgggaataaagccaagcccgacgaccaccgctcacggccaggccggcccgcagactttgtgttgctgaaagagcggactctggacgaggcccctcggcctcccaagaaggccatggactactcgtcgtccagcgaggaggtggaaagcagtgaggacgacgaggaggaaggcgaaggcgggccagcagaggggagcagagatacccctgggggccgcagcgatggggatacagacagcgtcagcaccatggtggtccacgacgtcgaggagatcaccgggacccagcccccatacgggggcggcaccatggtggtccagcgcacccctgaagaggagcggaacctgctgcatgctgacagcaatgggtacacaaacctgcctgacgtggtccagcccagccactcacccaccgagaacagcaaaggccaaagcccaccctcgaaggatgggagtggtgactaccagtctcgtgggctggtaaaggcccctggcaagagctcgttcacgatgtttgtggatctagggatctaccagcctggaggcagtggggacagcatccccatcacagccctagtgggtggagagggcactcggctcgaccagctgcagtacgacgtgaggaagggttctgtggtcaacgtgaatcccaccaacacccgggcccacagtgagacccctgagatccggaagtacaagaagcgattcaactccgagatcctctgtgcagccctttggggggtcaacctgctggtgggcacggagaacgggctgatgttgctggaccgaagtgggcagggcaaggtgtatggactcattgggcggcgacgcttccagcagatggatgtgctggaggggctcaacctgctcatcaccatctcagggaaaaggaacaaactgcgggtgtattacctgtcctggctccggaacaagattctgcacaatgacccagaagtggagaagaagcagggctggaccaccgtgggggacatggagggctgcgggcactaccgtgttgtgaaatacgagcggattaagttcctggtcatcgccctcaagagctccgtggaggtgtatgcctgggcccccaaaccctaccacaaattcatggccttcaagtcctttgccgacctcccccaccgccctctgctggtcgacctgacagtagaggaggggcagcggctcaaggtcatctatggctccagtgctggcttccatgctgtggatgtcgactcggggaacagctatgacatctacatccctgtgcacatccagagccagatcacgccccatgccatcatcttcctccccaacaccgacggcatggagatgctgctgtgctacgaggacgagggtgtctacgtcaacacgtacgggcgcatcattaaggatgtggtgctgcagtggggggagatgcctacttctgtggcctacatctgctccaaccagataatgggctggggtgagaaagccattgagatccgctctgtggagacgggccacctcgacggggtcttcatgcacaaacgagctcagaggctcaagttcctgtgtgagcggaatgacaaggtgttttttgcctcagtccgctctgggggcagcagccaagtttacttcatgactctgaaccgtaactgcatcatgaactggtgacggggccctgggctggggctgtcccacactggacccagctctccccctgcagccaggcttcccgggccgcccctctttcccctccctgggcttttgcttttactggtttgatttcactggagcctgctgggaacgtgacctctgacccctgatgctttcgtgatcacgtgaccatcctcttccccaacatgtcctcttcccaaaactgtgcctgtccccagcttctggggagggacacagcttccccttcccaggaattgagtgggcctagcccctccccccttttctccatttgagaggagagtgcttggggcttgaaccccttaccccactgctgctgactgggcagggccctggacccctttatttgcacgtcaggggagccggctccccccttgaatgtaccagaccctggggggggtcactgggccctagatttttggggggtcaccagccactccaggggcagggaccatttcttcattttctgaaagcactttaatgattccccttcccccaaactccagggaatggaggggggacccgcaaccaccatgaacagcaaaggtcaatatccaacacagccaacctaccctgtgcagcctcctgggaatccagtataccctcagaccttgcatcttcctcaggctccaccctataccgatgctccacctgcctactcagagctctatcgtccgagctttgtgcacccaggggctgccacagtccccaccatgtcagccgcatttcctggagcctctctgtatcttcccatggcccagtctgtggctgttgggcctttaggttccacaatccccatggcttattatccattcataaaatgaatgtgggtgaagccgccctaaggattttcctttaatttctttggagtaatactgtaccatactgggctttgcttttagtaataaaacatcaaattaggtttggaggggaactttgaacttttctaagaaattaaagttggccaaaataattctggaatggggcttttaaattccctttaagggctttgaaaataat

SEQ ID NO: 349527 - DNA, 4631 bp, Homo sapiens
gctggctccggggagatagcgcctgtcagtcggtgggtcggtcctcgcgccggccctccccctccccggtctccgggggaggcgcggtggagtccgcccccggggttctccgatgggggagaagcggcgacggcggcagtggagtaaccgagccggagcgtgagcggccccggtgccccgttccccacggaggccatgggcgacccagcccccgcccgcagcctggacgacatcgacctgtccgccctgcgggaccctgctgggatctttgagcttgtggaggtggtcggcaatggaacctacggacaggtgtacaagggtcggcatgtcaagacggggcagctggctgccatcaaggtcatggatgtcacggaggacgaggaggaagagatcaaacaggagatcaacatgctgaaaaagtactctcaccaccgcaacatcgccacctactacggagccttcatcaagaagagccccccgggaaacgatgaccagctctggctggtgatggagttctgtggtgctggttcagtgactgacctggtaaagaacacaaaaggcaacgccctgaaggaggactgtatcgcctatatctgcagggagatcctcaggggtctggcccatctccatgcccacaaggtgatccatcgagacatcaaggggcagaatgtgctgctgacagagaatgctgaggtcaagctagtggattttggggtgagtgctcagctggaccgcaccgtgggcagacggaacactttcattgggactccctactggatggctccagaggtcatcgcctgtgatgagaaccctgatgccacctatgattacaggagtgatatttggtctctaggaatcacagccatcgagatggcagagggagccccccctctgtgtgacatgcaccccatgcgagccctcttcctcattcctcggaaccctccgcccaggctcaagtccaagaagtggtctaagaagttcattgacttcattgacacatgtctcatcaagacttacctgagccgcccacccacggagcagctactgaagtttcccttcatccgggaccagcccacggagcggcaggtccgcatccagcttaaggaccacattgaccgatcccggaagaagcggggtgagaaagaggagacagaatatgagtacagcggcagcgaggaggaagatgacagccatggagaggaaggagagccaagctccatcatgaacgtgcctggagagtcgactctacgccgggagtttctccggctccagcaggaaaataagagcaactcagaggctttaaaacagcagcagcagctgcagcagcagcagcagcgagaccccgaggcacacatcaaacacctgctgcaccagcggcagcggcgcatagaggagcagaaggaggagcggcgccgcgtggaggagcaacagcggcgggagcgggagcagcggaagctgcaggagaaggagcagcagcggcggctggaggacatgcaggctctgcggcgggaggaggagcggcggcaggcggagcgcgagcaggaatacaagcggaagcagctggaggagcagcggcagtcagaacgtctccagaggcagctgcagcaggagcatgcctacctcaagtccctgcagcagcagcaacagcagcagcagcttcagaaacagcagcagcagcagctcctgcctggggacaggaagcccctgtaccattatggtcggggcatgaatcccgctgacaaaccagcctgggcccgagaggtagaagagagaacaaggatgaacaagcagcagaactctcccttggccaagagcaagccaggcagcacggggcctgagccccccatcccccaggcctccccagggcccccaggacccctttcccagactcctcctatgcagaggccggtggagccccaggagggaccgcacaagagcctggtggcacaccgggtcccactgaagccatatgcagcacctgtaccccgatcccagtccctgcaggaccagcccacccgaaacctggctgccttcccagcctcccatgaccccgaccctgccatccccgcacccactgccacgcccagtgcccgaggagctgtcatccgccagaattcagaccccacctctgaaggacctggccccagcccgaatcccccagcctgggtccgcccagataacgaggccccacccaaggtgcctcagaggacctcatctatcgccactgcccttaacaccagtggggccggagggtcccggccagcccaggcagtccgtgccagtaaccccgacctcaggaggagcgaccctggctgggaacgctcggacagcgtccttccagcctctcacgggcacctcccccaggctggctcactggagcggaaccgcgtgggagtctcctccaaaccggacagctcccctgtgctctcccctgggaataaagccaagcccgacgaccaccgctcacggccaggccggcccgcagactttgtgttgctgaaagagcggactctggacgaggcccctcggcctcccaagaaggccatggactactcgtcgtccagcgaggaggtggaaagcagtgaggacgacgaggaggaaggcgaaggcgggccagcagaggggagcagagatacccctgggggccgcagcgatggggatacagacagcgtcagcaccatggtggtccacgacgtcgaggagatcaccgggacccagcccccatacgggggcggcaccatggtggtccagcgcacccctgaagaggagcggaacctgctgcatgctgacagcaatgggtacacaaacctgcctgacgtggtccagcccagccactcacccaccgagaacagcaaaggccaaagcccaccctcgaaggatgggagtggtgactaccagtctcgtgggctggtaaaggcccctggcaagagctcgttcacgatgtttgtggatctagggatctaccagcctggaggcagtggggacagcatccccatcacagccctagtgggtggagagggcactcggctcgaccagctgcagtacgacgtgaggaagggttctgtggtcaacgtgaatcccaccaacacccgggcccacagtgagacccctgagatccggaagtacaagaagcgattcaactccgagatcctctgtgcagccctttggggggtcaacctgctggtgggcacggagaacgggctgatgttgctggaccgaagtgggcagggcaaggtgtatggactcattgggcggcgacgcttccagcagatggatgtgctggaggggctcaacctgctcatcaccatctcagggaaaaggaacaaactgcgggtgtattacctgtcctggctccggaacaagattctgcacaatgacccagaagtggagaagaagcagggctggaccaccgtgggggacatggagggctgcgggcactaccgtgttgtgaaatacgagcggattaagttcctggtcatcgccctcaagagctccgtggaggtgtatgcctgggcccccaaaccctaccacaaattcatggccttcaagtcctttgccgacctcccccaccgccctctgctggtcgacctgacagtagaggaggggcagcggctcaaggtcatctatggctccagtgctggcttccatgctgtggatgtcgactcggggaacagctatgacatctacatccctgtgcacatccagagccagatcacgccccatgccatcatcttcctccccaacaccgacggcatggagatgctgctgtgctacgaggacgagggtgtctacgtcaacacgtacgggcgcatcattaaggatgtggtgctgcagtggggggagatgcctacttctgtggcctacatctgctccaaccagataatgggctggggtgagaaagccattgagatccgctctgtggagacgggccacctcgacggggtcttcatgcacaaacgagctcagaggctcaagttcctgtgtgagcggaatgacaaggtgttttttgcctcagtccgctctgggggcagcagccaagtttacttcatgactctgaaccgtaactgcatcatgaactggtgacggggccctgggctggggctgtcccacactggacccagctctccccctgcagccaggcttcccgggccgcccctctttcccctccctgggcttttgcttttactggtttgatttcactggagcctgctgggaacgtgacctctgacccctgatgctttcgtgatcacgtgaccatcctcttccccaacatgtcctcttcccaaaactgtgcctgtccccagcttctggggagggacacagcttccccttcccaggaattgagtgggcctagcccctccccccttttctccatttgagaggagagtgcttggggcttgaaccccttaccccactgctgctgactgggcagggccctggacccctttatttgcacgtcaggggagccggctccccccttgaatgtaccagaccctggggggggtcactgggccctagatttttggggggtcaccagccactccaggggcagggaccatttcttcattttctgaaagcactttaatgattccccttcccccacagcctacccgtcttccgcagcctagtgg

SEQ ID NO: 349528 - DNA, 5179 bp, Homo sapiens
gctggctccggggagatagcgcctgtcagtcggtgggtcggtcctcgcgccggccctccccctccccggtctccgggggaggcgcggtggagtccgcccccggggttctccgatgggggagaagcggcgacggcggcagtggagtaaccgagccggagcgtgagcggccccggtgccccgttccccacggaggccatgggcgacccagcccccgcccgcagcctggacgacatcgacctgtccgccctgcgggaccctgctgggatctttgagcttgtggaggtggtcggcaatggaacctacggacaggtgtacaagggtcggcatgtcaagacggggcagctggctgccatcaaggtcatggatgtcacggaggacgaggaggaagagatcaaacaggagatcaacatgctgaaaaagtactctcaccaccgcaacatcgccacctactacggagccttcatcaagaagagccccccgggaaacgatgaccagctctggctggtgatggagttctgtggtgctggttcagtgactgacctggtaaagaacacaaaaggcaacgccctgaaggaggactgtatcgcctatatctgcagggagatcctcaggggtctggcccatctccatgcccacaaggtgatccatcgagacatcaaggggcagaatgtgctgctgacagagaatgctgaggtcaagctagtggattttggggtgagtgctcagctggaccgcaccgtgggcagacggaacactttcattgggactccctactggatggctccagaggtcatcgcctgtgatgagaaccctgatgccacctatgattacaggagtgatatttggtctctaggaatcacagccatcgagatggcagagggagccccccctctgtgtgacatgcaccccatgcgagccctcttcctcattcctcggaaccctccgcccaggctcaagtccaagaagtggtctaagaagttcattgacttcattgacacatgtctcatcaagacttacctgagccgcccacccacggagcagctactgaagtttcccttcatccgggaccagcccacggagcggcaggtccgcatccagcttaaggaccacattgaccgatcccggaagaagcggggtgagaaagaggagacagaatatgagtacagcggcagcgaggaggaagatgacagccatggagaggaaggagagccaagctccatcatgaacgtgcctggagagtcgactctacgccgggagtttctccggctccagcaggaaaataagagcaactcagaggctttaaaacagcagcagcagctgcagcagcagcagcagcgagaccccgaggcacacatcaaacacctgctgcaccagcggcagcggcgcatagaggagcagaaggaggagcggcgccgcgtggaggagcaacagcggcgggagcgggagcagcggaagctgcaggagaaggagcagcagcggcggctggaggacatgcaggctctgcggcgggaggaggagcggcggcaggcggagcgcgagcaggaatatattcgtcacaggctagaggaggagcagcgacagctcgagatccttcagcaacagctgctccaggaacaggccctgctgctggtaacgggtccctcagcgtcctctgggaagatgcttttcagagcttctttgctggaacgggatgggaacacttcaagggaagggattcacccaggacatcaagggaatacatctcctctctaggcagttggagaaaagagagggcatgcctgctctaactcccagggccacaccctgctgagccctctctccctacccttgggcccaggaatacaagcggaagcagctggaggagcagcggcagtcagaacgtctccagaggcagctgcagcaggagcatgcctacctcaagtccctgcagcagcagcaacagcagcagcagcttcagaaacagcagcagcagcagctcctgcctggggacaggaagcccctgtaccattatggtcggggcatgaatcccgctgacaaaccagcctgggcccgagaggtagaagagagaacaaggatgaacaagcagcagaactctcccttggccaagagcaagccaggcagcacggggcctgagccccccatcccccaggcctccccagggcccccaggacccctttcccagactcctcctatgcagaggccggtggagccccaggagggaccgcacaagagcctggtggcacaccgggtcccactgaagccatatgcagcacctgtaccccgatcccagtccctgcaggaccagcccacccgaaacctggctgccttcccagcctcccatgaccccgaccctgccatccccgcacccactgccacgcccagtgcccgaggagctgtcatccgccagaattcagaccccacctctgaaggacctggccccagcccgaatcccccagcctgggtccgcccagataacgaggccccacccaaggtgcctcagaggacctcatctatcgccactgcccttaacaccagtggggccggagggtcccggccagcccaggcagtccgtgccagtaaccccgacctcaggaggagcgaccctggctgggaacgctcggacagcgtccttccagcctctcacgggcacctcccccaggctggctcactggagcggaaccgcgtgggagtctcctccaaaccggacagctcccctgtgctctcccctgggaataaagccaagcccgacgaccaccgctcacggccaggccggcccgcaagctataagcgagcaattggtgaggactttgtgttgctgaaagagcggactctggacgaggcccctcggcctcccaagaaggccatggactactcgtcgtccagcgaggaggtggaaagcagtgaggacgacgaggaggaaggcgaaggcgggccagcagaggggagcagagatacccctgggggccgcagcgatggggatacagacagcgtcagcaccatggtggtccacgacgtcgaggagatcaccgggacccagcccccatacgggggcggcaccatggtggtccagcgcacccctgaagaggagcggaacctgctgcatgctgacagcaatgggtacacaaacctgcctgacgtggtccagcccagccactcacccaccgagaacagcaaaggccaaagcccaccctcgaaggatgggagtggtgactaccagtctcgtgggctggtaaaggcccctggcaagagctcgttcacgatgtttgtggatctagggatctaccagcctggaggcagtggggacagcatccccatcacagccctagtgggtggagagggcactcggctcgaccagctgcagtacgacgtgaggaagggttctgtggtcaacgtgaatcccaccaacacccgggcccacagtgagacccctgagatccggaagtacaagaagcgattcaactccgagatcctctgtgcagccctttggggggtcaacctgctggtgggcacggagaacgggctgatgttgctggaccgaagtgggcagggcaaggtgtatggactcattgggcggcgacgcttccagcagatggatgtgctggaggggctcaacctgctcatcaccatctcagggaaaaggaacaaactgcgggtgtattacctgtcctggctccggaacaagattctgcacaatgacccagaagtggagaagaagcagggctggaccaccgtgggggacatggagggctgcgggcactaccgtgttgtgaaatacgagcggattaagttcctggtcatcgccctcaagagctccgtggaggtgtatgcctgggcccccaaaccctaccacaaattcatggccttcaagtcctttgccgacctcccccaccgccctctgctggtcgacctgacagtagaggaggggcagcggctcaaggtcatctatggctccagtgctggcttccatgctgtggatgtcgactcggggaacagctatgacatctacatccctgtgcacatccagagccagatcacgccccatgccatcatcttcctccccaacaccgacggcatggagatgctgctgtgctacgaggacgagggtgtctacgtcaacacgtacgggcgcatcattaaggatgtggtgctgcagtggggggagatgcctacttctgtggcctacatctgctccaaccagataatgggctggggtgagaaagccattgagatccgctctgtggagacgggccacctcgacggggtcttcatgcacaaacgagctcagaggctcaagttcctgtgtgagcggaatgacaaggtgttttttgcctcagtccgctctgggggcagcagccaagtttacttcatgactctgaaccgtaactgcatcatgaactggtgacggggccctgggctggggctgtcccacactggacccagctctccccctgcagccaggcttcccgggccgcccctctttcccctccctgggcttttgcttttactggtttgatttcactggagcctgctgggaacgtgacctctgacccctgatgctttcgtgatcacgtgaccatcctcttccccaacatgtcctcttcccaaaactgtgcctgtccccagcttctggggagggacacagcttccccttcccaggaattgagtgggcctagcccctccccccttttctccatttgagaggagagtgcttggggcttgaaccccttaccccactgctgctgactgggcagggccctggacccctttatttgcacgtcaggggagccggctccccccttgaatgtaccagaccctggggggggtcactgggccctagatttttggggggtcaccagccactccaggggcagggaccatttcttcattttctgaaagcactttaatgattccccttcccccaaactccagggaatggaggggggaccccgccagccaaaacattccccccattcccgacccccatctcctcttctagcccatgcccttccccggtggagggagggagcagggagccctcactctccacgccccttgcttgcatctgtatatagtgtgagcagcaagtaacccttctcctccctcccccctcacccctcctcaatgtagtggccttggatatcctgtttgttaataaagacaattcaaccagctcccacca

SEQ ID NO: 349529 - DNA, 4947 bp, Homo sapiens
gctggctccggggagatagcgcctgtcagtcggtgggtcggtcctcgcgccggccctccccctccccggtctccgggggaggcgcggtggagtccgcccccggggttctccgatgggggagaagcggcgacggcggcagtggagtaaccgagccggagcgtgagcggccccggtgccccgttccccacggaggccatgggcgacccagcccccgcccgcagcctggacgacatcgacctgtccgccctgcgggaccctgctgggatctttgagcttgtggaggtggtcggcaatggaacctacggacaggtgtacaagggtcggcatgtcaagacggggcagctggctgccatcaaggtcatggatgtcacggaggacgaggaggaagagatcaaacaggagatcaacatgctgaaaaagtactctcaccaccgcaacatcgccacctactacggagccttcatcaagaagagccccccgggaaacgatgaccagctctggctggtgatggagttctgtggtgctggttcagtgactgacctggtaaagaacacaaaaggcaacgccctgaaggaggactgtatcgcctatatctgcagggagatcctcaggggtctggcccatctccatgcccacaaggtgatccatcgagacatcaaggggcagaatgtgctgctgacagagaatgctgaggtcaagctagtggattttggggtgagtgctcagctggaccgcaccgtgggcagacggaacactttcattgggactccctactggatggctccagaggtcatcgcctgtgatgagaaccctgatgccacctatgattacaggagtgatatttggtctctaggaatcacagccatcgagatggcagagggagccccccctctgtgtgacatgcaccccatgcgagccctcttcctcattcctcggaaccctccgcccaggctcaagtccaagaagtggtctaagaagttcattgacttcattgacacatgtctcatcaagacttacctgagccgcccacccacggagcagctactgaagtttcccttcatccgggaccagcccacggagcggcaggtccgcatccagcttaaggaccacattgaccgatcccggaagaagcggggtgagaaagaggagacagaatatgagtacagcggcagcgaggaggaagatgacagccatggagaggaaggagagccaagctccatcatgaacgtgcctggagagtcgactctacgccgggagtttctccggctccagcaggaaaataagagcaactcagaggctttaaaacagcagcagcagctgcagcagcagcagcagcgagaccccgaggcacacatcaaacacctgctgcaccagcggcagcggcgcatagaggagcagaaggaggagcggcgccgcgtggaggagcaacagcggcgggagcgggagcagcggaagctgcaggagaaggagcagcagcggcggctggaggacatgcaggctctgcggcgggaggaggagcggcggcaggcggagcgcgagcaggaatatattcgtcacaggctagaggaggagcagcgacagctcgagatccttcagcaacagctgctccaggaacaggccctgctgctggaatacaagcggaagcagctggaggagcagcggcagtcagaacgtctccagaggcagctgcagcaggagcatgcctacctcaagtccctgcagcagcagcaacagcagcagcagcttcagaaacagcagcagcagcagctcctgcctggggacaggaagcccctgtaccattatggtcggggcatgaatcccgctgacaaaccagcctgggcccgagaggtagaagagagaacaaggatgaacaagcagcagaactctcccttggccaagagcaagccaggcagcacggggcctgagccccccatcccccaggcctccccagggcccccaggacccctttcccagactcctcctatgcagaggccggtggagccccaggagggaccgcacaagagcctggtggcacaccgggtcccactgaagccatatgcagcacctgtaccccgatcccagtccctgcaggaccagcccacccgaaacctggctgccttcccagcctcccatgaccccgaccctgccatccccgcacccactgccacgcccagtgcccgaggagctgtcatccgccagaattcagaccccacctctgaaggacctggccccagcccgaatcccccagcctgggtccgcccagataacgaggccccacccaaggtgcctcagaggacctcatctatcgccactgcccttaacaccagtggggccggagggtcccggccagcccaggcagtccgtgccagtaaccccgacctcaggaggagcgaccctggctgggaacgctcggacagcgtccttccagcctctcacgggcacctcccccaggctggctcactggagcggaaccgcgtgggagtctcctccaaaccggacagctcccctgtgctctcccctgggaataaagccaagcccgacgaccaccgctcacggccaggccggcccgcagactttgtgttgctgaaagagcggactctggacgaggcccctcggcctcccaagaaggccatggactactcgtcgtccagcgaggaggtggaaagcagtgaggacgacgaggaggaaggcgaaggcgggccagcagaggggagcagagatacccctgggggccgcagcgatggggatacagacagcgtcagcaccatggtggtccacgacgtcgaggagatcaccgggacccagcccccatacgggggcggcaccatggtggtccagcgcacccctgaagaggagcggaacctgctgcatgctgacagcaatgggtacacaaacctgcctgacgtggtccagcccagccactcacccaccgagaacagcaaaggccaaagcccaccctcgaaggatgggagtggtgactaccagtctcgtgggctggtaaaggcccctggcaagagctcgttcacgatgtttgtggatctagggatctaccagcctggaggcagtggggacagcatccccatcacagccctagtgggtggagagggcactcggctcgaccagctgcagtacgacgtgaggaagggttctgtggtcaacgtgaatcccaccaacacccgggcccacagtgagacccctgagatccggaagtacaagaagcgattcaactccgagatcctctgtgcagccctttggggggtcaacctgctggtgggcacggagaacgggctgatgttgctggaccgaagtgggcagggcaaggtgtatggactcattgggcggcgacgcttccagcagatggatgtgctggaggggctcaacctgctcatcaccatctcagggaaaaggaacaaactgcgggtgtattacctgtcctggctccggaacaagattctgcacaatgacccagaagtggagaagaagcagggctggaccaccgtgggggacatggagggctgcgggcactaccgtgttgtgaaatacgagcggattaagttcctggtcatcgccctcaagagctccgtggaggtgtatgcctgggcccccaaaccctaccacaaattcatggccttcaagtcctttgccgacctcccccaccgccctctgctggtcgacctgacagtagaggaggggcagcggctcaaggtcatctatggctccagtgctggcttccatgctgtggatgtcgactcggggaacagctatgacatctacatccctgtgcacatccagagccagatcacgccccatgccatcatcttcctccccaacaccgacggcatggagatgctgctgtgctacgaggacgagggtgtctacgtcaacacgtacgggcgcatcattaaggatgtggtgctgcagtggggggagatgcctacttctgtggcctacatctgctccaaccagataatgggctggggtgagaaagccattgagatccgctctgtggagacgggccacctcgacggggtcttcatgcacaaacgagctcagaggctcaagttcctgtgtgagcggaatgacaaggtgttttttgcctcagtccgctctgggggcagcagccaagtttacttcatgactctgaaccgtaactgcatcatgaactggtgacggggccctgggctggggctgtcccacactggacccagctctccccctgcagccaggcttcccgggccgcccctctttcccctccctgggcttttgcttttactggtttgatttcactggagcctgctgggaacgtgacctctgacccctgatgctttcgtgatcacgtgaccatcctcttccccaacatgtcctcttcccaaaactgtgcctgtccccagcttctggggagggacacagcttccccttcccaggaattgagtgggcctagcccctccccccttttctccatttgagaggagagtgcttggggcttgaaccccttaccccactgctgctgactgggcagggccctggacccctttatttgcacgtcaggggagccggctccccccttgaatgtaccagaccctggggggggtcactgggccctagatttttggggggtcaccagccactccaggggcagggaccatttcttcattttctgaaagcactttaatgattccccttcccccaaactccagggaatggaggggggaccccgccagccaaaacattccccccattcccgacccccatctcctcttctagcccatgcccttccccggtggagggagggagcagggagccctcactctccacgccccttgcttgcatctgtatatagtgtgagcagcaagtaacccttctcctccctcccccctcacccctcctcaatgtagtggccttggatatcctgtttgttaataaagacaattcaaccagctcccacca

SEQ ID NO: 349530 - DNA, 2660 bp, Homo sapiens
atctgcaaaggcgggcagagcggggcaccccaaagcctccagggccccctgctcagccccctggcccgcccaacgcctctagtaaccccgacctcaggaggagcgaccctggctgggaacgctcggacagcgtccttccagcctctcacgggcacctcccccaggctggctcactggagcggaaccgcgtgggagtctcctccaaaccggacagctcccctgtgctctcccctgggaataaagccaagcccgacgaccaccgctcacggccaggccggcccgcagactttgtgttgctgaaagagcggactctggacgaggcccctcggcctcccaagaaggccatggactactcgtcgtccagcgaggaggtggaaagcagtgaggacgacgaggaggaaggcgaaggcgggccagcagaggggagcagagatacccctgggggccgcagcgatggggatacagacagcgtcagcaccatggtggtccacgacgtcgaggagatcaccgggacccagcccccatacgggggcggcaccatggtggtccagcgcacccctgaagaggagcggaacctgctgcatgctgacagcaatgggtacacaaacctgcctgacgtggtccagcccagccactcacccaccgagaacagcaaaggccaaagcccaccctcgaaggatgggagtggtgactaccagtctcgtgggctggtaaaggcccctggcaagagctcgttcacgatgtttgtggatctagggatctaccagcctggaggcagtggggacagcatccccatcacagccctagtgggtggagagggcactcggctcgaccagctgcagtacgacgtgaggaagggttctgtggtcaacgtgaatcccaccaacacccgggcccacagtgagacccctgagatccggaagtacaagaagcgattcaactccgagatcctctgtgcagccctttggggggtcaacctgctggtgggcacggagaacgggctgatgttgctggaccgaagtgggcagggcaaggtgtatggactcattgggcggcgacgcttccagcagatggatgtgctggaggggctcaacctgctcatcaccatctcagggaaaaggaacaaactgcgggtgtattacctgtcctggctccggaacaagattctgcacaatgacccagaagtggagaagaagcagggctggaccaccgtgggggacatggagggctgcgggcactaccgtgttgtgaaatacgagcggattaagttcctggtcatcgccctcaagagctccgtggaggtgtatgcctgggcccccaaaccctaccacaaattcatggccttcaagtcctttgccgacctcccccaccgccctctgctggtcgacctgacagtagaggaggggcagcggctcaaggtcatctatggctccagtgctggcttccatgctgtggatgtcgactcggggaacagctatgacatctacatccctgtgcacatccagagccagatcacgccccatgccatcatcttcctccccaacaccgacggcatggagatgctgctgtgctacgaggacgagggtgtctacgtcaacacgtacgggcgcatcattaaggatgtggtgctgcagtggggggagatgcctacttctgtggcctacatctgctccaaccagataatgggctggggtgagaaagccattgagatccgctctgtggagacgggccacctcgacggggtcttcatgcacaaacgagctcagaggctcaagttcctgtgtgagcggaatgacaaggtgttttttgcctcagtccgctctgggggcagcagccaagtttacttcatgactctgaaccgtaactgcatcatgaactggtgacggggccctgggctggggctgtcccacactggacccagctctccccctgcagccaggcttcccgggccgcccctctttcccctccctgggcttttgcttttactggtttgatttcactggagcctgctgggaacgtgacctctgacccctgatgctttcgtgatcacgtgaccatcctcttccccaacatgtcctcttcccaaaactgtgcctgtccccagcttctggggagggacacagcttccccttcccaggaattgagtgggcctagcccctccccccttttctccatttgagaggagagtgcttggggcttgaaccccttaccccactgctgctgactgggcagggccctggacccctttatttgcacgtcaggggagccggctccccccttgaatgtaccagaccctggggggggtcactgggccctagatttttggggggtcaccagccactccaggggcagggaccatttcttcattttctgaaagcactttaatgattccccttcccccaaactccagggaatggaggggggaccccgccagccaaaacattccccccattcccgacccccatctcctcttctagcccatgcccttccccggtggagggagggagcagggagccctcactctccacgccccttgcttgcatctgtatatagtgtgagcagcaagtaacccttctcctccctcccccctcacccctcctcaatgtagtggccttggatatcctgtttgttaataaagacaattcaaccagctcccacca

SEQ ID NO: 349531 - DNA, 1992 bp, Homo sapiens
gctcctctcctcctgtctttctcctcctttctgcgtattatgaggtgccaagacctgatataggggatggaggtaaaaagagatggggtgagaagctgcagcccctcctcccacctcctcctccttctggcagccctagtgggtggagagggcactcggctcgaccagctgcagtacgacgtgaggaagggttctgtggtcaacgtgaatcccaccaacacccgggcccacagtgagacccctgagatccggaagtacaagaagcgattcaactccgagatcctctgtgcagccctttggggggtcaacctgctggtgggcacggagaacgggctgatgttgctggaccgaagtgggcagggcaaggtgtatggactcattgggcggcgacgcttccagcagatggatgtgctggaggggctcaacctgctcatcaccatctcagggaaaaggaacaaactgcgggtgtattacctgtcctggctccggaacaagattctgcacaatgacccagaagtggagaagaagcagggctggaccaccgtgggggacatggagggctgcgggcactaccgtgttgtgaaatacgagcggattaagttcctggtcatcgccctcaagagctccgtggaggtgtatgcctgggcccccaaaccctaccacaaattcatggccttcaagtcctttgccgacctcccccaccgccctctgctggtcgacctgacagtagaggaggggcagcggctcaaggtcatctatggctccagtgctggcttccatgctgtggatgtcgactcggggaacagctatgacatctacatccctgtgcacatccagagccagatcacgccccatgccatcatcttcctccccaacaccgacggcatggagatgctgctgtgctacgaggacgagggtgtctacgtcaacacgtacgggcgcatcattaaggatgtggtgctgcagtggggggagatgcctacttctgtggcctacatctgctccaaccagataatgggctggggtgagaaagccattgagatccgctctgtggagacgggccacctcgacggggtcttcatgcacaaacgagctcagaggctcaagttcctgtgtgagcggaatgacaaggtgttttttgcctcagtccgctctgggggcagcagccaagtttacttcatgactctgaaccgtaactgcatcatgaactggtgacggggccctgggctggggctgtcccacactggacccagctctccccctgcagccaggcttcccgggccgcccctctttcccctccctgggcttttgcttttactggtttgatttcactggagcctgctgggaacgtgacctctgacccctgatgctttcgtgatcacgtgaccatcctcttccccaacatgtcctcttcccaaaactgtgcctgtccccagcttctggggagggacacagcttccccttcccaggaattgagtgggcctagcccctccccccttttctccatttgagaggagagtgcttggggcttgaaccccttaccccactgctgctgactgggcagggccctggacccctttatttgcacgtcaggggagccggctccccccttgaatgtaccagaccctggggggggtcactgggccctagatttttggggggtcaccagccactccaggggcagggaccatttcttcattttctgaaagcactttaatgattccccttcccccaaactccagggaatggaggggggaccccgccagccaaaacattccccccattcccgacccccatctcctcttctagcccatgcccttccccggtggagggagggagcagggagccctcactctccacgccccttgcttgcatctgtatatagtgtgagcagcaagtaacccttctcctccctcccccctcacccctcctcaatgtagtggccttggatatcctgtttgttaataaagacaattcaaccagctcccacca

SEQ ID NO: 349532 - DNA, 4913 bp, Homo sapiens
gctggctccggggagatagcgcctgtcagtcggtgggtcggtcctcgcgccggccctccccctccccggtctccgggggaggcgcggtggagtccgcccccggggttctccgatgggggagaagcggcgacggcggcagtggagtaaccgagccggagcgtgagcggccccggtgccccgttccccacggaggccatgggcgacccagcccccgcccgcagcctggacgacatcgacctgtccgccctgcgggaccctgctgggatctttgagcttgtggaggtggtcggcaatggaacctacggacaggtgtacaagggtcggcatgtcaagacggggcagctggctgccatcaaggtcatggatgtcacggaggacgaggaggaagagatcaaacaggagatcaacatgctgaaaaagtactctcaccaccgcaacatcgccacctactacggagccttcatcaagaagagccccccgggaaacgatgaccagctctggctggtgatggagttctgtggtgctggttcagtgactgacctggtaaagaacacaaaaggcaacgccctgaaggaggactgtatcgcctatatctgcagggagatcctcaggggtctggcccatctccatgcccacaaggtgatccatcgagacatcaaggggcagaatgtgctgctgacagagaatgctgaggtcaagctagtggattttggggtgagtgctcagctggaccgcaccgtgggcagacggaacactttcattgggactccctactggatggctccagaggtcatcgcctgtgatgagaaccctgatgccacctatgattacaggagtgatatttggtctctaggaatcacagccatcgagatggcagagggagccccccctctgtgtgacatgcaccccatgcgagccctcttcctcattcctcggaaccctccgcccaggctcaagtccaagaagtggtctaagaagttcattgacttcattgacacatgtctcatcaagacttacctgagccgcccacccacggagcagctactgaagtttcccttcatccgggaccagcccacggagcggcaggtccgcatccagcttaaggaccacattgaccgatcccggaagaagcggggtgagaaagaggagacagaatatgagtacagcggcagcgaggaggaagatgacagccatggagaggaaggagagccaagctccatcatgaacgtgcctggagagtcgactctacgccgggagtttctccggctccagcaggaaaataagagcaactcagaggctttaaaacagcagcagcagctgcagcagcagcagcagcgagaccccgaggcacacatcaaacacctgctgcaccagcggcagcggcgcatagaggagcagaaggaggagcggcgccgcgtggaggagcaacagcggcgggagcgggagcagcggaagctgcaggagaaggagcagcagcggcggctggaggacatgcaggctctgcggcgggaggaggagcggcggcaggcggagcgcgagcaggaatacaagcggaagcagctggaggagcagcggcagtcagaacgtctccagaggcagctgcagcaggagcatgcctacctcaagtccctgcagcagcagcaacagcagcagcagcttcagaaacagcagcagcagcagctcctgcctggggacaggaagcccctgtaccattatggtcggggcatgaatcccgctgacaaaccagcctgggcccgagaggtagaagagagaacaaggatgaacaagcagcagaactctcccttggccaagagcaagccaggcagcacggggcctgagccccccatcccccaggcctccccagggcccccaggacccctttcccagactcctcctatgcagaggccggtggagccccaggagggaccgcacaagagcctggtggcacaccgggtcccactgaagccatatgcagcacctgtaccccgatcccagtccctgcaggaccagcccacccgaaacctggctgccttcccagcctcccatgaccccgaccctgccatccccgcacccactgccacgcccagtgcccgaggagctgtcatccgccagaattcagaccccacctctgaaggacctggccccagcccgaatcccccagcctgggtccgcccagataacgaggccccacccaaggtgcctcagaggacctcatctatcgccactgcccttaacaccagtggggccggagggtcccggccagcccaggcagtccgtgccagtaaccccgacctcaggaggagcgaccctggctgggaacgctcggacagcgtccttccagcctctcacgggcacctcccccaggctggctcactggagcggaaccgcgtgggagtctcctccaaaccggacagctcccctgtgctctcccctgggaataaagccaagcccgacgaccaccgctcacggccaggccggcccgcagactttgtgttgctgaaagagcggactctggacgaggcccctcggcctcccaagaaggccatggactactcgtcgtccagcgaggaggtggaaagcagtgaggacgacgaggaggaaggcgaaggcgggccagcagaggggagcagagatacccctgggggccgcagcgatggggatacagacagcgtcagcaccatggtggtccacgacgtcgaggagatcaccgggacccagcccccatacgggggcggcaccatggtggtccagcgcacccctgaagaggagcggaacctgctgcatgctgacagcaatgggtacacaaacctgcctgacgtggtccagcccagccactcacccaccgagaacagcaaaggccaaagcccaccctcgaaggatgggagtggtgactaccagtctcgtgggctggtaaaggcccctggcaagagctcgttcacgatgtttgtggatctagggatctaccagcctggaggcagtggggacagcatccccatcacagccctagtgggtggagagggcactcggctcgaccagctgcagtacgacgtgaggaagggttctgtggtcaacgtgaatcccaccaacacccgggcccacagtgagacccctgagatccggaagtacaagaagcgattcaactccgagatcctctgtgcagccctttggggggtcaacctgctggtgggcacggagaacgggctgatgttgctggaccgaagtgggcagggcaaggtgtatggactcattgggcggcgacgcttccagcagatggatgtgctggaggggctcaacctgctcatcaccatctcagggaaaaggaacaaactgcgggtgtattacctgtcctggctccggaacaagattctgcacaatgacccagaagtggagaagaagcagggctggaccaccgtgggggacatggagggctgcgggcactaccgtgttgtgaaatacgagcggattaagttcctggtcatcgccctcaagagctccgtggaggtgtatgcctgggcccccaaaccctaccacaaattcatggccttcaagtcctttgccgacctcccccaccgccctctgctggtcgacctgacagtagaggaggggcagcggctcaaggtcatctatggctccagtgctggcttccatgctgtggatgtcgactcggggaacagctatgacatctacatccctgtgcacatccagagccagatcacgccccatgccatcatcttcctccccaacaccgacggcatggagatgctgctgtgctacgaggacgagggtgtctacgtcaacacgtacgggcgcatcattaaggatgtggtgctgcagtggggggagatgcctacttctgtggcctacatctgctccaaccagataatgggctggggtgagaaagccattgagatccgctctgtggagacgggccacctcgacggggtcttcatgcacaaacgagctcagaggctcaagttcctgtgtgagcggaatgacaagttgagacacccccccaacctcagcccttggtgacttcttctcctgccccaccagtgttttttgcctcagtccgctctgggggcagcagccaagtttacttcatgactctgaaccgtaactgcatcatgaactggtgacggggccctgggctggggctgtcccacactggacccagctctccccctgcagccaggcttcccgggccgcccctctttcccctccctgggcttttgcttttactggtttgatttcactggagcctgctgggaacgtgacctctgacccctgatgctttcgtgatcacgtgaccatcctcttccccaacatgtcctcttcccaaaactgtgcctgtccccagcttctggggagggacacagcttccccttcccaggaattgagtgggcctagcccctccccccttttctccatttgagaggagagtgcttggggcttgaaccccttaccccactgctgctgactgggcagggccctggacccctttatttgcacgtcaggggagccggctccccccttgaatgtaccagaccctggggggggtcactgggccctagatttttggggggtcaccagccactccaggggcagggaccatttcttcattttctgaaagcactttaatgattccccttcccccaaactccagggaatggaggggggaccccgccagccaaaacattccccccattcccgacccccatctcctcttctagcccatgcccttccccggtggagggagggagcagggagccctcactctccacgccccttgcttgcatctgtatatagtgtgagcagcaagtaacccttctcctccctcccccctcacccctcctcaatgtagtggccttggatatcctgtttgttaataaagacaattcaaccagctcccacca

SEQ ID NO: 349533 - DNA, 3231 bp, Homo sapiens
gctggctccggggagatagcgcctgtcagtcggtgggtcggtcctcgcgccggccctccccctccccggtctccgggggaggcgcggtggagtccgcccccggggttctccgatgggggagaagcggcgacggcggcagtggagtaaccgagccggagcgtgagcggccccggtgccccgttccccacggaggccatgggcgacccagcccccgcccgcagcctggacgacatcgacctgtccgccctgcgggaccctgctgggatctttgagcttgtggaggtggtcggcaatggaacctacggacaggtgtacaagggtcggcatgtcaagacggggcagctggctgccatcaaggtcatggatgtcacggaggacgaggaggaagagatcaaacaggagatcaacatgctgaaaaagtactctcaccaccgcaacatcgccacctactacggagccttcatcaagaagagccccccgggaaacgatgaccagctctggctggtgatggagttctgtggtgctggttcagtgactgacctggtaaagaacacaaaaggcaacgccctgaaggaggactgtatcgcctatatctgcagggagatcctcaggggtctggcccatctccatgcccacaaggtgatccatcgagacatcaaggggcagaatgtgctgctgacagagaatgctgaggtcaagctagtggattttggggtgagtgctcagctggaccgcaccgtgggcagacggaacactttcattgggactccctactggatggctccagaggtcatcgcctgtgatgagaaccctgatgccacctatgattacaggagtgatatttggtctctaggaatcacagccatcgagatggcagagggagccccccctctgtgtgacatgcaccccatgcgagccctcttcctcattcctcggaaccctccgcccaggctcaagtccaagaagtggtctaagaagttcattgacttcattgacacatgtctcatcaagacttacctgagccgcccacccacggagcagctactgaagtttcccttcatccgggaccagcccacggagcggcaggtccgcatccagcttaaggaccacattgaccgatcccggaagaagcggggtgagaaagaggagacagaatatgagtacagcggcagcgaggaggaagatgacagccatggagaggaaggagagccaagctccatcatgaacgtgcctggagagtcgactctacgccgggagtttctccggctccagcaggaaaataagagcaactcagaggctttaaaacagcagcagcagctgcagcagcagcagcagcgagaccccgaggcacacatcaaacacctgctgcaccagcggcagcggcgcatagaggagcagaaggaggagcggcgccgcgtggaggagcaacagcggcgggagcgggagcagcggaagctgcaggagaaggagcagcagcggcggctggaggacatgcaggctctgcggcgggaggaggagcggcggcaggcggagcgcgagcaggaatacaagcggaagcagctggaggagcagcggcagtcagaacgtctccagaggcagctgcagcaggagcatgcctacctcaagtccctgcagcagcagcaacagcagcagcagcttcagaaacagcagcagcagcagctcctgcctggggacaggaagcccctgtaccattatggtcggggcatgaatcccgctgacaaaccagcctgggcccgagaggtagaagagagaacaaggatgaacaagcagcagaactctcccttggccaagagcaagccaggcagcacggggcctgagccccccatcccccaggcctccccagggcccccaggacccccctgggcccccaaaccctaccacaaattcatggccttcaagtcctttgccgacctcccccaccgccctctgctggtcgacctgacagtagaggaggggcagcggctcaaggtcatctatggctccagtgctggcttccatgctgtggatgtcgactcggggaacagctatgacatctacatccctgtgcacatccagagccagatcacgccccatgccatcatcttcctccccaacaccgacggcatggagatgctgctgtgctacgaggacgagggtgtctacgtcaacacgtacgggcgcatcattaaggatgtggtgctgcagtggggggagatgcctacttctgtggcctacatctgctccaaccagataatgggctggggtgagaaagccattgagatccgctctgtggagacgggccacctcgacggggtcttcatgcacaaacgagctcagaggctcaagttcctgtgtgagcggaatgacaaggtgttttttgcctcagtccgctctgggggcagcagccaagtttacttcatgactctgaaccgtaactgcatcatgaactggtgacggggccctgggctggggctgtcccacactggacccagctctccccctgcagccaggcttcccgggccgcccctctttcccctccctgggcttttgcttttactggtttgatttcactggagcctgctgggaacgtgacctctgacccctgatgctttcgtgatcacgtgaccatcctcttccccaacatgtcctcttcccaaaactgtgcctgtccccagcttctggggagggacacagcttccccttcccaggaattgagtgggcctagcccctccccccttttctccatttgagaggagagtgcttggggcttgaaccccttaccccactgctgctgactgggcagggccctggacccctttatttgcacgtcaggggagccggctccccccttgaatgtaccagaccctggggggggtcactgggccctagatttttggggggtcaccagccactccaggggcagggaccatttcttcattttctgaaagcactttaatgattccccttcccccaaactccagggaatggaggggggaccccgccagccaaaacattccccccattcccgacccccatctcctcttctagcccatgcccttccccggtggagggagggagcagggagccctcactctccacgccccttgcttgcatctgtatatagtgtgagcagcaagtaacccttctcctccctcccccctcacccctcctcaatgtagtggccttggatatcctgtttgttaataaagacaattcaaccagctcccacca

SEQ ID NO: 349534 - DNA, 3945 bp, Homo sapiens
gctggctccggggagatagcgcctgtcagtcggtgggtcggtcctcgcgccggccctccccctccccggtctccgggggaggcgcggtggagtccgcccccggggttctccgatgggggagaagcggcgacggcggcagtggagtaaccgagccggagcgtgagcggccccggtgccccgttccccacggaggccatgggcgacccagcccccgcccgcagcctggacgacatcgacctgtccgccctgcgggaccctgctgggatctttgagcttgtggaggtggtcggcaatggaacctacggacaggtgtacaagggtcggcatgtcaagacggggcagctggctgccatcaaggtcatggatgtcacggaggacgaggaggaagagatcaaacaggagatcaacatgctgaaaaagtactctcaccaccgcaacatcgccacctactacggagccttcatcaagaagagccccccgggaaacgatgaccagctctggctggtgatggagttctgtggtgctggttcagtgactgacctggtaaagaacacaaaaggcaacgccctgaaggaggactgtatcgcctatatctgcagggagatcctcaggggtctggcccatctccatgcccacaaggtgatccatcgagacatcaaggggcagaatgtgctgctgacagagaatgctgaggtcaagctagtggattttggggtgagtgctcagctggaccgcaccgtgggcagacggaacactttcattgggactccctactggatggctccagaggtcatcgcctgtgatgagaaccctgatgccacctatgattacaggagtgatatttggtctctaggaatcacagccatcgagatggcagagggagccccccctctgtgtgacatgcaccccatgcgagccctcttcctcattcctcggaaccctccgcccaggctcaagtccaagaagtggtctaagaagttcattgacttcattgacacatgtctcatcaagacttacctgagccgcccacccacggagcagctactgaagtttcccttcatccgggaccagcccacggagcggcaggtccgcatccagcttaaggaccacattgaccgatcccggaagaagcggggtgagaaagaggagacagaatatgagtacagcggcagcgaggaggaagatgacagccatggagaggaaggagagccaagctccatcatgaacgtgcctggagagtcgactctacgccgggagtttctccggctccagcaggaaaataagagcaactcagaggctttaaaacagcagcagcagctgcagcagcagcagcagcgagaccccgaggcacacatcaaacacctgctgcaccagcggcagcggcgcatagaggagcagaaggaggagcggcgccgcgtggaggagcaacagcggcgggagcgggagcagcggaagctgcaggagaaggagcagcagcggcggctggaggacatgcaggctctgcggcgggaggaggagcggcggcaggcggagcgcgagcaggaatacaagcggaagcagctggaggagcagcggcagtcagaacgtctccagaggcagctgcagcaggagcatgcctacctcaagtccctgcagcagcagcaacagcagcagcagcttcagaaacagcagcagcagcagctcctgcctggggacaggaagcccctgtaccattatggtcggggcatgaatcccgctgacaaaccagcctgggcccgagaggtagaagagagaacaaggatgaacaagcagcagaactctcccttggccaagagcaagccaggcagcacggggcctgagccccccatcccccaggcctccccagggcccccaggacccctttcccagactcctcctatgcagaggccggtggagccccaggagggaccgcacaagagcctggtggcacaccgggtcccactgaagccatatgcagcacctgtaccccgatcccagtccctgcaggaccagcccacccgaaacctggctgccttcccagcctcccatgaccccgaccctgccatccccgcacccactgccacgcccagtgcccgaggagctgtcatccgccagaattcagaccccacctctgaaggacctggccccagcccgaatcccccagcctgggtccgcccagataacgaggccccacccaaggtgcctcagaggacctcatctatcgccactgcccttaacaccagtggggccggagggtcccggccagcccaggcagtccgtgccagtaaccccgacctcaggaggagcgaccctggctgggaacgctcggacagcgtccttccagcctctcacgggcacctcccccaggctggctcactggagcggaaccgcgtgggagtctcctccaaaccggacagctcccctgtgctctcccctgggaataaagccaagcccgacgaccaccgctcacggccaggccggcccgcagactttgtgttgctgaaagagcggactctggacgaggcccctcggcctcccaagaaggccatggactactcgtcgtccagcgaggaggtggaaagcagtgaggacgacgaggaggaaggcgaaggcgggccagcagaggggagcagagatacccctgggggccgcagcgatggggatacagacagcgtcagcaccatggtggtccacgacgtcgaggagatcaccgggacccagcccccatacgggggcggcaccatggtggtccagcgcacccctgaagaggagcggaacctgctgcatgctgacagcaatgggtacacaaacctgcctgacgtggtccagcccagccactcacccaccgagaacagcaaaggccaaagcccaccctcgaaggatgggagtggtgactaccagtctcgtgggctggtaaaggcccctggcaagagctcgttcacgatgtttgtggatctagggatctaccagcctggaggcagtggggacagcatccccatcacagccctagtgggtggagagggcactcggctcgaccagctgcagtacgacgtgaggaagggttctgtggtcaacgtgaatcccaccaacacccgggcccacagtgagacccctgagatccggaagtacaagaagcgattcaactccgagatcctctgtgcagccctttggggggtcaacctgctggtgggcacggagaacgggctgatgttgctggaccgaagtgggcagggcaaggtgtatggactcattgggcggcgacgcttccagcagatggatgtgctggaggggctcaacctgctcatcaccatctcagggaaaaggaacaaactgcgggtgtattacctgtcctggctccggaacaagattctgcacaatgacccagaagtggagaagaagcagggctggaccaccgtgggggacatggagggctgcgggcactaccgtgttgtgaaatacgagcggattaagttcctggtcatcgccctcaagagctccgtggaggtgtatgcctgggcccccaaaccctaccacaaattcatggccttcaagtcctttgccgacctcccccaccgccctctgctggtcgacctgacagtagaggaggggcagcggctcaaggtcatctatggctccagtgctggcttccatgctgtggatgtcgactcggggaacagctatgacatctacatccctgtgcacatccagagccagatcacgccccatgccatcatcttcaggacacaccaccaagactcttgttcagagtgcctacctgaggctgaggcttaatcggaacatcagataccatcttctctcctccactctccaaccaccacactaacaagctttgagaagaataacagtggaatacaacttggagaaccatgcaaagggagacccaaagccaaggagggacactcatagccaagcagatagcagtcttca

SEQ ID NO: 349535 - DNA, 895 bp, Homo sapiens
  misc_feature (17)..(17): n is a, c, g, or t
tggctggtcctgggtgnggagtcggaatgacaaggtgttttttgcctcagtccgctctgggggcagcagccaagtttacttcatgactctgaaccgtaactgcatcatgaactggtgacggggccctgggctggggctgtcccacactggacccagctctccccctgcagccaggcttcccgggccgcccctctttcccctccctgggcttttgcttttactggtttgatttcactggagcctgctgggaacgtgacctctgacccctgatgctttcgtgatcacgtgaccatcctcttccccaacatgtcctcttcccaaaactgtgcctgtccccagcttctggggagggacacagcttccccttcccaggaattgagtgggcctagcccctccccccttttctccatttgagaggagagtgcttggggcttgaaccccttaccccactgctgctgactgggcagggccctggacccctttatttgcacgtcaggggagccggctccccccttgaatgtaccagaccctggggggggtcactgggccctagatttttggggggtcaccagccactccaggggcagggaccatttcttcattttctgaaagcactttaatgattccccttcccccaaactccagggaatggaggggggaccccgccagccaaaacattccccccattcccgacccccatctcctcttctagcccatgcccttccccggtggagggagggagcagggagccctcactctccacgccccttgcttgcatctgtatatagtgtgagcagcaagtaacccttctcctccctcccccctcacccctcctcaatgtagtggccttggatatcctgtttgttaataaagacaattcaaccagctcccacca

SEQ ID NO: 349536 - DNA, 1240 bp, Homo sapiens
gctggctccggggagatagcgcctgtcagtcggtgggtcggtcctcgcgccggccctccccctccccggtctccgggggaggcgcggtggagtccgcccccggggttctccgatgggggagaagcggcgacggcggcagtggagtaaccgagccggagcgtgagcggccccggtgccccgttccccacggaggccatgggcgacccagcccccgcccgcagcctggacgacatcgacctgtccgccctgcgggaccctgctgggatctttgagcttgtggaggtggtcggcaatggaacctacggacaggtgtacaagggtcggcatgtcaagacggggcagctggctgccatcaaggtcatggatgtcacggaggacgaggaggaagagatcaaacaggagatcaacatgctgaaaaagtactctcaccaccgcaacatcgccacctactacggagccttcatcaagaagagccccccgggaaacgatgaccagctctggctggtgatggagttctgtggtgctggttcagtgactgacctggtaaagaacacaaaaggcaacgccctgaaggaggactgtatcgcctatatctgcagggagatcctcaggggtctggcccatctccatgcccacaaggtgatccatcgagacatcaaggggcagaatgtgctgctgacagagaatgctgaggtcaagctagtggattttggggtgagtgctcagctggaccgcaccgtgggcagacggaacactttcattgggactccctactggatggctccagaggtcatcgcctgtgatgagaaccctgatgccacctatgattacaggagtgatatttggtctctaggaatcacagccatcgagatggcagagggagccccccctctgtgtgacatgcaccccatgcgagccctcttcctcattcctcggaaccctccgcccaggctcaagtccaagaagtgacttacctgagccgcccacccacggagcagctactgaagtttcccttcatccgggaccagcccacggagcggcaggtccgcatccagcttaaggaccacattgaccgatcccggaagaagcggggtgagaaagaggagacagaatatgagtacagcggcagcgaggaggaagatgacagccatggagaggaaggagagccaagtcccatcatgtaacagatgccatcgagcattgactatacgccagggactgcatcctggcttcatacagg

SEQ ID NO: 349537 - DNA, 496 bp, Homo sapiens
cattcgatctagaggatcccgaggcatcacgatgtccgtaggtcatcgaccggtccgccctgcgggaccctgctgggatctttgagcttgtggaggtggtcggcaatggaacctacggacaggtgtacaagggtcggcatgtcaagacggggcagctggctgccatcaaggtcatggatgtcacggaggacgaggaggaagagatcaaacaggagatcaacatgctgaaaaagtactctcaccaccgcaacatcgccacctactacggagccttcatcaagaagagccccccgggaaacgatgaccagctctggctggtgatggagttctgtggtgctggttcagtgactgacctggtaaagaacacaaaaggcaacgccctgaaggaggactgtatcgcctatatctgcagggagatcctcaggggtctggcccatctccatgcccacaaggatccatcgtttcccgggggcgaacctcacatctaggaccgagc

SEQ ID NO: 349538 - DNA, 363 bp, Homo sapiens
acatggagggctgcgggcactaccgtgttggtgaggatgtcccaacagagtggccagcgcatacttgttcatgaagagagaaatggatctgggagccagggacttggggcctgggtggggcagtgtagtgacagaccacggggaggcgcccgtggcgcaagaagggaagtctcagcatccctcttctctcccgcccccagtgaaatacgagcggattaagttcctggtcatcgccctcaagagctccgtggaggtgtatgcctgggcccccaaaccctaccacaaattcatggccttcaaggtaatcccagcctcggtccctaacaccatctggagtcccagcgcctctccccgtgcccctga

SEQ ID NO: 349539 - DNA, 877 bp, Homo sapiens
gctggctccggggagatagcgcctgtcagtcggtgggtcggtcctcgcgccggccctccccctccccggtctccgggggaggcgcggtggagtccgcccccggggttctccgatgggggagaagcggcgacggcggcagtggagtaaccgagccggagcgtgagcggccccggtgccccgttccccacggaggccatgggcgaccgcacgtcaggggagccggctccccccttgaatgtaccagaccctggggggggtcactgggccctagatttttggggggtcaccagccactccaggggcagggaccatttcttcattttctgaaagcactttaatgattccccttcccccaaactccagggaatggaggggggacccgcaaccaccatgaacagcaaaggtcaatatccaacacagccaacctaccctgtgcagcctcctgggaatccagtataccctcagaccttgcatcttcctcaggctccaccctataccgatgctccacctgcctactcagagctctatcgtccgagctttgtgcacccaggggctgccacagtccccaccatgtcagccgcatttcctggagcctctctgtatcttcccatggcccagtctgtggctgttgggcctttaggttccacaatccccatggcttattatccattcataaaatgaatgtgggtgaagccgccctaaggattttcctttaatttctttggagtaatactgtaccatactgggctttgcttttagtaataaaacatcaaattaggtttggaggggaactttgaacttttctaagaaattaaagttggccaaaataattctggaatggggcttttaaattccctttaagggctttgaaaataat

SEQ ID NO: 349540 - DNA, 557 bp, Homo sapiens
  misc_feature (546)..(546): n is a, c, g, or t
cattcgatctagaggatcccgaggcatcacgatgtccgtaggtcatcgaccggtccgccctgcgggaccctgctgggatctttgagcttgtggaggtggtcggcaatggaacctacggacaggtgtacaagggtcggcatgtcaagacggggcagctggctgccatcaaggtcatggatgtcacggaggacgaggaggaagagatcaaacaggagatcaacatgctgaaaaagtactctcaccaccgcaacatcgccacctactacggagccttcatcaagaagagccccccgggaaacgatgaccagctctggctggtgatggagttctgtggtgctggttcagtgactgacctggtaaagaacacaaaaggcaacgccctgaaggaggactgtatcgcctatatctgcagggagatcctcaggggtctggcccatctccatgcccacaaggtgatccatcgagacatcaaggggcagaatgtgctgctgacagagaatgctgaggtcaagctagtggatttgggggtgagtgtcagctggacgnaccgtgggcga

SEQ ID NO: 349541 - DNA, 4733 bp, Homo sapiens
gctggctccggggagatagcgcctgtcagtcggtgggtcggtcctcgcgccggccctccccctccccggtctccgggggaggcgcggtggagtccgcccccggggttctccgatgggggagaagcggcgacggcggcagtggagtaaccgagccggagcgtgagcggccccggtgccccgttccccacggaggccatgggcgacccagcccccgcccgcagcctggacgacatcgacctgtccgccctgcgggaccctgctgggatctttgagcttgtggaggtggtcggcaatggaacctacggacaggtgtacaagggtcggcatgtcaagacggggcagctggctgccatcaaggtcatggatgtcacggaggacgaggaggaagagatcaaacaggagatcaacatgctgaaaaagtactctcaccaccgcaacatcgccacctactacggagccttcatcaagaagagccccccgggaaacgatgaccagctctggctggtgatggagttctgtggtgctggttcagtgactgacctggtaaagaacacaaaaggcaacgccctgaaggaggactgtatcgcctatatctgcagggagatcctcaggggtctggcccatctccatgcccacaaggtgatccatcgagacatcaaggggcagaatgtgctgctgacagagaatgctgaggtcaagctagtggattttggggtgagtgctcagctggaccgcaccgtgggcagacggaacactttcattgggactccctactggatggctccagaggtcatcgcctgtgatgagaaccctgatgccacctatgattacaggagtgatatttggtctctaggaatcacagccatcgagatggcagagggagccccccctctgtgtgacatgcaccccatgcgagccctcttcctcattcctcggaaccctccgcccaggctcaagtccaagaagtggtctaagaagttcattgacttcattgacacatgtctcatcaagacttacctgagccgcccacccacggagcagctactgaagtttcccttcatccgggaccagcccacggagcggcaggtccgcatccagcttaaggaccacattgaccgatcccggaagaagcggggtgagaaagaggagacagaatatgagtacagcggcagcgaggaggaagatgacagccatggagaggaaggagagccaagctccatcatgaacgtgcctggagagtcgactctacgccgggagtttctccggctccagcaggaaaataagagcaactcagaggctttaaaacagcagcagcagctgcagcagcagcagcagcgagaccccgaggcacacatcaaacacctgctgcaccagcggcagcggcgcatagaggagcagaaggaggagcggcgccgcgtggaggagcaacagcggcgggagcgggagcagcggaagctgcaggagaaggagcagcagcggcggctggaggacatgcaggctctgcggcgggaggaggagcggcggcaggcggagcgcgagcaggaatacaagcggaagcagctggaggagcagcggcagtcagaacgtctccagaggcagctgcagcaggagcatgcctacctcaagtccctgcagcagcagcaacagcagcagcagcttcagaaacagcagcagcagcagctcctgcctggggacaggaagcccctgtaccattatggtcggggcatgaatcccgctgacaaaccagcctgggcccgagaggtagaagagagaacaaggatgaacaagcagcagaactctcccttggccaagagcaagccaggcagcacggggcctgagccccccatcccccaggcctccccagggcccccaggacccctttcccagactcctcctatgcagaggccggtggagccccaggagggaccgcacaagagcctggtggcacaccgggtcccactgaagccatatgcagcacctgtaccccgatcccagtccctgcaggaccagcccacccgaaacctggctgccttcccagcctcccatgaccccgaccctgccatccccgcacccactgccacgcccagtgcccgaggagctgtcatccgccagaattcagaccccacctctgaaggacctggccccagcccgaatcccccagcctgggtccgcccagataacgaggccccacccaaggtgcctcagaggacctcatctatcgccactgcccttaacaccagtggggccggagggtcccggccagcccaggcagtccgtgccagtaaccccgacctcaggaggagcgaccctggctgggaacgctcggacagcgtccttccagcctctcacgggcacctcccccaggctggctcactggagcggaaccgcgtgggagtctcctccaaaccggacagctcccctgtgctctcccctgggaataaagccaagcccgacgaccaccgctcacggccaggccggcccgcagactttgtgttgctgaaagagcggactctggacgaggcccctcggcctcccaagaaggccatggactactcgtcgtccagcgaggaggtggaaagcagtgaggacgacgaggaggaaggcgaaggcgggccagcagaggggagcagagatacccctgggggccgcagcgatggggatacagacagcgtcagcaccatggtggtccacgacgtcgaggagatcaccgggacccagcccccatacgggggcggcaccatggtggtccagcgcacccctgaagaggagcggaacctgctgcatgctgacagcaatgggtacacaaacctgcctgacgtggtccagcccagccactcacccaccgagaacagcaaaggccaaagcccaccctcgaaggatgggagtggtgactaccagtctcgtgggctggtaaaggcccctggcaagagctcgttcacgatgtttgtggatctagggatctaccagcctggaggcagtggggacagcatccccatcacagccctagtgggtggagagggcactcggctcgaccagctgcagtacgacgtgaggaagggttctgtggtcaacgtgaatcccaccaacacccgggcccacagtgagacccctgagatccggaagtacaagaagcgattcaactccgagatcctctgtgcagccctttggggggtcaacctgctggtgggcacggagaacgggctgatgttgctggaccgaagtgggcagggcaaggtgtatggactcattgggcggcgacgcttccagcagatggatgtgctggaggggctcaacctgctcatcaccatctcagggaaaaggaacaaactgcgggtgtattacctgtcctggctccggaacaagattctgcacaatgacccagaagtggagaagaagcagggctggaccaccgtgggggacatggagggctgcgggcactaccgtgttgtgaaatacgagcggattaagttcctggtcatcgccctcaagagctccgtggaggtgtatgcctgggcccccaaaccctaccacaaattcatggccttcaagtcctttgccgacctcccccaccgccctctgctggtcgacctgacagtagaggaggggcagcggctcaaggtcatctatggctccagtgctggcttccatgctgtggatgtcgactcggggaacagctatgacatctacatccctgtgcacatccagagccagatcacgccccatgccatcatcttcctccccaacaccgacggcatggagatgctgctgtgctacgaggacgagggtgtctacgtcaacacgtacgggcgcatcattaaggatgtggtgctgcagtggggggagatgcctacttctgtggcctacatctgctccaaccagataatgggctggggtgagaaagccattgagatccgctctgtggagacgggccacctcgacggggtcttcatgcacaaacgagctcagaggctcaagttcctgtgtgagcggaatgacaaggtgttttttgcctcagtccgctctgggggcagcagccaagtttacttcatgactctgaaccgtaactgcatcatgaactggtgacggggccctgggctggggctgtcccacactggacccagctctccccctgcagccaggcttcccgggccgcccctctttcccctccctgggcttttgcttttactggtttgatttcactggagcctgctgggaacgtgacctctgacccctgatgctttcgtgatcacgtgaccatcctcttccccaacatgtcctcttcccaaaactgtgcctgtccccagcttctggggagggacacagcttccccttcccaggaattgagtgggcctagcccctccccccttttctccatttgagaggagagtgcttggggcttgaaccccttaccccatccaggggcagggaccatttcttcattttctgaaagcactttaatgattccccttcccccaaactccagggaatggaggggggaccccgccagccaaaacattccccccattcccgacccccatctcctcttctagcccatgcccttccccggtggagggagggagcagggagccctcactctccacgccccttgcttgcatctgtatatagtgtgagcagcaagtaacccttctcctccctcccccctcacccctcctcaatgtagtggccttggatatcctgtttgttaataaagacaattcaaccagctcccacca

SEQ ID NO: 349542 - DNA, 4847 bp, Homo sapiens
gctggctccggggagatagcgcctgtcagtcggtgggtcggtcctcgcgccggccctccccctccccggtctccgggggaggcgcggtggagtccgcccccggggttctccgatgggggagaagcggcgacggcggcagtggagtaaccgagccggagcgtgagcggccccggtgccccgttccccacggaggccatgggcgacccagcccccgcccgcagcctggacgacatcgacctgtccgccctgcgggaccctgctgggatctttgagcttgtggaggtggtcggcaatggaacctacggacaggtgtacaagggtcggcatgtcaagacggggcagctggctgccatcaaggtcatggatgtcacggaggacgaggaggaagagatcaaacaggagatcaacatgctgaaaaagtactctcaccaccgcaacatcgccacctactacggagccttcatcaagaagagccccccgggaaacgatgaccagctctggctggtgatggagttctgtggtgctggttcagtgactgacctggtaaagaacacaaaaggcaacgccctgaaggaggactgtatcgcctatatctgcagggagatcctcaggggtctggcccatctccatgcccacaaggtgatccatcgagacatcaaggggcagaatgtgctgctgacagagaatgctgaggtcaagctagtggattttggggtgagtgctcagctggaccgcaccgtgggcagacggaacactttcattgggactccctactggatggctccagaggtcatcgcctgtgatgagaaccctgatgccacctatgattacaggagtgatatttggtctctaggaatcacagccatcgagatggcagagggagccccccctctgtgtgacatgcaccccatgcgagccctcttcctcattcctcggaaccctccgcccaggctcaagtccaagaagtggtctaagaagttcattgacttcattgacacatgtctcatcaagacttacctgagccgcccacccacggagcagctactgaagtttcccttcatccgggaccagcccacggagcggcaggtccgcatccagcttaaggaccacattgaccgatcccggaagaagcggggtgagaaagaggagacagaatatgagtacagcggcagcgaggaggaagatgacagccatggagaggaaggagagccaagctccatcatgaacgtgcctggagagtcgactctacgccgggagtttctccggctccagcaggaaaataagagcaactcagaggctttaaaacagcagcagcagctgcagcagcagcagcagcgagaccccgaggcacacatcaaacacctgctgcaccagcggcagcggcgcatagaggagcagaaggaggagcggcgccgcgtggaggagcaacagcggcgggagcgggagcagcggaagctgcaggagaaggagcagcagcggcggctggaggacatgcaggctctgcggcgggaggaggagcggcggcaggcggagcgcgagcaggaatacaagcggaagcagctggaggagcagcggcagtcagaacgtctccagaggcagctgcagcaggagcatgcctacctcaagtccctgcagcagcagcaacagcagcagcagcttcagaaacagcagcagcagcagctcctgcctggggacaggaagcccctgtaccattatggtcggggcatgaatcccgctgacaaaccagcctgggcccgagaggtagaagagagaacaaggatgaacaagcagcagaactctcccttggccaagagcaagccaggcagcacggggcctgagccccccatcccccaggcctccccagggcccccaggacccctttcccagactcctcctatgcagaggccggtggagccccaggagggaccgcacaagagcctggtggcacaccgggtcccactgaagccatatgcagcacctgtaccccgatcccagtccctgcaggaccagcccacccgaaacctggctgccttcccagcctcccatgaccccgaccctgccatccccgcacccactgccacgcccagtgcccgaggagctgtcatccgccagaattcagaccccacctctgaaggacctggccccagcccgaatcccccagcctgggtccgcccagataacgaggccccacccaaggtgcctcagaggacctcatctatcgccactgcccttaacaccagtggggccggagggtcccggccagcccaggcagtccgtgccagtaaccccgacctcaggaggagcgaccctggctgggaacgctcggacagcgtccttccagcctctcacgggcacctcccccaggctggctcactggagcggaaccgcgtgggagtctcctccaaaccggacagctcccctgtgctctcccctgggaataaagccaagcccgacgaccaccgctcacggccaggccggcccgcagactttgtgttgctgaaagagcggactctggacgaggcccctcggcctcccaagaaggccatggactactcgtcgtccagcgaggaggtggaaagcagtgaggacgacgaggaggaaggcgaaggcgggccagcagaggggagcagagatacccctgggggccgcagcgatggggatacagacagcgtcagcaccatggtggtccacgacgtcgaggagatcaccgggacccagcccccatacgggggcggcaccatggtggtccagcgcacccctgaagaggagcggaacctgctgcatgctgacagcaatgggtacacaaacctgcctgacgtggtccagcccagccactcacccaccgagaacagcaaaggccaaagcccaccctcgaaggatgggagtggtgactaccagtctcgtgggctggtaaaggcccctggcaagagctcgttcacgatgtttgtggatctagggatctaccagcctggaggcagtggggacagcatccccatcacagccctagtgggtggagagggcactcggctcgaccagctgcagtacgacgtgaggaagggttctgtggtcaacgtgaatcccaccaacacccgggcccacagtgagacccctgagatccggaagtacaagaagcgattcaactccgagatcctctgtgcagccctttggggggtcaacctgctggtgggcacggagaacgggctgatgttgctggaccgaagtgggcagggcaaggtgtatggactcattgggcggcgacgcttccagcagatggatgtgctggaggggctcaacctgctcatcaccatctcagggaaaaggaacaaactgcgggtgtattacctgtcctggctccggaacaagattctgcacaatgacccagaagtggagaagaagcagggctggaccaccgtgggggacatggagggctgcgggcactaccgtgttgtgaaatacgagcggattaagttcctggtcatcgccctcaagagctccgtggaggtgtatgcctgggcccccaaaccctaccacaaattcatggccttcaagtcctttgccgacctcccccaccgccctctgctggtcgacctgacagtagaggaggggcagcggctcaaggtcatctatggctccagtgctggcttccatgctgtggatgtcgactcggggaacagctatgacatctacatccctgtgcacatccagagccagatcacgccccatgccatcatcttcctccccaacaccgacggcatggagatgctgctgtgctacgaggacgagggtgtctacgtcaacacgtacgggcgcatcattaaggatgtggtgctgcagtggggggagatgcctacttctgtggcctacatctgctccaaccagataatgggctggggtgagaaagccattgagatccgctctgtggagacgggccacctcgacggggtcttcatgcacaaacgagctcagaggctcaagttcctgtgtgagcggaatgacaaggtgttttttgcctcagtccgctctgggggcagcagccaagtttacttcatgactctgaaccgtaactgcatcatgaactggtgacggggccctgggctggggctgtcccacactggacccagctctccccctgcagccaggcttcccgggccgcccctctttcccctccctgggcttttgcttttactggtttgatttcactggagcctgctgggaacgtgacctctgacccctgatgctttcgtgatcacgtgaccatcctcttccccaacatgtcctcttcccaaaactgtgcctgtccccagcttctggggagggacacagcttccccttcccaggaattgagtgggcctagcccctccccccttttctccatttgagaggagagtgcttggggcttgaaccccttaccccactgctgctgactgggcagggccctggacccctttatttgcacgtcaggggagccggctccccccttgaatgtaccagaccctggggggggtcactgggccctagatttttggggggtcaccagccactccaggggcagggaccatttcttcattttctgaaagcactttaatgattccccttcccccaaactccagggaatggaggggggaccccgccagccaaaacattccccccattcccgacccccatctcctcttctagcccatgcccttccccggtggagggagggagcatttatcactaaactctacattcctggttgttaacacttctgtttactagagcggagcattaaatgtataccctttctaatcttcctttccttaagtcctttattttaaattgttaaatatgctcggagattaaataac

SEQ ID NO: 349543 - DNA, 4666 bp, Homo sapiens
gctggctccggggagatagcgcctgtcagtcggtgggtcggtcctcgcgccggccctccccctccccggtctccgggggaggcgcggtggagtccgcccccggggttctccgatgggggagaagcggcgacggcggcagtggagtaaccgagccggagcgtgagcggccccggtgccccgttccccacggaggccatgggcgacccagcccccgcccgcagcctggacgacatcgacctgtccgccctgcgggaccctgctgggatctttgagcttgtggaggtggtcggcaatggaacctacggacaggtgtacaagggtcggcatgtcaagacggggcagctggctgccatcaaggtcatggatgtcacggaggacgaggaggaagagatcaaacaggagatcaacatgctgaaaaagtactctcaccaccgcaacatcgccacctactacggagccttcatcaagaagagccccccgggaaacgatgaccagctctggctggtgatggagttctgtggtgctggttcagtgactgacctggtaaagaacacaaaaggcaacgccctgaaggaggactgtatcgcctatatctgcagggagatcctcaggggtctggcccatctccatgcccacaaggtgatccatcgagacatcaaggggcagaatgtgctgctgacagagaatgctgaggtcaagctagtggattttggggtgagtgctcagctggaccgcaccgtgggcagacggaacactttcattgggactccctactggatggctccagaggtcatcgcctgtgatgagaaccctgatgccacctatgattacaggagtgatatttggtctctaggaatcacagccatcgagatggcagagggagccccccctctgtgtgacatgcaccccatgcgagccctcttcctcattcctcggaaccctccgcccaggctcaagtccaagaagtggtctaagaagttcattgacttcattgacacatgtctcatcaagacttacctgagccgcccacccacggagcagctactgaagtttcccttcatccgggaccagcccacggagcggcaggtccgcatccagcttaaggaccacattgaccgatcccggaagaagcggggtgagaaagaggagacagaatatgagtacagcggcagcgaggaggaagatgacagccatggagaggaaggagagccaagctccatcatgaacgtgcctggagagtcgactctacgccgggagtttctccggctccagcaggaaaataagagcaactcagaggctttaaaacagcagcagcagctgcagcagcagcagcagcgagaccccgaggcacacatcaaacacctgctgcaccagcggcagcggcgcatagaggagcagaaggaggagcggcgccgcgtggaggagcaacagcggcgggagcgggagcagcggaagctgcaggagaaggagcagcagcggcggctggaggacatgcaggctctgcggcgggaggaggagcggcggcaggcggagcgcgagcaggaatacaagcggaagcagctggaggagcagcggcagtcagaacgtctccagaggcagctgcagcaggagcatgcctacctcaagtccctgcagcagcagcaacagcagcagcagcttcagaaacagcagcagcagcagctcctgcctggggacaggaagcccctgtaccattatggtcggggcatgaatcccgctgacaaaccagcctgggcccgagaggtagaagagagaacaaggatgaacaagcagcagaactctcccttggccaagagcaagccaggcagcacggggcctgagccccccatcccccaggcctccccagggcccccaggacccctttcccagactcctcctatgcagaggccggtggagccccaggagggaccgcacaagagcctggtggcacaccgggtcccactgaagccatatgcagcacctgtaccccgatcccagtccctgcaggaccagcccacccgaaacctggctgccttcccagcctcccatgaccccgaccctgccatccccgcacccactgccacgcccagtgcccgaggagctgtcatccgccagaattcagaccccacctctgaaggacctggccccagcccgaatcccccagcctgggtccgcccagataacgaggccccacccaaggtgcctcagaggacctcatctatcgccactgcccttaacaccagtggggccggagggtcccggccagcccaggcagtccgtgccagtaaccccgacctcaggaggagcgaccctggctgggaacgctcggacagcgtccttccagcctctcacgggcacctcccccaggctggctcactggagcggaaccgcgtgggagtctcctccaaaccggacagctcccctgtgctctcccctgggaataaagccaagcccgacgaccaccgctcacggccaggccggcccgcagactttgtgttgctgaaagagcggactctggacgaggcccctcggcctcccaagaaggccatggactactcgtcgtccagcgaggaggtggaaagcagtgaggacgacgaggaggaaggcgaaggcgggccagcagaggggagcagagatacccctgggggccgcagcgatggggatacagacagcgtcagcaccatggtggtccacgacgtcgaggagatcaccgggacccagcccccatacgggggcggcaccatggtggtccagcgcacccctgaagaggagcggaacctgctgcatgctgacagcaatgggtacacaaacctgcctgacgtggtccagcccagccactcacccaccgagaacagcaaaggccaaagcccaccctcgaaggatgggagtggtgactaccagtctcgtgggctggtaaaggcccctggcaagagctcgttcacgatgtttgtggatctagggatctaccagcctggaggcagtggggacagcatccccatcacagccctagtgggtggagagggcactcggctcgaccagctgcagtacgacgtgaggaagggttctgtggtcaacgtgaatcccaccaacacccgggcccacagtgagacccctgagatccggaagtacaagaagcgattcaactccgagatcctctgtgcagccctttggggggtcaacctgctggtgggcacggagaacgggctgatgttgctggaccgaagtgggcagggcaaggtgtatggactcattgggcggcgacgcttccagcagatggatgtgctggaggggctcaacctgctcatcaccatctcagggaaaaggaacaaactgcgggtgtattacctgtcctggctccggaacaagattctgcacaatgacccagaagtggagaagaagcagggctggaccaccgtgggggacatggagggctgcgggcactaccgtgttgtgaaatacgagcggattaagttcctggtcatcgccctcaagagctccgtggaggtgtatgcctgggcccccaaaccctaccacaaattcatggccttcaagtcctttgccgacctcccccaccgccctctgctggtcgacctgacagtagaggaggggcagcggctcaaggtcatctatggctccagtgctggcttccatgctgtggatgtcgactcggggaacagctatgacatctacatccctgtgcacatccagagccagatcacgccccatgccatcatcttcctccccaacaccgacggcatggagatgctgctgtgctacgaggacgagggtgtctacgtcaacacgtacgggcgcatcattaaggatgtggtgctgcagtggggggagatgcctacttctgtggcctacatctgctccaaccagataatgggctggggtgagaaagccattgagatccgctctgtggagacgggccacctcgacggggtcttcatgcacaaacgagctcagaggctcaagttcctgtgtgagcggaatgacaaggtgttttttgcctcagtccgctctgggggcagcagccaagtttacttcatgactctgaaccgtaactgcatcatgaactggtgacggggccctgggctggggctgtcccacactggacccagctctccccctgcagccaggcttcccgggccgcccctctttcccctccctgggcttttgcttttactggtttgatttcactggagcctgctgggaacgtgacctctgacccctgatgctttcgtgatcacgtgaccatcctcttccccaacatgtcctcttcccaaaactgtgcctgtccccagcttctggggagggacacagcttccccttcccaggaattgagtgggcctagcccctccccccttttctccatttgagaggagagtgcttggggcttgaaccccttaccccactgctgctgactgggcagggccctggacccctttatttgcacgtcaggggagccggctccccccttgaatgtaccagaccctggggggggtcactgggccctagatttttggggggtcaccagccactccaggggcagggaccatttcttcattttctgaaagcactttaatgattccccttcccccctcctcaatgtagtggccttggatatcctgtttgttaataaagacaattcaaccagctcccacca

SEQ ID NO: 349544 - DNA, 4180 bp, Homo sapiens
gctggctccggggagatagcgcctgtcagtcggtgggtcggtcctcgcgccggccctccccctccccggtctccgggggaggcgcggtggagtccgcccccggggttctccgatgggggagaagcggcgacggcggcagtggagtaaccgagccggagcgtgagcggccccggtgccccgttccccacggaggccatgggcgacccagcccccgcccgcagcctggacgacatcgacctgtccgccctgcgggaccctgctgggatctttgagcttgtggaggtggtcggcaatggaacctacggacaggtgtacaagggtcggcatgtcaagacggggcagctggctgccatcaaggtcatggatgtcacggaggacgaggaggaagagatcaaacaggagatcaacatgctgaaaaagtactctcaccaccgcaacatcgccacctactacggagccttcatcaagaagagccccccgggaaacgatgaccagctctggctggtgatggagttctgtggtgctggttcagtgactgacctggtaaagaacacaaaaggcaacgccctgaaggaggactgtatcgcctatatctgcagggagatcctcaggggtctggcccatctccatgcccacaaggtgatccatcgagacatcaaggggcagaatgtgctgctgacagagaatgctgaggtcaagctagtggattttggggtgagtgctcagctggaccgcaccgtgggcagacggaacactttcattgggactccctactggatggctccagaggtcatcgcctgtgatgagaaccctgatgccacctatgattacaggagtgatatttggtctctaggaatcacagccatcgagatggcagagggagccccccctctgtgtgacatgcaccccatgcgagccctcttcctcattcctcggaaccctccgcccaggctcaagtccaagaagtggtctaagaagttcattgacttcattgacacatgtctcatcaagacttacctgagccgcccacccacggagcagctactgaagtttcccttcatccgggaccagcccacggagcggcaggtccgcatccagcttaaggaccacattgaccgatcccggaagaagcggggtgagaaagaggagacagaatatgagtacagcggcagcgaggaggaagatgacagccatggagaggaaggagagccaagctccatcatgaacgtgcctggagagtcgactctacgccgggagtttctccggctccagcaggaaaataagagcaactcagaggctttaaaacagcagcagcagctgcagcagcagcagcagcgagaccccgaggcacacatcaaacacctgctgcaccagcggcagcggcgcatagaggagcagaaggaggagcggcgccgcgtggaggagcaacagcggcgggagcgggagcagcggaagctgcaggagaaggagcagcagcggcggctggaggacatgcaggctctgcggcgggaggaggagcggcggcaggcggagcgcgagcaggaatacaagcggaagcagctggaggagcagcggcagtcagaacgtctccagaggcagctgcagcaggagcatgcctacctcaagtccctgcagcagcagcaacagcagcagcagcttcagaaacagcagcagcagcagctcctgcctggggacaggaagcccctgtaccattatggtcggggcatgaatcccgctgacaaaccagcctgggcccgagaggtagaagagagaacaaggatgaacaagcagcagaactctcccttggccaagagcaagccaggcagcacggggcctgagccccccatcccccaggcctccccagggcccccaggacccctttcccagactcctcctatgcagaggccggtggagccccaggagggaccgcacaagagcctggtggcacaccgggtcccactgaagccatatgcagcacctgtaccccgatcccagtccctgcaggaccagcccacccgaaacctggctgccttcccagcctcccatgaccccgaccctgccatccccgcacccactgccacgcccagtgcccgaggagctgtcatccgccagaattcagaccccacctctgaaggacctggccccagcccgaatcccccagcctgggtccgcccagataacgaggccccacccaaggtgcctcagaggacctcatctatcgccactgcccttaacaccagtggggccggagggtcccggccagcccaggcagtccgtgccagtaaccccgacctcaggaggagcgaccctggctgggaacgctcggacagcgtccttccagcctctcacgggcacctcccccaggctggctcactggagcggaaccgcgtgggagtctcctccaaaccggacagctcccctgtgctctcccctgggaataaagccaagcccgacgaccaccgctcacggccaggccggcccgcagactttgtgttgctgaaagagcggactctggacgaggcccctcggcctcccaagaaggccatggactactcgtcgtccagcgaggaggtggaaagcagtgaggacgacgaggaggaaggcgaaggcgggccagcagaggggagcagagatacccctgggggccgcagcgatggggatacagacagcgtcagcaccatggtggtccacgacgtcgaggagatcaccgggacccagcccccatacgggggcggcaccatggtggtccagcgcacccctgaagaggagcggaacctgctgcatgctgacagcaatgggtacacaaacctgcctgacgtggtccagcccagccactcacccaccgagaacagcaaaggccaaagcccaccctcgaaggatgggagtggtgactaccagtctcgtgggctggtaaaggcccctggcaagagctcgttcacgatgtttgtggatctagggatctaccagcctggaggcagtggggacagcatccccatcacagccctagtgggtggagagggcactcggctcgaccagctgcagtacgacgtgaggaagggttctgtggtcaacgtgaatcccaccaacacccgggcccacagtgagacccctgagatccggaagtacaagaagcgattcaactccgagatcctctgtgcagccctttggggggtcaacctgctggtgggcacggagaacgggctgatgttgctggaccgaagtgggcagggcaaggtgtatggactcattgggcggcgacgcttccagcagatggatgtgctggaggggctcaacctgctcatcaccatctcagggaaaaggaacaaactgcgggtgtattacctgtcctggctccggaacaagattctgcacaatgacccagaagtggagaagaagcagggctggaccaccgtgggggacatggagggctgcgggcactaccgtgttgtgaaatacgagcggattaagttcctggtcatcgccctcaagagctccgtggaggtgtatgcctgggcccccaaaccctaccacaaattcatggccttcaagtcctttgccgacctcccccaccgccctctgctggtcgacctgacagtagaggaggggcagcggctcaaggtcatctatggctccagtgctggcttccatgctgtggatgtcgactcggggaacagctatgacatctacatccctgtgcacatccagagccagatcacgccccatgccatcatcttcctccccaacaccgacggcatggagatgctgctgtgctacgaggacgagggtgtctacgtcaacacgtacgggcgcatcattaaggatgtggtgctgcagtggggggagatgcctacttctgtggcctacatctgctccaaccagataatgggctggggtgagaaagccattgagatccgctctgtggagacgggccacctcgacggggtcttcatgcacaaacgagctcagaggctcaagttcctgtgtgagcggaatgacaaggtgttttttgcctcagtccgctctgggggcagcagccaagtttacttcatgactctgaaccgtaactgcatcatgaactggtgacggggccctgggctggggctgtcccacactggacccagctctccctggagcaggttctgggaccctctgcggtacgagtcgatcgagaggggtacca

SEQ ID NO: 349545 - DNA, 4800 bp, Homo sapiens
gctggctccggggagatagcgcctgtcagtcggtgggtcggtcctcgcgccggccctccccctccccggtctccgggggaggcgcggtggagtccgcccccggggttctccgatgggggagaagcggcgacggcggcagtggagtaaccgagccggagcgtgagcggccccggtgccccgttccccacggaggccatgggcgacccagcccccgcccgcagcctggacgacatcgacctgtccgccctgcgggaccctgctgggatctttgagcttgtggaggtggtcggcaatggaacctacggacaggtgtacaagggtcggcatgtcaagacggggcagctggctgccatcaaggtcatggatgtcacggaggacgaggaggaagagatcaaacaggagatcaacatgctgaaaaagtactctcaccaccgcaacatcgccacctactacggagccttcatcaagaagagccccccgggaaacgatgaccagctctggctggtgatggagttctgtggtgctggttcagtgactgacctggtaaagaacacaaaaggcaacgccctgaaggaggactgtatcgcctatatctgcagggagatcctcaggggtctggcccatctccatgcccacaaggtgatccatcgagacatcaaggggcagaatgtgctgctgacagagaatgctgaggtcaagctagtggattttggggtgagtgctcagctggaccgcaccgtgggcagacggaacactttcattgggactccctactggatggctccagaggtcatcgcctgtgatgagaaccctgatgccacctatgattacaggagtgatatttggtctctaggaatcacagccatcgagatggcagagggagccccccctctgtgtgacatgcaccccatgcgagccctcttcctcattcctcggaaccctccgcccaggctcaagtccaagaagtggtctaagaagttcattgacttcattgacacatgtctcatcaagacttacctgagccgcccacccacggagcagctactgaagtttcccttcatccgggaccagcccacggagcggcaggtccgcatccagcttaaggaccacattgaccgatcccggaagaagcggggtgagaaagaggagacagaatatgagtacagcggcagcgaggaggaagatgacagccatggagaggaaggagagccaagctccatcatgaacgtgcctggagagtcgactctacgccgggagtttctccggctccagcaggaaaataagagcaactcagaggctttaaaacagcagcagcagctgcagcagcagcagcagcgagaccccgaggcacacatcaaacacctgctgcaccagcggcagcggcgcatagaggagcagaaggaggagcggcgccgcgtggaggagcaacagcggcgggagcgggagcagcggaagctgcaggagaaggagcagcagcggcggctggaggacatgcaggctctgcggcgggaggaggagcggcggcaggcggagcgcgagcaggaatacaagcggaagcagctggaggagcagcggcagtcagaacgtctccagaggcagctgcagcaggagcatgcctacctcaagtccctgcagcagcagcaacagcagcagcagcttcagaaacagcagcagcagcagctcctgcctggggacaggaagcccctgtaccattatggtcggggcatgaatcccgctgacaaaccagcctgggcccgagaggtagaagagagaacaaggatgaacaagcagcagaactctcccttggccaagagcaagccaggcagcacggggcctgagccccccatcccccaggcctccccagggcccccaggacccctttcccagactcctcctatgcagaggccggtggagccccaggagggaccgcacaagtccctgcaggaccagcccacccgaaacctggctgccttcccagcctcccatgaccccgaccctgccatccccgcacccactgccacgcccagtgcccgaggagctgtcatccgccagaattcagaccccacctctgaaggacctggccccagcccgaatcccccagcctgggtccgcccagataacgaggccccacccaaggtgcctcagaggacctcatctatcgccactgcccttaacaccagtggggccggagggtcccggccagcccaggcagtccgtgccagtaaccccgacctcaggaggagcgaccctggctgggaacgctcggacagcgtccttccagcctctcacgggcacctcccccaggctggctcactggagcggaaccgcgtgggagtctcctccaaaccggacagctcccctgtgctctcccctgggaataaagccaagcccgacgaccaccgctcacggccaggccggcccgcagactttgtgttgctgaaagagcggactctggacgaggcccctcggcctcccaagaaggccatggactactcgtcgtccagcgaggaggtggaaagcagtgaggacgacgaggaggaaggcgaaggcgggccagcagaggggagcagagatacccctgggggccgcagcgatggggatacagacagcgtcagcaccatggtggtccacgacgtcgaggagatcaccgggacccagcccccatacgggggcggcaccatggtggtccagcgcacccctgaagaggagcggaacctgctgcatgctgacagcaatgggtacacaaacctgcctgacgtggtccagcccagccactcacccaccgagaacagcaaaggccaaagcccaccctcgaaggatgggagtggtgactaccagtctcgtgggctggtaaaggcccctggcaagagctcgttcacgatgtttgtggatctagggatctaccagcctggaggcagtggggacagcatccccatcacagccctagtgggtggagagggcactcggctcgaccagctgcagtacgacgtgaggaagggttctgtggtcaacgtgaatcccaccaacacccgggcccacagtgagacccctgagatccggaagtacaagaagcgattcaactccgagatcctctgtgcagccctttggggggtcaacctgctggtgggcacggagaacgggctgatgttgctggaccgaagtgggcagggcaaggtgtatggactcattgggcggcgacgcttccagcagatggatgtgctggaggggctcaacctgctcatcaccatctcagggaaaaggaacaaactgcgggtgtattacctgtcctggctccggaacaagattctgcacaatgacccagaagtggagaagaagcagggctggaccaccgtgggggacatggagggctgcgggcactaccgtgttgtgaaatacgagcggattaagttcctggtcatcgccctcaagagctccgtggaggtgtatgcctgggcccccaaaccctaccacaaattcatggccttcaagtcctttgccgacctcccccaccgccctctgctggtcgacctgacagtagaggaggggcagcggctcaaggtcatctatggctccagtgctggcttccatgctgtggatgtcgactcggggaacagctatgacatctacatccctgtgcacatccagagccagatcacgccccatgccatcatcttcctccccaacaccgacggcatggagatgctgctgtgctacgaggacgagggtgtctacgtcaacacgtacgggcgcatcattaaggatgtggtgctgcagtggggggagatgcctacttctgtggcctacatctgctccaaccagataatgggctggggtgagaaagccattgagatccgctctgtggagacgggccacctcgacggggtcttcatgcacaaacgagctcagaggctcaagttcctgtgtgagcggaatgacaaggtgttttttgcctcagtccgctctgggggcagcagccaagtttacttcatgactctgaaccgtaactgcatcatgaactggtgacggggccctgggctggggctgtcccacactggacccagctctccccctgcagccaggcttcccgggccgcccctctttcccctccctgggcttttgcttttactggtttgatttcactggagcctgctgggaacgtgacctctgacccctgatgctttcgtgatcacgtgaccatcctcttccccaacatgtcctcttcccaaaactgtgcctgtccccagcttctggggagggacacagcttccccttcccaggaattgagtgggcctagcccctccccccttttctccatttgagaggagagtgcttggggcttgaaccccttaccccactgctgctgactgggcagggccctggacccctttatttgcacgtcaggggagccggctccccccttgaatgtaccagaccctggggggggtcactgggccctagatttttggggggtcaccagccactccaggggcagggaccatttcttcattttctgaaagcactttaatgattccccttcccccaaactccagggaatggaggggggaccccgccagccaaaacattccccccattcccgacccccatctcctcttctagcccatgcccttccccggtggagggagggagcagggagccctcactctccacgccccttgcttgcatctgtatatagtgtgagcagcaagtaacccttctcctccctcccccctcacccctcctcaatgtagtggccttggatatcctgtttgttaataaagacaattcaaccagctcccacca

SEQ ID NO: 349546 - DNA, 2902 bp, Homo sapiens
atctgcaaaggcgggcagagcggggcaccccaaagcctccagggccccctgctcagccccctggcccgcccaacgcctctagtaaccccgacctcaggaggagcgaccctggctgggaacgctcggacagcgtccttccagcctctcacgggcacctcccccaggctggctcactggagcggaaccgcgtgggagtctcctccaaaccggacagctcccctgtgctctcccctgggaataaagccaagcccgacgaccaccgctcacggccaggccggcccgcagtgagtcacctggtggcaggcatggcctgcctcatcctggtttggggcttagcctcagggtgctgggtgtcaggggtggggtctccgctgatctaccgagaagggctgtggggatggagggactggtgcttctcatggtgctaacctttcctaacctctctcctaacctctctcctaacctctcttctggctctttcttcccctgcggcccctcccagagctataagcgagcaattggtgaggactttgtgttgctgaaagagcggactctggacgaggcccctcggcctcccaagaaggccatggactactcgtcgtccagcgaggaggtggaaagcagtgaggacgacgaggaggaaggcgaaggcgggccagcagaggggagcagagatacccctgggggccgcagcgatggggatacagacagcgtcagcaccatggtggtccacgacgtcgaggagatcaccgggacccagcccccatacgggggcggcaccatggtggtccagcgcacccctgaagaggagcggaacctgctgcatgctgacagcaatgggtacacaaacctgcctgacgtggtccagcccagccactcacccaccgagaacagcaaaggccaaagcccaccctcgaaggatgggagtggtgactaccagtctcgtgggctggtaaaggcccctggcaagagctcgttcacgatgtttgtggatctagggatctaccagcctggaggcagtggggacagcatccccatcacagccctagtgggtggagagggcactcggctcgaccagctgcagtacgacgtgaggaagggttctgtggtcaacgtgaatcccaccaacacccgggcccacagtgagacccctgagatccggaagtacaagaagcgattcaactccgagatcctctgtgcagccctttggggggtcaacctgctggtgggcacggagaacgggctgatgttgctggaccgaagtgggcagggcaaggtgtatggactcattgggcggcgacgcttccagcagatggatgtgctggaggggctcaacctgctcatcaccatctcagggaaaaggaacaaactgcgggtgtattacctgtcctggctccggaacaagattctgcacaatgacccagaagtggagaagaagcagggctggaccaccgtgggggacatggagggctgcgggcactaccgtgttgtgaaatacgagcggattaagttcctggtcatcgccctcaagagctccgtggaggtgtatgcctgggcccccaaaccctaccacaaattcatggccttcaagtcctttgccgacctcccccaccgccctctgctggtcgacctgacagtagaggaggggcagcggctcaaggtcatctatggctccagtgctggcttccatgctgtggatgtcgactcggggaacagctatgacatctacatccctgtgcacatccagagccagatcacgccccatgccatcatcttcctccccaacaccgacggcatggagatgctgctgtgctacgaggacgagggtgtctacgtcaacacgtacgggcgcatcattaaggatgtggtgctgcagtggggggagatgcctacttctgtggcctacatctgctccaaccagataatgggctggggtgagaaagccattgagatccgctctgtggagacgggccacctcgacggggtcttcatgcacaaacgagctcagaggctcaagttcctgtgtgagcggaatgacaaggtgttttttgcctcagtccgctctgggggcagcagccaagtttacttcatgactctgaaccgtaactgcatcatgaactggtgacggggccctgggctggggctgtcccacactggacccagctctccccctgcagccaggcttcccgggccgcccctctttcccctccctgggcttttgcttttactggtttgatttcactggagcctgctgggaacgtgacctctgacccctgatgctttcgtgatcacgtgaccatcctcttccccaacatgtcctcttcccaaaactgtgcctgtccccagcttctggggagggacacagcttccccttcccaggaattgagtgggcctagcccctccccccttttctccatttgagaggagagtgcttggggcttgaaccccttaccccactgctgctgactgggcagggccctggacccctttatttgcacgtcaggggagccggctccccccttgaatgtaccagaccctggggggggtcactgggccctagatttttggggggtcaccagccactccaggggcagggaccatttcttcattttctgaaagcactttaatgattccccttcccccaaactccagggaatggaggggggaccccgccagccaaaacattccccccattcccgacccccatctcctcttctagcccatgcccttccccggtggagggagggagcagggagccctcactctccacgccccttgcttgcatctgtatatagtgtgagcagcaagtaacccttctcctccctcccccctcacccctcctcaatgtagtggccttggatatcctgtttgttaataaagacaattcaaccagctcccacca

SEQ ID NO: 349547 - DNA, 5248 bp, Homo sapiens
gctggctccggggagatagcgcctgtcagtcggtgggtcggtcctcgcgccggccctccccctccccggtctccgggggaggcgcggtggagtccgcccccggggttctccgatgggggagaagcggcgacggcggcagtggagtaaccgagccggagcgtgagcggccccggtgccccgttccccacggaggccatgggcgacccagcccccgcccgcagcctggacgacatcgacctgtccgccctgcgggaccctgctgggatctttgagcttgtggaggtggtcggcaatggaacctacggacaggtgtacaagggtcggcatgtcaagacggggcagctggctgccatcaaggtcatggatgtcacggaggacgaggaggaagagatcaaacaggagatcaacatgctgaaaaagtactctcaccaccgcaacatcgccacctactacggagccttcatcaagaagagccccccgggaaacgatgaccagctctggctggtgatggagttctgtggtgctggttcagtgactgacctggtaaagaacacaaaaggcaacgccctgaaggaggactgtatcgcctatatctgcagggagatcctcaggggtctggcccatctccatgcccacaaggtgatccatcgagacatcaaggggcagaatgtgctgctgacagagaatgctgaggtcaagctagtggattttggggtgagtgctcagctggaccgcaccgtgggcagacggaacactttcattgggactccctactggatggctccagaggtcatcgcctgtgatgagaaccctgatgccacctatgattacaggagtgatatttggtctctaggaatcacagccatcgagatggcagagggagccccccctctgtgtgacatgcaccccatgcgagccctcttcctcattcctcggaaccctccgcccaggctcaagtccaagaagtggtctaagaagttcattgacttcattgacacatgtctcatcaagacttacctgagccgcccacccacggagcagctactgaagtttcccttcatccgggaccagcccacggagcggcaggtccgcatccagcttaaggaccacattgaccgatcccggaagaagcggggtgagaaagaggagacagaatatgagtacagcggcagcgaggaggaagatgacagccatggagaggaaggagagccaagctccatcatgaacgtgcctggagagtcgactctacgccgggagtttctccggctccagcaggaaaataagagcaactcagaggctttaaaacagcagcagcagctgcagcagcagcagcagcgagaccccgaggcacacatcaaacacctgctgcaccagcggcagcggcgcatagaggagcagaaggaggagcggcgccgcgtggaggagcaacagcggcgggagcgggagcagcggaagctgcaggagaaggagcagcagcggcggctggaggacatgcaggctctgcggcgggaggaggagcggcggcaggcggagcgcgagcaggaatacaagcggaagcagctggaggagcagcggcagtcagaacgtctccagaggcagctgcagcaggagcatgcctacctcaagtccctgcagcagcagcaacagcagcagcagcttcagaaacagcagcagcagcagctcctgcctggggacaggaagcccctgtaccattatggtcggggcatgaatcccgctgacaaaccagcctgggcccgagaggtagaagagagaacaaggatgaacaagcagcagaactctcccttggccaagagcaagccaggcagcacggggcctgagccccccatcccccaggcctccccagggcccccaggacccctttcccagactcctcctatgcagaggccggtggagccccaggagggaccgcacaagagcctggtggcacaccgggtcccactgaagccatatgcagcacctgtaccccgatcccagtccctgcaggaccagcccacccgaaacctggctgccttcccagcctcccatgaccccgaccctgccatccccgcacccactgccacgcccagtgcccgaggagctgtcatccgccagaattcagaccccacctctgaaggacctggccccagcccgaatcccccagcctgggtccgcccagataacgaggccccacccaaggtgcctcagaggacctcatctatcgccactgcccttaacaccagtggggccggagggtcccggccagcccaggcagtccgtgccagtaaccccgacctcaggaggagcgaccctggctgggaacgctcggacagcgtccttccagcctctcacgggcacctcccccaggctggctcactggagcggaaccgcgtgggagtctcctccaaaccggacagctcccctgtgctctcccctgggaataaagccaagcccgacgaccaccgctcacggccaggccggcccgcagactttgtgttgctgaaagagcggactctggacgaggcccctcggcctcccaagaaggccatggactactcgtcgtccagcgaggaggtggaaagcagtgaggacgacgaggaggaaggcgaaggcgggccagcagaggggagcagagatacccctgggggccgcagcgatggggatacagacagcgtcagcaccatggtggtccacgacgtcgaggagatcaccgggacccagcccccatacgggggcggcaccatggtggtccagcgcacccctgaagaggagcggaacctgctgcatgctgacagcaatgggtacacaaacctgcctgacgtggtccagcccagccactcacccaccgagaacagcaaaggccaaagcccaccctcgaaggatgggagtggtgactaccagtctcgtgggctggtaaaggcccctggcaagagctcgttcacgatgtttgtggatctagggatctaccagcctggaggcagtggggacagcatccccatcacagccctagtgggtggagagggcactcggctcgaccagctgcagtacgacgtgaggaagggttctgtggtcaacgtgaatcccaccaacacccgggcccacagtgagacccctgagatccggaagtacaagaagcgattcaactccgagatcctctgtgcagccctttggggggtcaacctgctggtgggcacggagaacgggctgatgttgctggaccgaagtgggcagggcaaggtgtatggactcattgggcggcgacgcttccagcagatggatgtgctggaggggctcaacctgctcatcaccatctcagggaaaaggaacaaactgcgggtgtattacctgtcctggctccggaacaagattctgcacaatgacccagaagtggagaagaagcagggctggaccaccgtgggggacatggagggctgcgggcactaccgtgttgtgaaatacgagcggattaagttcctggtcatcgccctcaagagctccgtggaggtgtatgcctgggcccccaaaccctaccacaaattcatggccttcaagtcctttgccgacctcccccaccgccctctgctggtcgacctgacagtagaggaggggcagcggctcaaggtcatctatggctccagtgctggcttccatgctgtggatgtcgactcggggaacagctatgacatctacatccctgtgcacatccagagccagatcacgccccatgccatcatcttcctccccaacaccgacggcatggagatgctgctgtgctacgaggacgagggtgtctacgtcaacacgtacgggcgcatcattaaggatgtggtgctgcagtggggggagatgcctacttctgtggcctacatctgctccaaccagataatgggctggggtgagaaagccattgagatccgctctgtggagacgggccacctcgacggggtcttcatgcacaaacgagctcagaggctcaagttcctgtgtgagcggaatgacaaggtgggaggctccttccctctgaaagccctgctgtcccggctgccatgaccctaggcccctgggcagagttctggggagaggatggtggtggtggcttcctgaaagcgggcccctctgggagctcggagggcagtcagccactaccactgccctgcgctcccttcagattccgaggacttcccagctggcccccagggggcgagtggtgcaccctctcccctaacatcccagcctgcctttcctccgggtgaggggcactgtgagtctcctcctgcagtctctgtgtctccctcaactcttctgccaccccttcttcccttctttccctctcccagttgagacacccccccaacctcagcccttggtgacttcttctcctgccccaccagtgttttttgcctcagtccgctctgggggcagcagccaagtttacttcatgactctgaaccgtaactgcatcatgaactggtgacggggccctgggctggggctgtcccacactggacccagctctccccctgcagccaggcttcccgggccgcccctctttcccctccctgggcttttgcttttactggtttgatttcactggagcctgctgggaacgtgacctctgacccctgatgctttcgtgatcacgtgaccatcctcttccccaacatgtcctcttcccaaaactgtgcctgtccccagcttctggggagggacacagcttccccttcccaggaattgagtgggcctagcccctccccccttttctccatttgagaggagagtgcttggggcttgaaccccttaccccactgctgctgactgggcagggccctggacccctttatttgcacgtcaggggagccggctccccccttgaatgtaccagaccctggggggggtcactgggccctagatttttggggggtcaccagccactccaggggcagggaccatttcttcattttctgaaagcactttaatgattccccttcccccaaactccagggaatggaggggggaccccgccagccaaaacattccccccattcccgacccccatctcctcttctagcccatgcccttccccggtggagggagggagcagggagccctcactctccacgccccttgcttgcatctgtatatagtgtgagcagcaagtaacccttctcctccctcccccctcacccctcctcaatgtagtggccttggatatcctgtttgttaataaagacaattcaaccagctcccacca

SEQ ID NO: 349548 - DNA, 4576 bp, Homo sapiens
gctggctccggggagatagcgcctgtcagtcggtgggtcggtcctcgcgccggccctccccctccccggtctccgggggaggcgcggtggagtccgcccccggggttctccgatgggggagaagcggcgacggcggcagtggagtaaccgagccggagcgtgagcggccccggtgccccgttccccacggaggccatgggcgacccagcccccgcccgcagcctggacgacatcgacctgtccgccctgcgggaccctgctgggatctttgagcttgtggaggtggtcggcaatggaacctacggacaggtgtacaagggtcggcatgtcaagacggggcagctggctgccatcaaggtcatggatgtcacggaggacgaggaggaagagatcaaacaggagatcaacatgctgaaaaagtactctcaccaccgcaacatcgccacctactacggagccttcatcaagaagagccccccgggaaacgatgaccagctctggctggtgatggagttctgtggtgctggttcagtgactgacctggtaaagaacacaaaaggcaacgccctgaaggaggactgtatcgcctatatctgcagggagatcctcaggggtctggcccatctccatgcccacaaggtgatccatcgagacatcaaggggcagaatgtgctgctgacagagaatgctgaggtcaagctagtggattttggggtgagtgctcagctggaccgcaccgtgggcagacggaacactttcattgggactccctactggatggctccagaggtcatcgcctgtgatgagaaccctgatgccacctatgattacaggagtgatatttggtctctaggaatcacagccatcgagatggcagagggagccccccctctgtgtgacatgcaccccatgcgagccctcttcctcattcctcggaaccctccgcccaggctcaagtccaagaagtggtctaagaagttcattgacttcattgacacatgtctcatcaagacttacctgagccgcccacccacggagcagctactgaagtttcccttcatccgggaccagcccacggagcggcaggtccgcatccagcttaaggaccacattgaccgatcccggaagaagcggggtgagaaagaggagacagaatatgagtacagcggcagcgaggaggaagatgacagccatggagaggaaggagagccaagctccatcatgaacgtgcctggagagtcgactctacgccgggagtttctccggctccagcaggaaaataagagcaactcagaggctttaaaacagcagcagcagctgcagcagcagcagcagcgagaccccgaggcacacatcaaacacctgctgcaccagcggcagcggcgcatagaggagcagaaggaggagcggcgccgcgtggaggagcaacagcggcgggagcgggagcagcggaagctgcaggagaaggagcagcagcggcggctggaggacatgcaggctctgcggcgggaggaggagcggcggcaggcggagcgcgagcaggaatacaagcggaagcagctggaggagcagcggcagtcagaacgtctccagaggcagctgcagcaggagcatgcctacctcaagtccctgcagcagcagcaacagcagcagcagcttcagaaacagcagcagcagcagctcctgcctggggacaggaagcccctgtaccattatggtcggggcatgaatcccgctgacaaaccagcctgggcccgagaggtagaagagagaacaaggatgaacaagcagcagaactctcccttggccaagagcaagccaggcagcacggggcctgagccccccatcccccaggcctccccagggcccccaggacccctttcccagactcctcctatgcagaggccggtggagccccaggagggaccgcacaagagcctggtggcacaccgggtcccactgaagccatatgcagcacctgtaccccgatcccagtccctgcaggaccagcccacccgaaacctggctgccttcccagcctcccatgaccccgaccctgccatccccgcacccactgccacgcccagtgcccgaggagctgtcatccgccagaattcagaccccacctctgaaggacctggccccagcccgaatcccccagcctgggtccgcccagataacgaggccccacccaaggtgcctcagaggacctcatctatcgccactgcccttaacaccagtggggccggagggtcccggccagcccaggcagtccgtgccagtaaccccgacctcaggaggagcgaccctggctgggaacgctcggacagcgtccttccagcctctcacgggcacctcccccaggctggctcactggagcggaaccgcgtgggagtctcctccaaaccggacagctcccctgtgctctcccctgggaataaagccaagcccgacgaccaccgctcacggccaggccggcccgcagactttgtgttgctgaaagagcggactctggacgaggcccctcggcctcccaagaaggccatggactactcgtcgtccagcgaggaggtggaaagcagtgaggacgacgaggaggaaggcgaaggcgggccagcagaggggagcagagatacccctgggggccgcagcgatggggatacagacagcgtcagcaccatggtggtccacgacgtcgaggagatcaccgggacccagcccccatacgggggcggcaccatggtggtccagcgcacccctgaagaggagcggaacctgctgcatgctgacagcaatgggtacacaaacctgcctgacgtggtccagcccagccactcacccaccgagaacagcaaaggccaaagcccaccctcgaaggatgggagtggtgactaccagtctcgtgggctggtaaaggcccctggcaagagctcgttcacgatgtttgtggatctagggatctaccagcctggaggcagtggggacagcatccccatcacagccctagtgggtggagagggcactcggctcgaccagctgcagtacgacgtgaggaagggttctgtggtcaacgtgaatcccaccaacacccgggcccacagtgagacccctgagatccggaagtacaagaagcgattcaactccgagatcctctgtgcagccctttggggggtcaacctgctggtgggcacggagaacgggctgatgttgctggaccgaagtgggcagggcaaggtgtatggactcattgggcggcgacgcttccagcagatggatgtgctggaggggctcaacctgctcatcaccatctcagggaaaaggaacaaactgcgggtgtattacctgtcctggctccggaacaagattctgcacaatgacccagaagtggagaagaagcagggctggaccaccgtgggggacatggagggctgcgggcactaccgtgttgtgaaatacgagcggattaagttcctggtcatcgccctcaagagctccgtggaggtgtatgcctgggcccccaaaccctaccacaaattcatggccttcaagtcctttgccgacctcccccaccgccctctgctggtcgacctgacagtagaggaggggcagcggctcaaggtcatctatggctccagtgctggcttccatgctgtggatgtcgactcggggaacagctatgacatctacatccctgtgcacatccagagccagatcacgccccatgccatcatcttcctccccaacaccgacggcatggagatgctgctgtgctacgaggacgagggtgtctacgtcaacacgtacgggcgcatcattaaggatgtggtgctgcagtggggggagatgcctacttctgtggcctacatctgctccaaccagataatgggctggggtgagaaagccattgagatccgctctgtggagacgggccacctcgacggggtcttcatgcacaaacgagctcagaggctcaagttcctgtgtgagcggaatgacaaggtgggaggctccttccctctgaaagccctgctgtcccggctgccatgaccctaggcccctgggcagagttctggggagaggatggtggtggtggcttcctgaaagcgggcccctctgggagctcggagggcagtcagccactaccactgccctgcgctcccttcagattccgaggacttcccagctggcccccagggggcgagtggtgcaccctctcccctaacatcccagcctgcctttcctccgggtgaggggcactgtgagtctcctcctgcagtctctgtgtctccctcaactcttctgccaccccttcttcccttctttccctctcccagttgagacacccccccaacctcagcccttggtgacttcttctcctgccccaccacagagcggactgaggcaaaaaaacaccttgtcattccgctcacacaggaacttgagcctctgagctcgtttgtgcatgaagaccccgtcgaggtggcccgtctccacagagcggatctcaatggctttctcaccccagcccattatctggttggagcagatgtaggccacagaagtaggcatctccccc

SEQ ID NO: 349549 - DNA, 3738 bp, Homo sapiens
gctggctccggggagatagcgcctgtcagtcggtgggtcggtcctcgcgccggccctccccctccccggtctccgggggaggcgcggtggagtccgcccccggggttctccgatgggggagaagcggcgacggcggcagtggagtaaccgagccggagcgtgagcggccccggtgccccgttccccacggaggccatgggcgacccagcccccgcccgcagcctggacgacatcgacctgtccgccctgcgggaccctgctgggatctttgagcttgtggaggtggtcggcaatggaacctacggacaggtgtacaagggtcggcatgtcaagacggggcagctggctgccatcaaggtcatggatgtcacggaggacgaggaggaagagatcaaacaggagatcaacatgctgaaaaagtactctcaccaccgcaacatcgccacctactacggagccttcatcaagaagagccccccgggaaacgatgaccagctctggctggtgatggagttctgtggtgctggttcagtgactgacctggtaaagaacacaaaaggcaacgccctgaaggaggactgtatcgcctatatctgcagggagatcctcaggggtctggcccatctccatgcccacaaggtgatccatcgagacatcaaggggcagaatgtgctgctgacagagaatgctgaggtcaagctagtggattttggggtgagtgctcagctggaccgcaccgtgggcagacggaacactttcattgggactccctactggatggctccagaggtcatcgcctgtgatgagaaccctgatgccacctatgattacaggagtgatatttggtctctaggaatcacagccatcgagatggcagagggagccccccctctgtgtgacatgcaccccatgcgagccctcttcctcattcctcggaaccctccgcccaggctcaagtccaagaagtggtctaagaagttcattgacttcattgacacatgtctcatcaagacttacctgagccgcccacccacggagcagctactgaagtttcccttcatccgggaccagcccacggagcggcaggtccgcatccagcttaaggaccacattgaccgatcccggaagaagcggggtgagaaagaggagacagaatatgagtacagcggcagcgaggaggaagatgacagccatggagaggaaggagagccaagctccatcatgaacgtgcctggagagtcgactctacgccgggagtttctccggctccagcaggaaaataagagcaactcagaggctttaaaacagcagcagcagctgcagcagcagcagcagcgagaccccgaggcacacatcaaacacctgctgcaccagcggcagcggcgcatagaggagcagaaggaggagcggcgccgcgtggaggagcaacagcggcgggagcgggagcagcggaagctgcaggagaaggagcagcagcggcggctggaggacatgcaggctctgcggcgggaggaggagcggcggcaggcggagcgcgagcaggaatacaagcggaagcagctggaggagcagcggcagtcagaacgtctccagaggcagctgcagcaggagcatgcctacctcaagtccctgcagcagcagcaacagcagcagcagcttcagaaacagcagcagcagcagctcctgcctggggacaggaagcccctgtaccattatggtcggggcatgaatcccgctgacaaaccagcctgggcccgagaggtagaagagagaacaaggatgaacaagcagcagaactctcccttggccaagagcaagccaggcagcacggggcctgagccccccatcccccaggcctccccagggcccccaggacccctttcccagactcctcctatgcagaggccggtggagccccaggagggaccgcacaagagcctggtggcacaccgggtcccactgaagccatatgcagcacctgtaccccgatcccagtccctgcaggaccagcccacccgaaacctggctgccttcccagcctcccatgaccccgaccctgccatccccgcacccactgccacgcccagtgcccgaggagctgtcatccgccagaattcagaccccacctctgaaggacctggccccagcccgaatcccccagcctgggtccgcccagataacgaggccccacccaaggtgcctcagaggacctcatctatcgccactgcccttaacaccagtggggccggagggtcccggccagcccaggcagtccgtgccagtaaccccgacctcaggaggagcgaccctggctgggaacgctcggacagcgtccttccagcctctcacgggcacctcccccaggctggctcactggagcggaaccgcgtgggagtctcctccaaaccggacagctcccctgtgctctcccctgggaataaagccaagcccgacgaccaccgctcacggccaggccggcccgcagactttgtgttgctgaaagagcggactctggacgaggcccctcggcctcccaagaaggccatggactactcgtcgtccagcgaggaggtggaaagcagtgaggacgacgaggaggaaggcgaaggcgggccagcagaggggagcagagatacccctgggggccgcagcgatggggatacagacagcgtcagcaccatggtggtccacgacgtcgaggagatcaccgggacccagcccccatacgggggcggcaccatggtggtccagcgcacccctgaagaggagcggaacctgctgcatgctgacagcaatgggtacacaaacctgcctgacgtggtccagcccagccactcacccaccgagaacagcaaaggccaaagcccaccctcgaaggatgggagtggtgactaccagtctcgtgggctggtaaaggcccctggcaagagctcgttcacgatgtttgtggatctagggatctaccagcctggaggcagtggggacagcatccccatcacagccctagtgggtggagagggcactcggctcgaccagctgcagtacgacgtgaggaagggttctgtggtcaacgtgaatcccaccaacacccgggcccacagtgagacccctgagatccggaagtacaagaagcgattcaactccgagatcctctgtgcagccctttggggggtcaacctgctggtgggcacggagaacgggctgatgttgctggaccgaagtgggcagggcaaggtgtatggactcattgggcggcgacgcttccagcagatggatgtgctggaggggctcaacctgctcatcaccatctcagggaaaaggaacaaactgcgggtgtattacctgtcctggctccggaacaagattctgcacaatgacccagaagtggagaagaagcagggctggaccaccgtgggggacatggagggctgcgggcactaccgtgttgtgaaatacgagcggattaagttcctggtcatcgccctcaagagctccgtggaggtgtatgcctgggcccccaaaccctaccacaaattcatggccttcaagtcctttgccgacctcccccaccgccctctgctggtcgacctgacagtagaggaggggcagcggctcaaggtcatctatggctcacacctgcgtccgccagcacacacaaacgcacaagcacacacgcacacacagcacacacacgcgaacgcagcacacacgaacacagcacacacagcacacacacgg

SEQ ID NO: 349550 - DNA, 341 bp, Homo sapiens
tggctgccatctgctgcctttggcacttctgtggccacgggcaggacctggaggggccccaccttcctctctcacagcagcgatggggatacagacagcgtcagcaccatggtggtccacgacgtcgaggagatcaccgggacccagcccccatacgggggcggcaccatggtggtccagcgcgtgagtgagcctctgctccctcccctgtacctgtgtgtgccctcctcagccccacgccaaccctgccctctgtcctgtagacccctgaagaggagcggaacctgctgcatgctgacagcaatgggtacacaaacctgcctgacgtggtccagcccagc

SEQ ID NO: 349551 - DNA, 1912 bp, Homo sapiens
cgcgtgcgcactgtgcagtttccgcggagcggcagagacgcgctgaagctactcgcggactgcgcgtgaagaaaggcggaaccttcacgctgattggcggcgacgcgggaggctgtagcggccgaccggacgcagggggctggcgggaacgtgaagctccgcggtgcctgatggggccgttgggcggccggtagctgttgctgttgggggaccccctcattcctgccgctgccgtccctgctgcctcatggcggccatcggagttcacctgggctgcacctcagcctgtgtggccgtctataaggatggccgggctggtgtggttgcaaatgatgccggtgaccgagttactccagctgttgttgcttactcagaaaatgaagagattgttggattggcagcaaaacaaagtagaataagaaatatttcaaatacagtaatgaaagtaaagcagatcctgggcagaagctccagtgatccacaagctcagaaatacatcgcggaaagtaaatgtttagtcattgaaaaaaatgggaaattacgatatgaaatagatactggagaagaaacaaaatttgttaacccagaagatgttgccagactgatatttagtaaaatgaaagaaacggcacattctgtattgggctcagatgcaaatgatgtagttattactgtcccgtttgattttggagaaaagcaaaaaaatgctcttggagaagcagctagagctgctggatttaatgttttgcgattaattcacgaaccgtctgcagctcttcttgcttatggaattggacaagactcccctactggaaaaagcaatattttggtgtttaagcttggaggaacatccttatctctcagcgtcatggaagttaacagtggaatatatcgggttctttcaacaaacactgatgataacatcggtggtgcacatttcacagaaaccttagcacagtatctagcttctgagttccaaagatccttcaaacatgatgtgagaggaaatgcgcgagccatgatgaaattaacgaacagtgctgaagtagcgaaacattctttgtcaaccttgggaagtgccaactgttttcttgactcattatatgaaggtcaagattttgattgcaatgtgtccagagcaagatttgaacttctttgttctccactttttaataagtgtatagaagcaatcagaggactcttagatcaaaatggatttacagcagatgatatcaacaaggttgtcctttgtggagggtcttctcgaatcccaaagctacagcaactgattaaagatcttttcccagctgttgagcttctcaattctatccctcctgatgaagtgatccctattggtgcagctatagaagcaggaattcttattgggaaagaaaacctgttggtggaagactctcttatgatagagtgttcagccagagatattttagttaagggtgtggacgaatcaggagccagtagattcacagtgctgtttccatcagggactcctttgccagctcgaagacaacacacattgcaagcccctggaagcatatcttcagtgtgccttgaactctatgagtctgatgggaagaactctgccaaagaggaaaccaagtttgcacaggttgtactccaggatttagataaaaaagaaaatggattacgtgatatattagctgttcttactatgaaaagggatggatctttacatgtgacatgcacagatcaagaaactggaaaatgtgaagcaatctctattgagatagcatcttagtgttttagagaaatcaagaatttttaaaaacaagaatatcaacatttggttttgtgtataagtggtgtttgtattaaaatactttttcaatgaactgtataaactatgttttattaaactacaatatatcagtaa

SEQ ID NO: 349552 - DNA, 757 bp, Homo sapiens
ccaggatagactaacgtctgaaagtcaagcattgcaaagagttaagtgactaggtatcccataaggagatgttgccaacctctgttgagacattggataatgttattaacactattgtttgaagtagtgaatggagtctcaaaattcacctaatcttccaaacattttttgaagtatttatactttttaattgtatatatacagtaaatgcacaagtcttaaatgtacagtataatggattttttgtatttatacacttgcctaactacctgggttaggtctacctggccaggtagacccaaccattactacttgaacccccttagaaaagcttttccagcattccataactcaggttcctcatttataaagtgggaaactcataattgtcctacctacctcacaggggtgttgtgaggatcaaaggaacagatgaatgtatgagcactttcagacatgtaaggcactgtcatgtaacaagtaggggaaagactctggagcacattagtgctggtgtgtgccaagcccgtgggctgttgaccgtaagggatattcaagtaggaggaggaagagaagatggcattgctaataaaggttgtgatacacaaccataggattaactgcctcctcaagtccatcatgtaaataaggtgctatgtataccaacttctcaccacctttgtttttctgttcggtaatcctggtgtggacaaataaagttttcacttgtatgtagttgtgggtcagtccactactt

SEQ ID NO: 349553 - DNA, 787 bp, Homo sapiens
cgcgtgcgcactgtgcagtttccgcggagcggcagagacgcgctgaagctactcgcggactgcgcgtgaagaaaggcggaaccttcacgctgattggcggcgacgcgggaggctgtagcggccgaccggacgcagggggctggcgggaacgtgaagctccgcggtgcctgatggggccgttgggcggccggtagctgttgctgttgggggaccccctcattcctgccgctgccgtccctgctgcctcatggcggccatcggagttcacctgggctgcacctcagcctgtgtggccgtctataaggatggccgggctggtgtggttgcaaatgatgccggtgaccgagttactccagctgttgttgcttactcagaaaatgaagagattgttggattggcagcaaaacaaagtagaataagaaatatttcaaatacagtaatgaaagtaaagcagatcctgggcagaaggatacttatgcactaagccaaaaactatagttgtttggagagaattcaatattcagtgacaataaatacatccccatctcattcccctgtggccttccagccagaaatgcggtccttggacctggcttctcagcaattatccctgagagggaagatcctggagatatcctgagagcacacagagcttccccacaccttcagacttgcaccttgctgtccagaagctgcctagccctcctttccaacccacaatggccagtgccaatagcagtgccggggaggccccccaaattttttccccccccggggggtttttttc

SEQ ID NO: 349554 - DNA, 4832 bp, Homo sapiens
cgcgtgcgcactgtgcagtttccgcggagcggcagagacgcgctgaagctactcgcggactgcgcgtgaagaaaggcggaaccttcacgctgattggcggcgacgcgggaggctgtagcggccgaccggacgcagggggctggcgggaacgtgaagctccgcggtgcctgatggggccgttgggcggccggtagctgttgctgttgggggaccccctcattcctgccgctgccgtccctgctgcctcatggcggccatcggagttcacctgggctgcacctcagcctgtgtggccgtctataaggatggccgggctggtgtggttgcaaatgatgccggtgaccgagttactccagctgttgttgcttactcagaaaatgaagagattgttggattggcagcaaaacaaagtagaataagaaatatttcaaatacagtaatgaaagtaaagcagatcctgggcagaagccagaaatgcggtccttggacctggcttctcagcaattatccctgagagggaagatcctggagatatcctgagagcacacagagcttccccacaccttcagacttgcaccttgctgtccagaagctgcctagccctcctttccaacccacaatggccagtgccaatagcagtgcgggcatccggtggtccagacaggagacacgaactcttctctccatactaggcgaggcagagtatattcagcgcctccagactgtgcatcacaatgcagatgtctatcaggctgtgtctaagcgaatgcagcaggagggcttccgccgcaccgaacgtcagtgccgctccaagtttaaagttctgaaggcattatatttaaaggcctatgttgcccatgccacaagtatgggtgagccaccacactgtccattttatgatacgttggatcagcttctccgaaatcagatagtgactgacccagacaacttaatggaggatgctgcttgggccaagcactgtgatcagaacttagtggcctctgacgccccaggggaagagggaaccggcattctaaaatcaaaaaggactcaggcagctgatcatcagcctatcttgaaaacagttaaggcatcagatgaggattgtcagctaagaatcagtgaccggatacgagaaaccagtgaccttgaggactcctgggatgaatcctcgggtgcagggtgctctcaagggacccccagctacagcagctcccacagccttttcagaggtgcagttgctccctgtcagagcagccccatggccagactgggtgtgtccggggagcccagcccctgcaccagcaccaaccgcagcactcctggggtagcctccacaccgcagactccagtctcctcttcgagagctggttttgtttctggtggggataggcccttgaccagtgagccccctccaaggtgggcaaggcgaagaaggcggtcagtggccaggactatcgcagccgagttggcagaaaacaggcgattggcacgagaactctcaaagcgggaggaagaaaaactggacaggctgattgctattggtgaggaggccagtgctcagcaagatactgccaatgagctccgcagggatgctgtcatcgcagtcagacgtttggcaacagcagtggaagaggcaactggtgcttttcagctaggccttgaaaaattgcttcagaggttgatttcgaataccaaaagctaggaaccaattacaaaaggctctgcttcctaaactggtagaagtctagttcccaaacctgccttctgaatccctggctccttttctgtgtcctcagaaaaaaacatggatgaaccatttatatccagatagtatgaaaataattgctagttcattttcccaagattctccaccaaatggaagacctttcagaaatgccaggggtgacctaatagaaaacgatggagccacgttctagacagctggttcatcctagctttgtcacagatgtgaagcagtttacctccctccagtggtttcctcatccgtaaaatggggatcaataataactcctgccctgcctacctcacagggttgttgtgaggatcacgtagttcatagatgtgaaagggtttaaaagtttaaaagcactgtacacatttaagttattaattcatatggccttggctgaggtaaggcagattggtttacaagatacagaagtatggatatatactgtgacttcattgcttgaatctttcctttgctggtctaacttgactgcttcatggagtttgaaatcttaatttttaaaatccctgtgtggctcattagacgactataagcacaacctgtatttgtaccttaatctcttacatttccactgctgtgtatctgacatatctactagtaagcactgttttgtcaaaccgtctttctctccttcattttactggttcttagtctcctatcaatataaggaaataagaagtgccagggagccgccattgtgtgttacggtttatatcgataatcttcaatataaaatactggccattttataaaatattaaatatatgtaaattctttgcatttcatattatttgggtccctttatatgcctaaattacatctttaagtttcggttgccattggaacattgtggaaacaattcagattatatcagtttcccatccgctttttagctgatttcattcttttctgttatttttttgtctagtatgttatacagggcaagccctagaaacgtttccttttgaggagctttccaagattccttttcctcagatgttgtagacagaagtttatgtagttaatggcatctggtggaagagaacagctttgtttcctctttaactttgggaacactagaggatggtgtggataaagattgcctgcaatagatgactccttttaagcactagccgtgaacagatgagcctcctccacaccccagacacacactggggagagatgaaggtgataagccacacttccgatttactctagaagggaagacattactctctgtcattaaactaacttaaagcttttagtgatttacttagtacttttaggaatacaaataggaatctttaggatttaaaaagttttccaataatctagaagttggaaaaataacaaagagtgggcatgttgggggaggttttattttctatcttgcaggctcgagtgcttagctaaatgctggaaatggacataggtggagaaatggtcagagcagcagtgggagcgtacccagaaccatgagtagacggcaagcgagctgctctgccaagccagggatggaggtgtgaggcggctggtgtggtagaatatgttggaatctagttagaattcctggattggaatcctgtcacagtttgtttcatcagacaaatcacttgcccttttctattattattatttttttttttttgagaaaaagtctcactgttttgcccaggctggggtgcagtggtgcaatcttggctcactgcaacctcagcctcccgagtagccgggattacaggtgcatgccaacatgcccaactcatttttgtatttttagtagagacggggtttcaccatgttggccaggctagtcttgaactcctgacctcaggtgatccacctgcctcggcctcccaaagtgctgagattacaggcgtgagccaccgtgcccagccaattcatgcctcaatttctttatctccggattgagggatttgtattagattttttttttcctagtaccttccagctctaaaaaaatttgaaatagcataataaaagacaaaatgaaaacgaaattttaattgtaatattttctgtcacagcagcatatgtatatttgaaatactggtaacaattttaaggtagcattctgtggtattaatatttattaatatgctcatgaacttctaagtgccacaccagacatatagactctttactttaaaagagcatatatttaaggcattgaaatggatacagctatattcattctcaattgtcttaggctattatatggaaagatatgtgtcaattataggtaggtaggtaggtaggtagattttctggaaacacagaagtacttgacggagagttaggcctgtattctataaatctattaatggtagcaaagtgcataagacagggatttctttgagatgaaaggagtgctgaagaagagcattggaattaatatttggatgtggtattgtgaaattcaatgggtaaagtaaccctaatgtgggaataaaagtcaagggaaaggtcttgaataagtacacagaaaaataggctaaaaatattaaggggagggaaattggaatacagggagacagtgtgcaagaaagcaagccaggaatctgcctatgtggtagacccaaccattactacttgaacccccttagaaaagcttttccagcattccataactcaggttcctcatttataaagtgggaaactcataattgtcctacctacctcacaggggtgttgtgaggatcaaaggaacagatgaatgtatgagcactttcagacatgtaaggcactgtcatgtaacaagtaggggaaagactctggagcacattagtgctggtgtgtgccaagcccgtgggctgttgaccgtaagggatattcaagtaggaggaggaagagaagatggcattgctaataaaggttgtgatacacaaccataggattaactgcctcctcaagtccatcatgtaaataaggtgctatgtataccaacttctcaccacctttgtttttctgttcggtaatcctggtgtggacaaataaagttttcacttgtatgtagttgtgggtcagtccactactt

SEQ ID NO: 349555 - DNA, 4181 bp, Homo sapiens
cgcgtgcgcactgtgcagtttccgcggagcggcagagacgcgctgaagctactcgcggactgcgcgtgaagaaaggcggaaccttcacgctgattggcggcgacgcgggaggctgtagcggccgaccggacgcagggggctggcgggaacgtgaagctccgcggtgcctgatggggccgttgggcggccggtagctgttgctgttgggggaccccctcattcctgccgctgccgtccctgctgcctcatggcggccatcggagttcacctgggctgcacctcagcctgtgtggccgtctataaggatggccgggctggtgtggttgcaaatgatgccggtgaccgagttactccagctgttgttgcttactcagaaaatgaagagattgttggattggcagcaaaacaaagtagaataagaaatatttcaaatacagtaatgaaagtaaagcagatcctgggcagaagccagaaatgcggtccttggacctggcttctcagcaattatccctgagagggaagatcctggagatatcctgagagcacacagagcttccccacaccttcagacttgcaccttgctgtccagaagctgcctagccctcctttccaacccacaatggccagtgccaatagcagtgcgggcatccggtggtccagacaggagacacgaactcttctctccatactaggcgaggcagagtatattcagcgcctccagactgtgcatcacaatgcagatgtctatcaggctgtgtctaagcgaatgcagcaggagggcttccgccgcaccgaacgtcagtgccgctccaagtttaaagttctgaaggcattatatttaaaggcctatgttgcccatgccacaagtatgggtgagccaccacactgtccattttatgatacgttggatcagcttctccgaaatcagatagtgactgacccagacaacttaatggaggatgctgcttgggccaagcactgtgatcagaacttagtggcctctgacgccccaggggaagagggaaccggcattctaaaatcaaaaaggactcaggcagctgatcatcagcctatcttgaaaacagttaaggcatcagatgaggattgtcagctaagaatcagtgaccggatacgagaaaccagtgaccttgaggactcctgggatgaatcctcgggtgcagggtgctctcaagggacccccagctacagcagctcccacagccttttcagaggtgcagttgctccctgtcagagcagccccatggccagactgggtgtgtccggggagcccagcccctgcaccagcaccaaccgcagcactcctggggtagcctccacaccgcagactccagtctcctcttcgagagctggttttgtttctggtggggataggcccttgaccagtgagccccctccaaggtgggcaaggcgaagaaggcggtcagtggccaggactatcgcagccgagttggcagaaaacaggcgattggcacgagaactctcaaagcgggaggaagaaaaactggacaggctgattgctattggtgaggaggccagtgctcagcaagatactgccaatgagctccgcagggatgctgtcatcgcagtcagacgtttggcaacagcagtggaagtggctcattagacgactataagcacaacctgtatttgtaccttaatctcttacatttccactgctgtgtatctgacatatctactagtaagcactgttttgtcaaaccgtctttctctccttcattttactggttcttagtctcctatcaatataaggaaataagaagtgccagggagccgccattgtgtgttacggtttatatcgataatcttcaatataaaatactggccattttataaaatattaaatatatgtaaattctttgcatttcatattatttgggtccctttatatgcctaaattacatctttaagtttcggttgccattggaacattgtggaaacaattcagattatatcagtttcccatccgctttttagctgatttcattcttttctgttatttttttgtctagtatgttatacagggcaagccctagaaacgtttccttttgaggagctttccaagattccttttcctcagatgttgtagacagaagtttatgtagttaatggcatctggtggaagagaacagctttgtttcctctttaactttgggaacactagaggatggtgtggataaagattgcctgcaatagatgactccttttaagcactagccgtgaacagatgagcctcctccacaccccagacacacactggggagagatgaaggtgataagccacacttccgatttactctagaagggaagacattactctctgtcattaaactaacttaaagcttttagtgatttacttagtacttttaggaatacaaataggaatctttaggatttaaaaagttttccaataatctagaagttggaaaaataacaaagagtgggcatgttgggggaggttttattttctatcttgcaggctcgagtgcttagctaaatgctggaaatggacataggtggagaaatggtcagagcagcagtgggagcgtacccagaaccatgagtagacggcaagcgagctgctctgccaagccagggatggaggtgtgaggcggctggtgtggtagaatatgttggaatctagttagaattcctggattggaatcctgtcacagtttgtttcatcagacaaatcacttgcccttttctattattattatttttttttttttgagaaaaagtctcactgttttgcccaggctggggtgcagtggtgcaatcttggctcactgcaacctcagcctcccgagtagccgggattacaggtgcatgccaacatgcccaactcatttttgtatttttagtagagacggggtttcaccatgttggccaggctagtcttgaactcctgacctcaggtgatccacctgcctcggcctcccaaagtgctgagattacaggcgtgagccaccgtgcccagccaattcatgcctcaatttctttatctccggattgagggatttgtattagattttttttttcctagtaccttccagctctaaaaaaatttgaaatagcataataaaagacaaaatgaaaacgaaattttaattgtaatattttctgtcacagcagcatatgtatatttgaaatactggtaacaattttaaggtagcattctgtggtattaatatttattaatatgctcatgaacttctaagtgccacaccagacatatagactctttactttaaaagagcatatatttaaggcattgaaatggatacagctatattcattctcaattgtcttaggctattatatggaaagatatgtgtcaattataggtaggtaggtaggtaggtagattttctggaaacacagaagtacttgacggagagttaggcctgtattctataaatctattaatggtagcaaagtgcataagacagggatttctttgagatgaaaggagtgctgaagaagagcattggaattaatatttggatgtggtattgtgaaattcaatgggtaaagtaaccctaatgtgggaataaaagtcaagggaaaggtcttgaataagtacacagaaaaataggctaaaaatattaaggggagggaaattggaatacagggagacagtgtgcaagaaagcaagccaggaatctgcctatgtggtagacccaaccattactacttgaacccccttagaaaagcttttccagcattccataactcaggttcctcatttataaagtgggaaactcataattgtcctacctacctcacaggggtgttgtgaggatcaaaggaacagatgaatgtatgagcactttcagacatgtaaggcactgtcatgtaacaagtaggggaaagactctggagcacattagtgctggtgtgtgccaagcccgtgggctgttgaccgtaagggatattcaagtaggaggaggaagagaagatggcattgctaataaaggttgtgatacacaaccataggattaactgcctcctcaagtccatcatgtaaataaggtgctatgtataccaacttctcaccacctttgtttttctgttcggtaatcctggtgtggacaaataaagttttcacttgtatgtagttgtgggtcagtccactactt

SEQ ID NO: 349556 - DNA, 3117 bp, Homo sapiens
cgcgtgcgcactgtgcagtttccgcggagcggcagagacgcgctgaagctactcgcggactgcgcgtgaagaaaggcggaaccttcacgctgattggcggcgacgcgggaggctgtagcggccgaccggacgcagggggctggcgggaacgtgaagctccgcggtgcctgatggggccgttgggcggccggtagctgttgctgttgggggaccccctcattcctgccgctgccgtccctgctgcctcatggcggccatcggagttcacctgggctgcacctcagcctgtgtggccgtctataaggatggccgggctggtgtggttgcaaatgatgccggtgaccgagttactccagctgttgttgcttactcagaaaatgaagagattgttggattggcagcaaaacaaagtagaataagaaatatttcaaatacagtaatgaaagtaaagcagatcctgggcagaagccagaaatgcggtccttggacctggcttctcacttctccgaaatcagatagtgactgacccagacaacttaatggaggatgctgcttgggccaagcactgtgatcagaacttagtggcctctgacgccccaggggaagagggaaccggcattctaaaatcaaaaaggactcaggcagctgatcatcagcctatcttgaaaacagttaaggcatcagatgaggattgtcagctaagaatcagtgaccggatacgagaaaccagtgaccttgaggactcctgggatgaatcctcgggtgcagggtgctctcaagggacccccagctacagcagctcccacagccttttcagaggtgcagttgctccctgtcagagcagccccatggccagactgggtgtgtccggggagcccagcccctgcaccagcaccaaccgcagcactcctggggtagcctccacaccgcagactccagtctcctcttcgagagctggttttgtttctggtggggataggcccttgaccagtgagccccctccaaggtgggcaaggcgaagaaggcggtcagtggccaggactatcgcagccgagttggcagaaaacaggcgattggcacgagaactctcaaagcgggaggaagaaaaactggacaggctgattgctattggtgaggaggccagtgctcagcaagatactgccaatgagctccgcagggatgctgtcatcgcagtcagacgtttggcaacagcagtggaagaggcaactggtgcttttcagctaggccttgaaaaattgcttcagaggttgatttcgaataccaaaagctaggaaccaattacaaaaggctctgcttcctaaactggtagaagtctagttcccaaacctgccttctgaatccctggctccttttctgtgtcctcagaaaaaaacatggatgaaccatttatatccagatagtatgaaaataattgctagttcattttcccaagattctccaccaaatggaagacctttcagaaatgccaggggtgacctaatagaaaacgatggagccacgttctagacagctggttcatcctagctttgtcacagatgtgaagcagtttacctccctccagtggtttcctcatccgtaaaatggggatcaataataactcctgccctgcctacctcacagggttgttgtgaggatcacgtagttcatagatgtgaaagggtttaaaagtttaaaagcactgtacacatttaagttattaattcatatggccttggctgaggtaaggcagattggtttacaagatacagaagtatggatatatactgtgacttcattgcttgaatctttcctttgctggtctaacttgactgcttcatggagtttgaaatcttaatttttaaaatccctgtgtggctcattagacgactataagcacaacctgtatttgtaccttaatctcttacatttccactgctgtgtatctgacatatctactagtaagcactgttttgtcaaaccgtctttctctccttcattttactggttcttagtctcctatcaatataaggaaataagaagtgccagggagccgccattgtgtgttacggtttatatcgataatcttcaatataaaatactggccattttataaaatattaaatatatgtaaattctttgcatttcatattatttgggtccctttatatgcctaaattacatctttaagtttcggttgccattggaacattgtggaaacaattcagattatatcagtttcccatccgctttttagctgatttcattcttttctgttatttttttgtctagtatgttatacagggcaagccctagaaacgtttccttttgaggagctttccaagattccttttcctcagatgttgtagacagaagtttatgtagttaatggcatctggtggaagagaacagctttgtttcctctttaactttgggaacactagaggatggtgtggataaagattgcctgcaatagatgactccttttaagcactagccgtgaacagatgagcctcctccacaccccagacacacactggggagagatgaaggtgataagccacacttccgatttactctagaagggaagacattactctctgtcattaaactaacttaaagcttttagtgatttacttagtacttttaggaatacaaataggaatctttaggatttaaaaagttttccaataatctagaagttggaaaaataacaaagagtgggcatgttgggggaggttttattttctatcttgcaggctcgagtgcttagctaaatgctggaaatggacataggtggagaaatggtcagagcagcagtgggagcgtacccagaaccatgagtagacggcaagcgagctgctctgccaagccagggatggaggtgtgaggcggctggtgtggtagaatatgttggaatctagttagaattcctggattggaatcctgtcacagtttgtttcatcagacaaatcacttgcccttttctattattattatttttttttttttgagaaaaagtctcactgttttgcccaggctggggtgcagtggtgcaatcttggctcactgcaactccagcctggcaacagagtgagactctgtctcaaaaaaaaaaaa

SEQ ID NO: 349557 - DNA, 1863 bp, Homo sapiens
cgcgtgcgcactgtgcagtttccgcggagcggcagagacgcgctgaagctactcgcggactgcgcgtgaagaaaggcggaaccttcacgctgattggcggcgacgcgggaggctgtagcggccgaccggacgcagggggctggcgggaacgtgaagctccgcggtgcctgatggggccgttgggcggccggtagctgttgctgttgggggaccccctcattcctgccgctgccgtccctgctgcctcatggcggccatcggagttcacctgggctgcacctcagcctgtgtggccgtctataaggatggccgggctggtgtggttgcaaatgatgccggtgaccgagttactccagctgttgttgcttactcagaaaatgaagagattgttggattggcagcaaaacaaagtagaataagaaatatttcaaatacagtaatgaaagtaaagcagatcctgggcagaagctccagtgatccacaagctcagaaatacatcgcggaaagtaaatgtttagtcattgaaaaaaatgggaaattacgatatgaaatagatactggagaagaaacaaaatttgttaacccagaagatgttgccagactgatatttagtaaaatgaaagaaacggcacattctgtattgggctcagatgcaaatgatgtagttattactgtcccgtttgattttggagaaaagcaaaaaaatgctcttggagaagcagctagagctgctggatttaatgttttgcgattaattcacgaaccgtctgcagctcttcttgcttatggaattggacaagactcccctactggaaaaagcaatattttggtgtttaagcttggaggaacatccttatctctcagcgtcatggaagttaacagtggaatatatcgggttctttcaacaaacactgatgataacatcggtggtgcacatttcacagaaaccttagcacagtatctagcttctgagttccaaagatccttcaaacatgatgtgagaggaaatgcgcgagccatgatgaaattaacgaacagtgctgaagtagcgaaacattctttgtcaaccttgggaagtgccaactgttttcttgactcattatatgaaggtcaagattttgattgcaatgtgtccagagcaagatttgaacttctttgttctccactttttaataagtgtatagaagcaatcagaggactcttagatcaaaatggatttacagcagatgatatcaacaaggttgtcctttgtggagggtcttctcgaatcccaaagctacagcaactgattaaagatcttttcccagctgttgagcttctcaattctatccctcctgatgaagtgatccctattggtgcagctatagaagcaggaattcttattgggaaagaaaacctgttggtggaagactctcttatgatagagtgttcagccagagatattttagttaagggactcctttgccagctcgaagacaacacacattgcaagcccctggaagcatatcttcagtgtgccttgaactctatgagtctgatgggaagaactctgccaaagaggaaaccaagtttgcacaggttgtactccaggatttagataaaaaagaaaatggattacgtgatatattagctgttcttactatgaaaagggatggatctttacatgtgacatgcacagatcaagaaactggaaaatgtgaagcaatctctattgagatagcatcttagtgttttagagaaatcaagaatttttaaaaacaagaatatcaacatttggttttgtgtataagtggtgtttgtattaaaatactttttcaatgaactgtataaactatgttttattaaactacaatatatcagtaa

SEQ ID NO: 349558 - DNA, 1772 bp, Homo sapiens
gtcgatttgtgaccattagcagggctgttgtgctatgcgaaaagcagatgaagtggttgtcttggttgtagctggacccgtgccccacactggtctgtcactcttgaagccctgtgtgaatcggcactgtccatgcgcaataatggcatttccgaatcatctgcgtccgtcctgctggccagtagcgtaccatgcatctctggagcgcttctcgcgtggaagttaacagtggaatatatcgggttctttcaacaaacactgatgataacatcggtggtgcacatttcacagaaaccttagcacagtatctagcttctgagttccaaagatccttcaaacatgatgtgagaggaaatgcgcgagccatgatgaaattaacgaacagtgctgaagtagcgaaacattctttgtcaaccttgggaagtgccaactgttttcttgactcattatatgaaggtcaagattttgattgcaatgtgtccagagcaagatttgaacttctttgttctccactttttaataagtgtatagaagcaatcagaggactcttagatcaaaatggatttacagcagatgatatcaacaaggttgtcctttgtggagggtcttctcgaatcccaaagctacagcaactgattaaagatcttttcccagctgttgagcttctcaattctatccctcctgatgaagtgatccctattggtgcagctatagaagcaggaattcttattgggaaagaaaacctgttggtggaagactctcttatgatagagtgttcagccagagatattttagttaagggtgtggacgaatcaggagccagtagattcacagtgctgtttccatcagggactcctttgccagctcgaagacaacacacattgcaagcccctggaagcatatcttcagtgtgccttgaactctatgagtctgatgggaagaactctgccaaagaggaaaccaagtttgcacaggttgtactccaggatttagataaaaaagaaaatggattacgtgatatattagctgttcttactatgaaaagggatggatctttacatgtgacatgcacagatcaagaaactggaaaatgtgaagcaatctctattgagatagcatcttagtgttttagagaaatcaagaatttttaaaaacaagaatatcaacatttggttttgtgtataagtggtgtttgtattaaaatactttttcaatgaactgtataaactatgttttattaaactacaatatatcagtaaaaaaaaaaagaaagacaaacacacaaacatcaaacaacctacacaaccaagaccgaacaagacaagaaaaaaaaaacaaagcgggggggcgcgcgcaaaatatcatccccgcggggcgggggccaaacttctcacgcggcagcccgccccaacccctcccccaacaagagagggccacaagagggagggagcagcgtataccgcgccggcgcgcggggcgccgtacaaacacagctgcgggggggacaacaacacagacccgtcgcggttcttctgaagggagcacacccccttcttgttggggtggagcaaatatggagcccaacacccctaaggaatatatacggcgctccgaggaaatactagcacgagtgtttataggttaaacaccacacgtatctagacgtaaaaagtgactacacacctcttacgaaattcatacagacaccgcaaatacggcggacacaaacgacgcaccgtagtggaagcacaaccaacacaagcaacacatgt

SEQ ID NO: 349559 - DNA, 1192 bp, Homo sapiens
cgcgtgcgcactgtgcagtttccgcggagcggcagagacgcgctgaagctactcgcggactgcgcgtgaagaaaggcggaaccttcacgctgattggcggcgacgcgggaggctgtagcggccgaccggacgcagggggctggcgggaacgtgaagctccgcggtgcctgatggggccgttgggcggccggtagctgttgctgttgggggaccccctcattcctgccgctgccgtccctgctgcctcatggcggccatcggagttcacctgggctgcacctcagcctgtgtggccgtctataaggatggccgggctggtgtggttgcaaatgatgccggtgaccgagttactccagctgttgttgcttactcagaaaatgaagagattgttggattggcagcaaaacaaagtagaataagaaatatttcaaatacagtaatgaaagtaaagcagatcctgggcagaaggatacttatgcactaagccaaaaactatagttgtttggagagaattcaatattcagtgacaataaatacatccccatatccttttacctattgataaaacttagtaccgagcatattaaatataagttggtgtcaaatattttcagatcataaagtctagaaaaaagaatcgtagatgggtcttcaagcccaaatcactgagcagccaacaatatgatttttttaattaaactttttatttagagagaattgcagtttcccatgctgctgtgtaagaaataatacagagacatcaaacacattgctggattcaccacctctccccgtggttatatcttgcaaaattatagtacagtgtcacaaccaagatgctcacatcgatatagtccagatacagaacatttccatagatctctcccctggtagccaacaatatgttactgtttgttttatgctgctgtttgagggcacatggttagagtaattatgtggctttcttctgccatattgtgcaaaaaaaaaatttgtattagcagagcaacttaaactcacttttctggcccacactgacagtcagatgggtaacacagagccacagcgtgctgtgattagtaaagactgagcatctttcagattgctataccgtggtcatgcttggactcctttagcgttagctgcctcatggtccaggtgattttccctcccagcccatctactcaccaga

SEQ ID NO: 349560 - DNA, 982 bp, Homo sapiens
aagaaacattaaaaacctacagaggtttttatcagtgaattacattttttgcccccagaattactatattttacaaagaaaagtatatctcaagtcatttgcatcttgaatattttaggaactctttattttggctatcatcaacctaagaaactgatctgtgctcatttgagatgtaatttatcaatttctagtataattttctaaggtttatgtaactgttactgtttgccctatgaaagggtaagtttctttattgctgcagaaaatctgtaagaaaaaaatgtactaattaaattcagctattgccattttcctaaccacaagctatccatatcactatgtattacaagtaaatcctttccaaatgaaacttaaaagacaacttactccataaacgatacttagcaagaatatagaattcatcagggtgagtttgccttggcctaggcttgaaaatagcatggtgcatctggagcttatataaagtcttaaacctaagatgtttgtcatcatgggttttcaagaaatacaaccatgatcttagtggtctggaaggaagttcctaataacaactagctaaatataacatatgacacttactaaatttagagacactgagattgtgtttattctttacattaatacccttcttttgaaaattaaaattaacccttgtttactgaaagccctcaagtaacttgttacagactttatgtttttataaaatgagcttgtgcaatgttctttatttttttgtctgtttagggatggatctttacatgtgacatgcacagatcaagaaactggaaaatgtgaagcaatctctattgagatagcatcttagtgttttagagaaatcaagaatttttaaaaacaagaatatcaacatttggttttgtgtataagtggtgtttgtattaaaatactttttcaatgaactgtataaactatgttttattaaactacaatatatcagtaa

SEQ ID NO: 349561 - DNA, 172 bp, Homo sapiens
tgttgatttgaaactttgcatttttattaaaaattatttatttagcataattgtaatttattttataggtcattgaaaaaaatgggaaattacgatatgaaatagatactggagaagaaacaaaatttgttaacccagaagatgttgccagactgatatttagtaaaatgaa

SEQ ID NO: 349562 - DNA, 548 bp, Homo sapiens
aatcaaaaaggactcaggcagctgatcatcagcctatcttgaaaacagttaaggcatcagatgaggattgtcagctaagaatcagtgaccggatacgagaaaccagtgaccttgaggactcctgggatgaatcctcgggtgcaggtaactcccaagcatgtgaaggagttgggtcccagagtcttgtggctctaaacatttagctgtgtctgtttggatagtgtcctcttcagcatagttcctgtttctgcctcattctgccccacgcaccttttcaaaaacctaatagtaagctaaagggttccaggttttcaaaagctatgcccctggcaacataaggtattagaaccctttaaacctagaagtgctctctagaaccaaactagttctggcattattaataactggtagtcaggaaattgtaggtctagagtgggttggatagctatgtacaaaggggttcaggaaggcaagggagaagttttagaggtgaaatcaaacaggtcacaattgtccagattaaggaaatggattcttcccagtccctg

SEQ ID NO: 349563 - DNA, 1875 bp, Homo sapiens
cgcgtgcgcactgtgcagtttccgcggagcggcagagacgcgctgaagctactcgcggactgcgcgtgaagaaaggcggaaccttcacgctgattggcggcgacgcgggaggctgtagcggccgaccggacgcagggggctggcgggaacgtgaagctccgcggtgcctgatggggccgttgggcggccggtagctgttgctgttgggggaccccctcattcctgccgctgccgtccctgctgcctcatggcggccatcggagttcacctgggctgcacctcagcctgtgtggccgtctataaggatggccgggctggtgtggttgcaaatgatgccggtgaccgagttactccagctgttgttgcttactcagaaaatgaagagattgttggattggcagcaaaacaaagtagaataagaaatatttcaaatacagtaatgaaagtaaagcagatcctgggcagaagctccagtgatccacaagctcagaaatacatcgcggaaagtaaatgtttagtcattgaaaaaaatgggaaattacgatatgaaatagatactggagaagaaacaaaatttgttaacccagaagatgttgccagactgatatttagtaaaatgaaagaaacggcacattctgtattgggctcagatgcaaatgatgtagttattactgtcccgtttgattttggagaaaagcaaaaaaatgctcttggagaagcagctagagctgctggatttaatgttttgcgattaattcacgaaccgtctgcagctcttcttgcttatggaattggacaagactcccctactggaaaaagcaatattttggtgtttaagcttggaggaacatccttatctctcagcgtcatggaagttaacagtggaatatatcgggttctttcaacaaacactgatgataacatcggtggtgcacatttcacagaaaccttagcacagtatctagcttctgagttccaaagatccttcaaacatgatgtgagaggaaatgcgcgagccatgatgaaattaacgaacagtgctgaagtagcgaaacattctttgtcaaccttgggaagtgccaactgttttcttgactcattatatgaaggtcaagattttgattgcaatgtgtccagagcaagatttgaacttctttgttctccactttttaataagtgtatagaagcaatcagaggactcttagatcaaaatggatttacagcagatgatatcaacaaggttgtcctttgtggagggtcttctcgaatcccaaagctacagcaactgattaaagatcttttcccagctgttgagcttctcaattctatccctcctgatgaagtgatccctattggtgcagctatagaagcaggaattcttattgggaaagaaaacctgttggtggaagactctcttatgatagagtgttcagccagagatattttagttaagggtgtggacgaatcaggagccagtagattcacagtgctgtttccatcagggactcctttgccagctcgaagacaacacacattgcaagcccctggaagcatatcttcagtgtgccttgaactctatgagtctgatgggaagaactctgccaaagaggaaaccaagtttgcacaggttgtactccaggatttagataaaaaagaaaatggattacgtgatatattagctgttcttactatgaaaagggatggatctttacatgtgacatgcacagatcaagaaactggaaaatgtgaagcaatctctattgagatagcatcttagtgttttagagaaatcaagaatttttaaaaacaagaatatcaacatttggttttgtgtataagtggtgtttgtattaaaatactttttcaatgaactgt

SEQ ID NO: 349564 - DNA, 4419 bp, Homo sapiens
cgcgtgcgcactgtgcagtttccgcggagcggcagagacgcgctgaagctactcgcggactgcgcgtgaagaaaggcggaaccttcacgctgattggcggcgacgcgggaggctgtagcggccgaccggacgcagggggctggcgggaacgtgaagctccgcggtgcctgatggggccgttgggcggccggtagctgttgctgttgggggaccccctcattcctgccgctgccgtccctgctgcctcatggcggccatcggagttcacctgggctgcacctcagcctgtgtggccgtctataaggatggccgggctggtgtggttgcaaatgatgccggtgaccgagttactccagctgttgttgcttactcagaaaatgaagagattgttggattggcagcaaaacaaagtagaataagaaatatttcaaatacagtaatgaaagtaaagcagatcctgggcagaagccagaaatgcggtccttggacctggcttctcacttctccgaaatcagatagtgactgacccagacaacttaatggaggatgctgcttgggccaagcactgtgatcagaacttagtggcctctgacgccccaggggaagagggaaccggcattctaaaatcaaaaaggactcaggcagctgatcatcagcctatcttgaaaacagttaaggcatcagatgaggattgtcagctaagaatcagtgaccggatacgagaaaccagtgaccttgaggactcctgggatgaatcctcgggtgcagggtgctctcaagggacccccagctacagcagctcccacagccttttcagaggtgcagttgctccctgtcagagcagccccatggccagactgggtgtgtccggggagcccagcccctgcaccagcaccaaccgcagcactcctggggtagcctccacaccgcagactccagtctcctcttcgagagctggttttgtttctggtggggataggcccttgaccagtgagccccctccaaggtgggcaaggcgaagaaggcggtcagtggccaggactatcgcagccgagttggcagaaaacaggcgattggcacgagaactctcaaagcgggaggaagaaaaactggacaggctgattgctattggtgaggaggccagtgctcagcaagatactgccaatgagctccgcagggatgctgtcatcgcagtcagacgtttggcaacagcagtggaagaggcaactggtgcttttcagctaggccttgaaaaattgcttcagaggttgatttcgaataccaaaagctaggaaccaattacaaaaggctctgcttcctaaactggtagaagtctagttcccaaacctgccttctgaatccctggctccttttctgtgtcctcagaaaaaaacatggatgaaccatttatatccagatagtatgaaaataattgctagttcattttcccaagattctccaccaaatggaagacctttcagaaatgccaggggtgacctaatagaaaacgatggagccacgttctagacagctggttcatcctagctttgtcacagatgtgaagcagtttacctccctccagtggtttcctcatccgtaaaatggggatcaataataactcctgccctgcctacctcacagggttgttgtgaggatcacgtagttcatagatgtgaaagggtttaaaagtttaaaagcactgtacacatttaagttattaattcatatggccttggctgaggtaaggcagattggtttacaagatacagaagtatggatatatactgtgacttcattgcttgaatctttcctttgctggtctaacttgactgcttcatggagtttgaaatcttaatttttaaaatccctgtgtggctcattagacgactataagcacaacctgtatttgtaccttaatctcttacatttccactgctgtgtatctgacatatctactagtaagcactgttttgtcaaaccgtctttctctccttcattttactggttcttagtctcctatcaatataaggaaataagaagtgccagggagccgccattgtgtgttacggtttatatcgataatcttcaatataaaatactggccattttataaaatattaaatatatgtaaattctttgcatttcatattatttgggtccctttatatgcctaaattacatctttaagtttcggttgccattggaacattgtggaaacaattcagattatatcagtttcccatccgctttttagctgatttcattcttttctgttatttttttgtctagtatgttatacagggcaagccctagaaacgtttccttttgaggagctttccaagattccttttcctcagatgttgtagacagaagtttatgtagttaatggcatctggtggaagagaacagctttgtttcctctttaactttgggaacactagaggatggtgtggataaagattgcctgcaatagatgactccttttaagcactagccgtgaacagatgagcctcctccacaccccagacacacactggggagagatgaaggtgataagccacacttccgatttactctagaagggaagacattactctctgtcattaaactaacttaaagcttttagtgatttacttagtacttttaggaatacaaataggaatctttaggatttaaaaagttttccaataatctagaagttggaaaaataacaaagagtgggcatgttgggggaggttttattttctatcttgcaggctcgagtgcttagctaaatgctggaaatggacataggtggagaaatggtcagagcagcagtgggagcgtacccagaaccatgagtagacggcaagcgagctgctctgccaagccagggatggaggtgtgaggcggctggtgtggtagaatatgttggaatctagttagaattcctggattggaatcctgtcacagtttgtttcatcagacaaatcacttgcccttttctattattattatttttttttttttgagaaaaagtctcactgttttgcccaggctggggtgcagtggtgcaatcttggctcactgcaacctcagcctcccgagtagccgggattacaggtgcatgccaacatgcccaactcatttttgtatttttagtagagacggggtttcaccatgttggccaggctagtcttgaactcctgacctcaggtgatccacctgcctcggcctcccaaagtgctgagattacaggcgtgagccaccgtgcccagccaattcatgcctcaatttctttatctccggattgagggatttgtattagattttttttttcctagtaccttccagctctaaaaaaatttgaaatagcataataaaagacaaaatgaaaacgaaattttaattgtaatattttctgtcacagcagcatatgtatatttgaaatactggtaacaattttaaggtagcattctgtggtattaatatttattaatatgctcatgaacttctaagtgccacaccagacatatagactctttactttaaaagagcatatatttaaggcattgaaatggatacagctatattcattctcaattgtcttaggctattatatggaaagatatgtgtcaattataggtaggtaggtaggtaggtagattttctggaaacacagaagtacttgacggagagttaggcctgtattctataaatctattaatggtagcaaagtgcataagacagggatttctttgagatgaaaggagtgctgaagaagagcattggaattaatatttggatgtggtattgtgaaattcaatgggtaaagtaaccctaatgtgggaataaaagtcaagggaaaggtcttgaataagtacacagaaaaataggctaaaaatattaaggggagggaaattggaatacagggagacagtgtgcaagaaagcaagccaggaatctgcctatgtggtagacccaaccattactacttgaacccccttagaaaagcttttccagcattccataactcaggttcctcatttataaagtgggaaactcataattgtcctacctacctcacaggggtgttgtgaggatcaaaggaacagatgaatgtatgagcactttcagacatgtaaggcactgtcatgtaacaagtaggggaaagactctggagcacattagtgctggtgtgtgccaagcccgtgggctgttgaccgtaagggatattcaagtaggaggaggaagagaagatggcattgctaataaaggttgtgatacacaaccataggattaactgcctcctcaagtccatcatgtaaataaggtgctatgtataccaacttctcaccacctttgtttttctgttcggtaatcctggtgtggacaaataaagttttcacttgtatgtagttgtgggtcagtccactactt

SEQ ID NO: 349565 - DNA, 4932 bp, Homo sapiens
cgcgtgcgcactgtgcagtttccgcggagcggcagagacgcgctgaagctactcgcggactgcgcgtgaagaaaggcggaaccttcacgctgattggcggcgacgcgggaggctgtagcggccgaccggacgcagggggctggcgggaacgtgaagctccgcggtgcctgatggggccgttgggcggccggtagctgttgctgttgggggaccccctcattcctgccgctgccgtccctgctgcctcatggcggccatcggagttcacctgggctgcacctcagcctgtgtggccgtctataaggatggccgggctggtgtggttgcaaatgatgccggtgaccgagttactccagctgttgttgcttactcagaaaatgaagagattgttggattggcagcaaaacaaagtagaataagaaatatttcaaatacagtaatgaaagtaaagcagatcctgggcagaaggatacttatgcactaagccaaaaactatagttgtttggagagaattcaatattcagtgacaataaatacatccccatctcattcccctgtggccttccagccagaaatgcggtccttggacctggcttctcagcaattatccctgagagggaagatcctggagatatcctgagagcacacagagcttccccacaccttcagacttgcaccttgctgtccagaagctgcctagccctcctttccaacccacaatggccagtgccaatagcagtgcgggcatccggtggtccagacaggagacacgaactcttctctccatactaggcgaggcagagtatattcagcgcctccagactgtgcatcacaatgcagatgtctatcaggctgtgtctaagcgaatgcagcaggagggcttccgccgcaccgaacgtcagtgccgctccaagtttaaagttctgaaggcattatatttaaaggcctatgttgcccatgccacaagtatgggtgagccaccacactgtccattttatgatacgttggatcagcttctccgaaatcagatagtgactgacccagacaacttaatggaggatgctgcttgggccaagcactgtgatcagaacttagtggcctctgacgccccaggggaagagggaaccggcattctaaaatcaaaaaggactcaggcagctgatcatcagcctatcttgaaaacagttaaggcatcagatgaggattgtcagctaagaatcagtgaccggatacgagaaaccagtgaccttgaggactcctgggatgaatcctcgggtgcagggtgctctcaagggacccccagctacagcagctcccacagccttttcagaggtgcagttgctccctgtcagagcagccccatggccagactgggtgtgtccggggagcccagcccctgcaccagcaccaaccgcagcactcctggggtagcctccacaccgcagactccagtctcctcttcgagagctggttttgtttctggtggggataggcccttgaccagtgagccccctccaaggtgggcaaggcgaagaaggcggtcagtggccaggactatcgcagccgagttggcagaaaacaggcgattggcacgagaactctcaaagcgggaggaagaaaaactggacaggctgattgctattggtgaggaggccagtgctcagcaagatactgccaatgagctccgcagggatgctgtcatcgcagtcagacgtttggcaacagcagtggaagaggcaactggtgcttttcagctaggccttgaaaaattgcttcagaggttgatttcgaataccaaaagctaggaaccaattacaaaaggctctgcttcctaaactggtagaagtctagttcccaaacctgccttctgaatccctggctccttttctgtgtcctcagaaaaaaacatggatgaaccatttatatccagatagtatgaaaataattgctagttcattttcccaagattctccaccaaatggaagacctttcagaaatgccaggggtgacctaatagaaaacgatggagccacgttctagacagctggttcatcctagctttgtcacagatgtgaagcagtttacctccctccagtggtttcctcatccgtaaaatggggatcaataataactcctgccctgcctacctcacagggttgttgtgaggatcacgtagttcatagatgtgaaagggtttaaaagtttaaaagcactgtacacatttaagttattaattcatatggccttggctgaggtaaggcagattggtttacaagatacagaagtatggatatatactgtgacttcattgcttgaatctttcctttgctggtctaacttgactgcttcatggagtttgaaatcttaatttttaaaatccctgtgtggctcattagacgactataagcacaacctgtatttgtaccttaatctcttacatttccactgctgtgtatctgacatatctactagtaagcactgttttgtcaaaccgtctttctctccttcattttactggttcttagtctcctatcaatataaggaaataagaagtgccagggagccgccattgtgtgttacggtttatatcgataatcttcaatataaaatactggccattttataaaatattaaatatatgtaaattctttgcatttcatattatttgggtccctttatatgcctaaattacatctttaagtttcggttgccattggaacattgtggaaacaattcagattatatcagtttcccatccgctttttagctgatttcattcttttctgttatttttttgtctagtatgttatacagggcaagccctagaaacgtttccttttgaggagctttccaagattccttttcctcagatgttgtagacagaagtttatgtagttaatggcatctggtggaagagaacagctttgtttcctctttaactttgggaacactagaggatggtgtggataaagattgcctgcaatagatgactccttttaagcactagccgtgaacagatgagcctcctccacaccccagacacacactggggagagatgaaggtgataagccacacttccgatttactctagaagggaagacattactctctgtcattaaactaacttaaagcttttagtgatttacttagtacttttaggaatacaaataggaatctttaggatttaaaaagttttccaataatctagaagttggaaaaataacaaagagtgggcatgttgggggaggttttattttctatcttgcaggctcgagtgcttagctaaatgctggaaatggacataggtggagaaatggtcagagcagcagtgggagcgtacccagaaccatgagtagacggcaagcgagctgctctgccaagccagggatggaggtgtgaggcggctggtgtggtagaatatgttggaatctagttagaattcctggattggaatcctgtcacagtttgtttcatcagacaaatcacttgcccttttctattattattatttttttttttttgagaaaaagtctcactgttttgcccaggctggggtgcagtggtgcaatcttggctcactgcaacctcagcctcccgagtagccgggattacaggtgcatgccaacatgcccaactcatttttgtatttttagtagagacggggtttcaccatgttggccaggctagtcttgaactcctgacctcaggtgatccacctgcctcggcctcccaaagtgctgagattacaggcgtgagccaccgtgcccagccaattcatgcctcaatttctttatctccggattgagggatttgtattagattttttttttcctagtaccttccagctctaaaaaaatttgaaatagcataataaaagacaaaatgaaaacgaaattttaattgtaatattttctgtcacagcagcatatgtatatttgaaatactggtaacaattttaaggtagcattctgtggtattaatatttattaatatgctcatgaacttctaagtgccacaccagacatatagactctttactttaaaagagcatatatttaaggcattgaaatggatacagctatattcattctcaattgtcttaggctattatatggaaagatatgtgtcaattataggtaggtaggtaggtaggtagattttctggaaacacagaagtacttgacggagagttaggcctgtattctataaatctattaatggtagcaaagtgcataagacagggatttctttgagatgaaaggagtgctgaagaagagcattggaattaatatttggatgtggtattgtgaaattcaatgggtaaagtaaccctaatgtgggaataaaagtcaagggaaaggtcttgaataagtacacagaaaaataggctaaaaatattaaggggagggaaattggaatacagggagacagtgtgcaagaaagcaagccaggaatctgcctatgtggtagacccaaccattactacttgaacccccttagaaaagcttttccagcattccataactcaggttcctcatttataaagtgggaaactcataattgtcctacctacctcacaggggtgttgtgaggatcaaaggaacagatgaatgtatgagcactttcagacatgtaaggcactgtcatgtaacaagtaggggaaagactctggagcacattagtgctggtgtgtgccaagcccgtgggctgttgaccgtaagggatattcaagtaggaggaggaagagaagatggcattgctaataaaggttgtgatacacaaccataggattaactgcctcctcaagtccatcatgtaaataaggtgctatgtataccaacttctcaccacctttgtttttctgttcggtaatcctggtgtggacaaataaagttttcacttgtatgtagttgtgggtcagtccactactt

SEQ ID NO: 349566 - DNA, 2425 bp, Homo sapiens
cgcgtgcgcactgtgcagtttccgcggagcggcagagacgcgctgaagctactcgcggactgcgcgtgaagaaaggcggaaccttcacgctgattggcggcgacgcgggaggctgtagcggccgaccggacgcagggggctggcgggaacgtgaagctccgcggtgcctgatggggccgttgggcggccggtagctgttgctgttgggggaccccctcattcctgccgctgccgtccctgctgcctcatggcggccatcggagttcacctgggctgcacctcagcctgtgtggccgtctataaggatggccgggctggtgtggttgcaaatgatgccggtgaccgagttactccagctgttgttgcttactcagaaaatgaagagattgttggattggcagcaaaacaaagtagaataagaaatatttcaaatacagtaatgaaagtaaagcagatcctgggcagaagctccagtgatccacaagctcagaaatacatcgcggaaagtaaatgtttagtcattgaaaaaaatgggaaattacgatatgaaatagatactggagaagaaacaaaatttgttaacccagaagatgttgccagactgatatttagtaaaatgaaagaaacggcacattctgtattgggctcagatgcaaatgatgtagttattactgtcccgtttgattttggagaaaagcaaaaaaatgctcttggagaagcagctagagctgctggatttaatgttttgcgattaattcacgaaccgtctgcagctcttcttgcttatggaattggacaagactcccctactggaaaaagcaatattttggtgtttaagcttggaggaacatccttatctctcagcgtcatggaagttaacagtggaatatatcgggttctttcaacaaacactgatgataacatcggtggtgcacatttcacagaaaccttagcacagtatctagcttctgagttccaaagatccttcaaacatgatgtgagaggaaatgcgcgagccatgatgaaattaacgaacagtgctgaagtagcgaaacattctttgtcaaccttgggaagtgccaactgttttcttgactcattatatgaaggtcaagattttgattgcaatgtgtccagagcaagatttgaacttctttgttctccactttttaataagtgtatagaagcaatcagaggactcttagatcaaaatggatttacagcagatgatatcaacaaggttgtcctttgtggagggtcttctcgaatcccaaagctacagcaactgattaaagatcttttcccagctgttgagcttctcaattctatccctcctgatgaagtgatccctattggtgcagctatagaagcaggaattcttattgggaaagaaaacctgttggtggaagactctcttatgatagagtgttcagccagagatattttagttaagggtgtggacgaatcaggagccagtagattcacagtgctgtttccatcagggactcctttgccagctcgaagacaacacacattgcaagcccctggaagcatatcttcagtgtgccttgaactctatgagtctgatgggaagaactctgccaaagaggaaaccaagtttgcacaggttgtactccaggatttagataaaaaagaaaatggattacgtgatatattagctgttcttactatgaaaagggatggatctttacatgtgacatgcacagatcaagaaactggaaaatgtgaagcaatctctattgagatagcatcttagtgttttagagaaatcaagaatttttaaaaacaagaatatcaacatttggttttgtgtataagtggtgtttgtattaaaatactttttcaatgaactgtataaactatgttttattaaactacaatatatcagtaaaaaaaaaaagaaagacaaacacacaaacatcaaacaacctacacaaccaagaccgaacaagacaagaaaaaaaaaacaaagcgggggggcgcgcgcaaaatatcatccccgcggggcgggggccaaacttctcacgcggcagcccgccccaacccctcccccaacaagagagggccacaagagggagggagcagcgtataccgcgccggcgcgcggggcgccgtacaaacacagctgcgggggggacaacaacacagacccgtcgcggttcttctgaagggagcacacccccttcttgttggggtggagcaaatatggagcccaacacccctaaggaatatatacggcgctccgaggaaatactagcacgagtgtttataggttaaacaccacacgtatctagacgtaaaaagtgactacacacctcttacgaaattcatacagacaccgcaaatacggcggacacaaacgacgcaccgtagtggaagcacaaccaacacaagcaacacatgt

SEQ ID NO: 349567 - DNA, 2375 bp, Homo sapiens
cgcgtgcgcactgtgcagtttccgcggagcggcagagacgcgctgaagctactcgcggactgcgcgtgaagaaaggcggaaccttcacgctgattggcggcgacgcgggaggctgtagcggccgaccggacgcagggggctggcgggaacgtgaagctccgcggtgcctgatggggccgttgggcggccggtagctgttgctgttgggggaccccctcattcctgccgctgccgtccctgctgcctcatggcggccatcggagttcacctgggctgcacctcagcctgtgtggccgtctataaggatggccgggctggtgtggttgcaaatgatgccggtgaccgagttactccagctgttgttgcttactcagaaaatgaagagattgttggattggcagcaaaacaaagtagaataagaaatatttcaaatacagtaatgaaagtaaagcagatcctgggcagaagctccagtgatccacaagctcagaaatacatcgcggaaagtaaatgtttagtcattgaaaaaaatgggaaattacgatatgaaatagatactggagaagaaacaaaatttgttaacccagaagatgttgccagactgatatttagtaaaatgaaagaaacggcacattctgtattgggctcagatgcaaatgatgtagttattactgtcccgtttgattttggagaaaagcaaaaaaatgctcttggagaagcagctagagctgctggatttaatgttttgcgattaattcacgaaccgtctgcagctcttcttgcttatggaattggacaagactcccctactggaaaaagtggaagttaacagtggaatatatcgggttctttcaacaaacactgatgataacatcggtggtgcacatttcacagaaaccttagcacagtatctagcttctgagttccaaagatccttcaaacatgatgtgagaggaaatgcgcgagccatgatgaaattaacgaacagtgctgaagtagcgaaacattctttgtcaaccttgggaagtgccaactgttttcttgactcattatatgaaggtcaagattttgattgcaatgtgtccagagcaagatttgaacttctttgttctccactttttaataagtgtatagaagcaatcagaggactcttagatcaaaatggatttacagcagatgatatcaacaaggttgtcctttgtggagggtcttctcgaatcccaaagctacagcaactgattaaagatcttttcccagctgttgagcttctcaattctatccctcctgatgaagtgatccctattggtgcagctatagaagcaggaattcttattgggaaagaaaacctgttggtggaagactctcttatgatagagtgttcagccagagatattttagttaagggtgtggacgaatcaggagccagtagattcacagtgctgtttccatcagggactcctttgccagctcgaagacaacacacattgcaagcccctggaagcatatcttcagtgtgccttgaactctatgagtctgatgggaagaactctgccaaagaggaaaccaagtttgcacaggttgtactccaggatttagataaaaaagaaaatggattacgtgatatattagctgttcttactatgaaaagggatggatctttacatgtgacatgcacagatcaagaaactggaaaatgtgaagcaatctctattgagatagcatcttagtgttttagagaaatcaagaatttttaaaaacaagaatatcaacatttggttttgtgtataagtggtgtttgtattaaaatactttttcaatgaactgtataaactatgttttattaaactacaatatatcagtaaaaaaaaaaagaaagacaaacacacaaacatcaaacaacctacacaaccaagaccgaacaagacaagaaaaaaaaaacaaagcgggggggcgcgcgcaaaatatcatccccgcggggcgggggccaaacttctcacgcggcagcccgccccaacccctcccccaacaagagagggccacaagagggagggagcagcgtataccgcgccggcgcgcggggcgccgtacaaacacagctgcgggggggacaacaacacagacccgtcgcggttcttctgaagggagcacacccccttcttgttggggtggagcaaatatggagcccaacacccctaaggaatatatacggcgctccgaggaaatactagcacgagtgtttataggttaaacaccacacgtatctagacgtaaaaagtgactacacacctcttacgaaattcatacagacaccgcaaatacggcggacacaaacgacgcaccgtagtggaagcacaaccaacacaagcaacacatgt

SEQ ID NO: 349568 - DNA, 1973 bp, Homo sapiens
tatttctcttattcagtacgtgtgctttttgctttctttgtgaagaatatgggctctgaacattacaattttaaacagaaagtgatctcttatagtcattcatttcttgttttctatattcttgcttctaaagatcattatacttcatgttctacttatgaaattttagtagcttttgtataaaatctttagcagatcatttctaaaaatgtagaattgaacatgtgataaattaaattcattgaaagcaaattgttcacagagaagcagctagagctgctggatttaatgttttgcgattaattcacgaaccgtctgcagctcttcttgcttatggaattggacaagactcccctactggaaaaagcaatattttggtgtttaagcttggaggaacatccttatctctcagcgtcatggaagttaacagtggaatatatcgggttctttcaacaaacactgatgataacatcggtggtgcacatttcacagaaaccttagcacagtatctagcttctgagttccaaagatccttcaaacatgatgtgagaggaaatgcgcgagccatgatgaaattaacgaacagtgctgaagtagcgaaacattctttgtcaaccttgggaagtgccaactgttttcttgactcattatatgaaggtcaagattttgattgcaatgtgtccagagcaagatttgaacttctttgttctccactttttaataagtgtatagaagcaatcagaggactcttagatcaaaatggatttacagcagatgatatcaacaaggttgtcctttgtggagggtcttctcgaatcccaaagctacagcaactgattaaagatcttttcccagctgttgagcttctcaattctatccctcctgatgaagtgatccctattggtgcagctatagaagcaggaattcttattgggaaagaaaacctgttggtggaagactctcttatgatagagtgttcagccagagatattttagttaagggtgtggacgaatcaggagccagtagattcacagtgctgtttccatcagggactcctttgccagctcgaagacaacacacattgcaagcccctggaagcatatcttcagtgtgccttgaactctatgagtctgatgggaagaactctgccaaagaggaaaccaagtttgcacaggttgtactccaggatttagataaaaaagaaaatggattacgtgatatattagctgttcttactatgaaaagggatggatctttacatgtgacatgcacagatcaagaaactggaaaatgtgaagcaatctctattgagatagcatcttagtgttttagagaaatcaagaatttttaaaaacaagaatatcaacatttggttttgtgtataagtggtgtttgtattaaaatactttttcaatgaactgtataaactatgttttattaaactacaatatatcagtaaaaaaaaaaagaaagacaaacacacaaacatcaaacaacctacacaaccaagaccgaacaagacaagaaaaaaaaaacaaagcgggggggcgcgcgcaaaatatcatccccgcggggcgggggccaaacttctcacgcggcagcccgccccaacccctcccccaacaagagagggccacaagagggagggagcagcgtataccgcgccggcgcgcggggcgccgtacaaacacagctgcgggggggacaacaacacagacccgtcgcggttcttctgaagggagcacacccccttcttgttggggtggagcaaatatggagcccaacacccctaaggaatatatacggcgctccgaggaaatactagcacgagtgtttataggttaaacaccacacgtatctagacgtaaaaagtgactacacacctcttacgaaattcatacagacaccgcaaatacggcggacacaaacgacgcaccgtagtggaagcacaaccaacacaagcaacacatgt

SEQ ID NO: 349569 - DNA, 859 bp, Homo sapiens
cgcgtgcgcactgtgcagtttccgcggagcggcagagacgcgctgaagctactcgcggactgcgcgtgaagaaaggcggaaccttcacgctgattggcggcgacgcgggaggctgtagcggccgaccggacgcagggggctggcgggaacgtgaagctccgcggtgcctgatggggccgttgggcggccggtagctgttgctgttgggggaccccctcattcctgccgctgccgtccctgctgcctcatggcggccatcggagttcacctgggctgcacctcagcctgtgtggccgtctataaggatggccgggctggtgtggttgcaaatgatgccggtgaccgagttactccagctgttgttgcttactcagaaaatgaagagattgttggattggcagcaaaacaaagtagaataagaaatatttcaaatacagtaatgaaagtaaagcagatcctgggcagaagctccagtgatccacaagctcagaaatacatcgcggaaagtaaatgtttagtcattgaaaaaaatgggaaattacgatatgaaatagatactggagaagaaacaaaatttgttaacccagaagatgttgccagactgatatttagtaaaatgaaaggagcttattctccatggagtcagtctaattcagaagatggttgatactgaagcctaagagccaggctgtttggaaagctaattctgtgtccaaatatatcaccaaaaccacaagaagtgctgcatgatttcagagcgcagagaagaaaattgacacgggggcggggtgggcaagcaagtgtattgggaaatatgttaagtgagatctttgtcataaattaataaacctcagaaagt

SEQ ID NO: 349570 - DNA, 370 bp, Homo sapiens
ccctgacgtttcctaaatactggcctggcctgtgccgcccctgcccccactactcacaagtttctgagccctttgtcagttttgtacattcccaagcatgccagcttctgtgcccatggaccttgctgcatcctgcacagcagggttcagtttcatgtatctttgtcttttcctctagaacctgcctttttcaaatatccctgccttttcccacctggaaacatatactgtatgcgaaagagttgatatatgcaaagtaattcaaacctggccatgtactttggaaaagaaagcatagagatgaattgtgggtgtttctcacaccttaacgaaaatctcgtgcgatctgattccagaagattcttgtgag

SEQ ID NO: 349571 - DNA, 386 bp, Homo sapiens
aagtgctgggattacaggcgtgagccaccacgtctggccaaacctagtttttagctattttattaaatggaattatagactagtaggaccgtcacagtcttgattactttaagaccagatcatgcaagtgtttttgactattctgcaggaaatgaaatcaaaccacttctacctattttctcctgttatagtttttatcctgagtctggaagttatgttaaatatttttttgcactaaattccaataaagcagagaaaagacaattgttaggcaatttgtagtaccagcattgtttttctatacatactgttataggtgaagcatttaaattattgtgcttttttggtaacaagttttttacattttaaagttgttctttatattt

SEQ ID NO: 349572 - DNA, 430 bp, Homo sapiens
aaatgccagggatgctcactggcaaaatatcacatttgacattttccatctgaagtttcaggctctcctgttctcaacctgagtagtttcaaaaggtctgtggaccactgaaagaacacggtattcgggaaacttccgcaaggacaggaagaaatcaaacactcagaacacaaagccattaaaaccccacagatggactccaaaatatatgtcacaagcaaatagctgcgggaaagggtgagatgcagacagaagctgaaaataagggcttagctgaagatgctaggtaaactgtatgttttgattattcatgctgcctagctactataaatgattgggtcaatcattcctgttggatgaagatatctttatatcaactctaagatcatttgaagaaaaagtgaaaacagcttaaagttccaaaatgtaa

SEQ ID NO: 349573 - DNA, 4283 bp, Homo sapiens
tctctcctgcctcctctggccttcggactcctgcccgcgccgcccgcagccccctcccggccctgcagcccctgggcgggcggcgcccctcggaggacggctccgggcccggggggacggagggcctggtcgcctggaggaagccggaggcctgcgtggaggaggcgccccgcgcagctggctggcggagcatgagcgccccagatcccaagcactgcaagtccagatgcaacgggagcctggctcaagggacgacaagatccagccggaaagtgtagaagtcacaccccaatggcgggatagcagcccctgtgtgtgagcacccctccatgccaggaggagggccagagatggatgactacatggagacgctgaaggatgaagaggacgccttgtgggagaatgtggagtgtaaccggcacatgctcagccgctatatcaaccctgccaagctcacgccctacctgcgtcagtgtaaggtcattgatgagcaggatgaagatgaagtgcttaatgcccctatgctgccatccaagatcaaccgagcaggccggctgttggacattctacataccaaggggcaaaggggctatgtggtcttcttggagagcctagaattttattacccagaactgtacaaactggtgactgggaaagagcccactcggagattctccaccattgtggtggaggaaggccacgagggcctcacgcacttcctgatgaacgaggtcatcaagctgcagcagcagatgaaggccaaggacctgcaacgctgcgagctgctggccaggttgcggcagctggaggatgagaagaagcagatgacgctgacgcgcgtggagctgctaaccttccaggagcggtactacaagatgaaggaagagcgggacagctacaatgacgagctggtcaaggtgaaggacgacaactacaacttagccatgcgctacgcacagctcagtgaggagaagaacatggcggtcatgaggagccgagacctccaactcgagatcgatcagctaaagcaccggttgaataagatggaggaggaatgtaagctggagagaaatcagtctctaaaactgaagaatgacattgaaaatcggcccaagaaggagcaggttctggaactggagcgggagaatgaaatgctgaagaccaaaaaccaggagctgcagtccatcatccaggccgggaagcgcagcctgccagactcagacaaggccatcctggacatcttggaacacgaccgcaaggaggccctggaggacaggcaggagctggtcaacaggatctacaacctgcaggaggaggcccgccaggcagaggagctgcgagacaagtacctggaggagaaggaggacctggagctcaagtgctcgaccctgggaaaggactgtgaaatgtacaagcaccgcatgaacacggtcatgctgcagctggaggaggtggagcgggagcgggaccaggccttccactcccgagatgaagctcagacacagtactcgcagtgcttaatcgaaaaggacaagtacaggaagcagatccgcgagctggaggagaagaacgacgagatgaggatcgagatggtgcggcgggaggcctgcatcgtcaacctggagagcaagctgcggcgcctctccaaggacagcaacaacctggaccagagtctgcccaggaacctgccagtaaccatcatctctcaggactttggggatgccagccccaggaccaatggtcaagaagctgacgattcttccacctcggaggagtcacctgaagacagcaagtacttcctgccctaccatccgccccagcgcaggatgaacctgaagggcatccagctgcagagagccaaatcccccatcagcctgaagcgaacatcagattttcaagccaaggggcacgaggaagaaggcacggacgccagccctagctcctgcggatctctgcccatcaccaactccttcaccaagatgcagcccccccggagccgcagcagcatcatgtcaatcaccgccgagcccccgggaaacgactccatcgtcagacgctacaaggaggacgcgccccatcgcagcacagtcgaagaagacaatgacagcggcgggtttgacgccttagatctggatgatgacagtcacgaacgctactccttcggaccctcctccatccactcctcctcctcctcccaccaatccgagggcctggatgcctacgacctggagcaggtcaacctcatgttcaggaagttctctctggaaagacccttccggccttcggtcacctctgtggggcacgtgcggggcccagggccctcggtgcagcacacgacgctgaatggcgacagcctcacctcccagctcaccctgctggggggcaacgcgcgagggagcttcgtgcactcggtcaagcctggctctctggccgagaaagccggcctccgtgagggccaccagctgctgctgctagaaggctgcatccgaggcgagaggcagagtgtcccgttggacacatgcaccaaagaggaagcccactggaccatccagaggtgcagcggccccgtcacgctgcactacaaggtcaaccacgaagggtaccggaagctggtgaaggacatggaggacggcctgatcacatcgggggactcgttctacatccggctgaacctgaacatctccagccagctggacgcctgcaccatgtccctgaagtgtgacgatgttgtgcacgtccgtgacaccatgtaccaggacaggcacgagtggctgtgcgcgcgggtcgaccctttcacagaccatgacctggatatgggcaccatacccagctacagccgagcccagcagctcctcctggtgaaactgcagcgcctgatgcaccgaggcagccgggaggaggtagacggcacccaccacaccctgcgggcactccggaacaccctgcagccggaagaagcgctttcaacaagcgacccccgggtcagcccccgtctctcgcgagcaagcttcctttttggccagctccttcagttcgtcagcaggtccgagaacaagtataagcggatgaacagcaacgagcgggtccgcatcatctcggggagtccgctagggagcctggcccggtcctcgctggacgccaccaagctcttgactgagaagcaggaagagctggaccctgagagcgagctgggcaagaacctcagcctcatcccctacagcctggtacgcgccttctactgcgagcgccgccggcccgtgctcttcacacccaccgtgctggccaagacgctggtgcagaggctgctcaactcgggaggtgccatggagttcaccatctgcaagtcagatatcgtcacaagagatgagttcctcagaaggcagaagacggagaccatcatctactcccgagagaagaaccccaacgcgttcgaatgcatcgcccctgccaacattgaagctgtggccgccaagaacaagcactgcctgctggaggctgggatcggctgcacaagagacttgatcaagtccaacatctaccccatcgtgctcttcatccgggtgtgtgagaagaacatcaagaggttcagaaagctgctgccccggcctgagacggaggaggagttcctgcgcgtgtgccggctgaaggagaaggagctggaggccctgccgtgcctgtacgccacggtggaacctgacatgtggggcagcgtagaggagctgctccgcgttgtcaaggacaagatcggcgaggagcagcgcaagaccatctgggtggacgaggaccagctgtgaggcgggcgccctgggcagagagactctgtggcgcggggcatcctatgaggcaggcaccctgggcagagagatgcagtgggtgcggggggatcctgtggcccacagagctgccccagcagacgctccgccccacccggtgatggagccccggggggacagtcgtgcctggggaggagcagggtacagcccattcccccagccctggctgacctggcctagcagtttggccctgctggccttagcagggagacaggggagcaaagaacgccaagccggaggcccgaggccagccggcctctcgagagccagagcagcagttgaatgtaatgctggggacaggcatgctgccgccagtagggcggggacccggacagccaggtgactaccagtcctggggacacactcaccataaacacatccccaggcaggacagatcggggaaggggtgtgtaccaggctatgatttctcttgcattaaaatgtattatt

SEQ ID NO: 349574 - DNA, 4622 bp, Homo sapiens
tctctcctgcctcctctggccttcggactcctgcccgcgccgcccgcagccccctcccggccctgcagcccctgggcgggcggcgcccctcggaggacggctccgggcccggggggacggagggcctggtcgcctggaggaagccggaggcctgcgtggaggaggcgccccgcgcagctggctggcggagcatgagcgccccagatcccaagcactgcaagtccagatgcaacgggagcctggctcaagggacgacaagatccagccggaaagtgtagaagtcacaccccaatggcgggatagcagcccctgtgtgtgagcacccctccatgccaggaggagggccagagatggatgactacatggagacgctgaaggatgaagaggacgccttgtgggagaatgtggagtgtaaccggcacatgctcagccgctatatcaaccctgccaagctcacgccctacctgcgtcagtgtaaggtcattgatgagcaggatgaagatgaagtgcttaatgcccctatgctgccatccaagatcaaccgagcaggccggctgttggacattctacataccaaggggcaaaggggctatgtggtcttcttggagagcctagaattttattacccagaactgtacaaactggtgactgggaaagagcccactcggagattctccaccattgtggtggaggaaggccacgagggcctcacgcacttcctgatgaacgaggtcatcaagctgcagcagcagatgaaggccaaggacctgcaacgctgcgagctgctggccaggttgcggcagctggaggatgagaagaagcagatgacgctgacgcgcgtggagctgctaaccttccaggagcggtactacaagatgaaggaagagcgggacagctacaatgacgagctggtcaaggtgaaggacgacaactacaacttagccatgcgctacgcacagctcagtgaggagaagaacatggcggtcatgaggagccgagacctccaactcgagatcgatcagctaaagcaccggttgaataagatggaggaggaatgtaagctggagagaaatcagtctctaaaactgaagaatgacattgaaaatcggcccaagaaggagcaggttctggaactggagcgggagaatgaaatgctgaagaccaaaaaccaggagctgcagtccatcatccaggccgggaagcgcagcctgccagactcagacaaggccatcctggacatcttggaacacgaccgcaaggaggccctggaggacaggcaggagctggtcaacaggatctacaacctgcaggaggaggcccgccaggcagaggagctgcgagacaagtacctggaggagaaggaggacctggagctcaagtgctcgaccctgggaaaggactgtgaaatgtacaagcaccgcatgaacacggtcatgctgcagctggaggaggtggagcgggagcgggaccaggccttccactcccgagatgaagctcagacacagtactcgcagtgcttaatcgaaaaggacaagtacaggaagcagatccgcgagctggaggagaagaacgacgagatgaggatcgagatggtgcggcgggaggcctgcatcgtcaacctggagagcaagctgcggcgcctctccaaggacagcaacaacctggaccagagtctgcccaggaacctgccagtaaccatcatctctcaggactttggggatgccagccccaggaccaatggtcaagaagctgacgattcttccacctcggaggagtcacctgaagacagcaagtacttcctgccctaccatccgccccagcgcaggatgaacctgaagggcatccagctgcagagagccaaatcccccatcagcctgaagcgaacatcagattttcaagccaaggggcacgaggaagaaggcacggacgccagccctagctcctgcggatctctgcccatcaccaactccttcaccaagatgcagcccccccggagccgcagcagcatcatgtcaatcaccgccgagcccccgggaaacgactccatcgtcagacgctacaaggaggacgcgccccatcgcagcacagtcgaagaagacaatgacagcggcgggtttgacgccttagatctggatgatgacagtcacgaacgctactccttcggaccctcctccatccactcctcctcctcctcccaccaatccgagggcctggatgcctacgacctggagcaggtcaacctcatgttcaggaagttctctctggaaagacccttccggccttcggtcacctctgtggggcacgtgcggggcccagggccctcggtgcagcacacgacgctgaatggcgacagcctcacctcccagctcaccctgctggggggcaacgcgcgagggagcttcgtgcactcggtcaagcctggctctctggccgagaaagccggcctccgtgagggccaccagctgctgctgctagaaggctgcatccgaggcgagaggcagagtgtcccgttggacacatgcaccaaagaggaagcccactggaccatccagaggtgcagcggccccgtcacgctgcactacaaggtcaaccacgaagggtaccggaagctggtgaaggacatggaggacggcctgatcacatcgggggactcgttctacatccggctgaacctgaacatctccagccagctggacgcctgcaccatgtccctgaagtgtgacgatgttgtgcacgtccgtgacaccatgtaccaggacaggcacgagtggctgtgcgcgcgggtcgaccctttcacagaccatgacctggatatgggcaccatacccagctacagccgagcccagcagctcctcctggtgaaactgcagcgcctgatgcaccgaggcagccgggaggaggtagacggcacccaccacaccctgcgggcactccggaacaccctgcagccggaagaagcgctttcaacaagcgacccccgggtcagcccccgtctctcgcgagcaagcttcctttttggccagctccttcagttcgtcagcaggtccgagaacaagtataagcggatgaacagcaacgagcgggtccgcatcatctcggggagtccgctagggagcctggcccggtcctcgctggacgccaccaagctcttgactgagaagcaggaagagctggaccctgagagcgagctgggcaagaacctcagcctcatcccctacagcctggtacgcgccttctactgcgagcgccgccggcccgtgctcttcacacccaccgtgctggccaagacgctggtgcagaggctgctcaactcgggaggtgccatggagttcaccatctgcaagtcagatatcgtcacaagagatgagttcctcagaaggcagaagacggagaccatcatctactcccgagagaagaaccccaacgcgttcgaatgcatcgcccctgccaacattgaagctgtggccgccaagaacaagcactgcctgctggaggctgggatcggctgcacaagagacttgatcaagtccaacatctaccccatcgtgctcttcatccgggtgtgtgagaagaacatcaagaggttcagaaagctgctgccccggcctgagacggaggaggagttcctgcgcgtgtgccggctgaaggagaaggagctggaggccctgccgtgcctgtacgccacggtggaacctgacatgtggggcagcgtagaggagctgctccgcgttgtcaaggacaagatcggcgaggagcagcgcaagaccatctgggtggacgaggaccagctgtgaggcgggcgccctgggcagagagactctgtggcgcggggcatcctatgaggcaggcaccctgggcagagagatgcagtgggtgcggggggatcctgtggcccacagagctgccccagcagacgctccgccccacccggtgatggagccccggggggacagtcgtgcctggggaggagcagggtacagcccattcccccagccctggctgacctggcctagcagtttggccctgctggccttagcagggagacaggggagcaaagaacgccaagccggaggcccgaggccagccggcctctcgagagccagagcagcagttgaatgtaatgctggggacaggcatgctgccgccagtagggcggggacccggacagccaggtgactaccagtcctggggacacactcaccataaacacatccccaggcaggacagatcggggaaggggtgtgtaccaggctatgatttctcttgcattaaaatgtattattatttctttgtttcgaccctttgtttgtgaacagcttgccaggccttgagcccttgccgccttcctaacctgaaaaccatgcccagtgagcttagctggagactcaggccccatgttcctgggtagggtgaaggtggggtgaccacacaccccagggtcccaggacaggcctgatttacccctgggcttagggtaatacttgctaatcgcaccctatggactcaaatgcatcctgatttggaagatcaataaattatcttgtcaccctgagaagggcccatcctctcactgaccctggggagcccttgcagtctgtgtctggcctgccccgtaactccag

SEQ ID NO: 349575 - DNA, 493 bp, Homo sapiens
tctctcctgcctcctctggccttcggactcctgcccgcgccgcccgcagccccctcccggccctgcagcccctgggcgggcggcgcccctcggaggacggctccgggcccggggggacggagggcctggtcgcctggaggaagccggaggcctgcgtggaggaggcgccccgcgcagctggctggcggagcatgagcgccccagatcccaagcactgcaagtccagatgcaacgggagcctggctcaagggacgacaagatccagccggaaagtgtagaagtcacaccccaatggcgggatagcagcccctgtgtgtgagcacccctccatgccaggaggagggccagagatggatgactacatggagacgctgaaggatgaagaggacgccttgtgggagaatgtggagtgtaaccggcacatgctcagccgggtctcacgaattccgctgagttctcacgaattccgctgaggtctcacgaattccgctga

SEQ ID NO: 349576 - DNA, 4964 bp, Homo sapiens
tctctcctgcctcctctggccttcggactcctgcccgcgccgcccgcagccccctcccggccctgcagcccctgggcgggcggcgcccctcggaggacggctccgggcccggggggacggagggcctggtcgcctggaggaagccggaggcctgcgtggaggaggcgccccgcgcagctggctggcggagcatgagcgccccagatcccaagcactgcaagtccagatgcaacgggagcctggctcaagggacgacaagatccagccggaaagtgtagaagtcacaccccaatggcgggatagcagcccctgtgtgtgagcacccctccatgccaggaggagggccagagatggatgactacatggagacgctgaaggatgaagaggacgccttgtgggagaatgtggagtgtaaccggcacatgctcagccgctatatcaaccctgccaagctcacgccctacctgcgtcagtgtaaggtcattgatgagcaggatgaagatgaagtgcttaatgcccctatgctgccatccaagatcaaccgagcaggccggctgttggacattctacataccaaggggcaaaggggctatgtggtcttcttggagagcctagaattttattacccagaactgtacaaactggtgactgggaaagagcccactcggagattctccaccattgtggtggaggaaggccacgagggcctcacgcacttcctgatgaacgaggtcatcaagctgcagcagcagatgaaggccaaggacctgcaacgctgcgagctgctggccaggttgcggcagctggaggatgagaagaagcagatgacgctgacgcgcgtggagctgctaaccttccaggagcggtactacaagatgaaggaagagcgggacagctacaatgacgagctggtcaaggtgaaggacgacaactacaacttagccatgcgctacgcacagctcagtgaggagaagaacatggcggtcatgaggagccgagacctccaactcgagatcgatcagctaaagcaccggttgaataagatggaggaggaatgtaagctggagagaaatcagtctctaaaactgaagaatgacattgaaaatcggcccaagaaggagcaggttctggaactggagcgggagaatgaaatgctgaagaccaaaaaccaggagctgcagtccatcatccaggccgggaagcgcagcctgccagactcagacaaggccatcctggacatcttggaacacgaccgcaaggaggccctggaggacaggcaggagctggtcaacaggatctacaacctgcaggaggaggcccgccaggcagaggagctgcgagacaagtacctggaggagaaggaggacctggagctcaagtgctcgaccctgggaaaggactgtgaaatgtacaagcaccgcatgaacacggtcatgctgcagctggaggaggtggagcgggagcgggaccaggccttccactcccgagatgaagctcagacacagtactcgcagtgcttaatcgaaaaggacaagtacaggaagcagatccgcgagctggaggagaagaacgacgagatgaggatcgagatggtgcggcgggaggcctgcatcgtcaacctggagagcaagctgcggcgcctctccaaggacagcaacaacctggaccagagtctgcccaggaacctgccagtaaccatcatctctcaggactttggggatgccagccccaggaccaatggtcaagaagctgacgattcttccacctcggaggagtcacctgaagacagcaagtacttcctgccctaccatccgccccagcgcaggatgaacctgaagggcatccagctgcagagagccaaatcccccatcagcctgaagcgaacatcagattttcaagccaaggggcacgaggaagaaggcacggacgccagccctagctcctgcggatctctgcccatcaccaactccttcaccaagatgcagcccccccggagccgcagcagcatcatgtcaatcaccgccgagcccccgggaaacgactccatcgtcagacgctacaaggaggacgcgccccatcgcagcacagtcgaagaagacaatgacagcggcgggtttgacgccttagatctggatgatgacagtcacgaacgctactccttcggaccctcctccatccactcctcctcctcctcccaccaatccgagggcctggatgcctacgacctggagcaggtcaacctcatgttcaggaagttctctctggaaagacccttccggccttcggtcacctctgtggggcacgtgcggggcccagggccctcggtgcagcacacgacgctgaatggcgacagcctcacctcccagctcaccctgctggggggcaacgcgcgagggagcttcgtgcactcggtcaagcctggctctctggccgagaaagccggcctccgtgagggccaccagctgctgctgctagaaggctgcatccgaggcgagaggcagagtgtcccgttggacacatgcaccaaagaggaagcccactggaccatccagaggtgcagcggccccgtcacgctgcactacaaggtcaaccacgaagggtaccggaagctggtgaaggacatggaggacggcctgatcacatcgggggactcgttctacatccggctgaacctgaacatctccagccagctggacgcctgcaccatgtccctgaagtgtgacgatgttgtgcacgtccgtgacaccatgtaccaggacaggcacgagtggctgtgcgcgcgggtcgaccctttcacagaccatgacctggatatgggcaccatacccagctacagccgcatctatgagaccataacaccacacctcaggccagtcctcgaaggcaagcatcatcacaccagatttacagaggaggagaccgtggctcagaggggttcggccactttgctgcagcctcacagcaagccagtgctggaggtgggatccaaacacagatacaaggagccacatcttctccccgggcgccccctgggctcagagcgcacaccagccacagggccatccctacgcagagtcggacacgcgccccacccatgccagtgcggtgctgcggccccgctggcttcccggtgcttggcccctgaatttcagcctctgaggctcctctcttcgctccccagagcccagcagctcctcctggtgaaactgcagcgcctgatgcaccgaggcagccgggaggaggtagacggcacccaccacaccctgcgggcactccggaacaccctgcagccggaagaagcgctttcaacaagcgacccccgggtcagcccccgtctctcgcgagcaagcttcctttttggccagctccttcagttcgtcagcaggtccgagaacaagtataagcggatgaacagcaacgagcgggtccgcatcatctcggggagtccgctagggagcctggcccggtcctcgctggacgccaccaagctcttgactgagaagcaggaagagctggaccctgagagcgagctgggcaagaacctcagcctcatcccctacagcctggtacgcgccttctactgcgagcgccgccggcccgtgctcttcacacccaccgtgctggccaagacgctggtgcagaggctgctcaactcgggaggtgccatggagttcaccatctgcaagtcagatatcgtcacaagagatgagttcctcagaaggcagaagacggagaccatcatctactcccgagagaagaaccccaacgcgttcgaatgcatcgcccctgccaacattgaagctgtggccgccaagaacaagcactgcctgctggaggctgggatcggctgcacaagagacttgatcaagtccaacatctaccccatcgtgctcttcatccgggtgtgtgagaagaacatcaagaggttcagaaagctgctgccccggcctgagacggaggaggagttcctgcgcgtgtgccggctgaaggagaaggagctggaggccctgccgtgcctgtacgccacggtggaacctgacatgtggggcagcgtagaggagctgctccgcgttgtcaaggacaagatcggcgaggagcagcgcaagaccatctgggtggacgaggaccagctgtgaggcgggcgccctgggcagagagactctgtggcgcggggcatcctatgaggcaggcaccctgggcagagagatgcagtgggtgcggggggatcctgtggcccacagagctgccccagcagacgctccgccccacccggtgatggagccccggggggacagtcgtgcctggggaggagcagggtacagcccattcccccagccctggctgacctggcctagcagtttggccctgctggccttagcagggagacaggggagcaaagaacgccaagccggaggcccgaggccagccggcctctcgagagccagagcagcagttgaatgtaatgctggggacaggcatgctgccgccagtagggcggggacccggacagccaggtgactaccagtcctggggacacactcaccataaacacatccccaggcaggacagatcggggaaggggtgtgtaccaggctatgatttctcttgcattaaaatgtattattatttctttgtttcgaccctttgtttgtgaacagcttgccaggccttgagcccttgccgccttcctaacctgaaaaccatgcccagtgagcttagctggagactcaggccccatgttcctgggtagggtgaaggtggggtgaccacacaccccagggtcccaggacaggcctgatttacccctgggcttagggtaatacttgctaatcgcaccctatggactcaaatgcatcctgatttggaagatcaataaattatcttgtcaccctgagaagggcccatcctctcactgaccctggggagcccttgcagtctgtgtctggcctgccccgtaactccag

SEQ ID NO: 349577 - DNA, 433 bp, Homo sapiens
cgggctcagcacaagcctcctccagccaaggtcgccgctgatagccggctcgctgcctccatgccgcctgagtaggaggcgggcacgattttgcattgaattgagtccctgcgtgtgtaatatttatgcacccgtaacgtgtgtgtgtctgtgtctgaagcagcccccccggagccgcagcagcatcatgtcaatcaccgccgagcccccgggaaacgactccatcgtcagacgctacaaggaggacgcgccccatcgcaggtgggtggcaggtgagggaggactgggcttttgccccgtgccaccatgccaagcctccttaccccgtctctgggccagtccacgcttgctgacccagctgtcctcgaagcaaccctgaaaggcagggtactgctcattgtacagatgaggaggctgaggctcagaggaggga

SEQ ID NO: 349578 - DNA, 97 bp, Homo sapiens
gtatagaaaggtttttatatctccctctccctcatttctacaggacagctttgctaggcacagcatttttgttttcaatatggagtcttgctctgcc

SEQ ID NO: 349579 - DNA, 691 bp, Homo sapiens
tgtcctatcctatatgtgcctgaggagctcagtcattcataggattagagtcccactgctgtcctaatttcgtgaaactctggatatttgaagtgattaataatgtgacttaatccatcagttcctaagatttatatatctttctctgtccctaaggatagaaaacacaacaggctcctccctttctttattttcttactgtggatgacggtccctggaacttcagctgataaaagggctggtaggaaaacacacagggctctgcatccccaggactcagcttcatccctgtctgctgagctttgactctagaatctgactattggcctccctcttctaggattctgaacacgaccctctttgagagttgggagataatcgggccttatgcttcatggtggctcctcaatggcctgctgctgaccatgaatactggatttaaagtctgaagaacttcatttatcacccaccaactaaacttacgtaattatttttaggattaggatggacaatctgtttttttgtttttgttttgtttgagacaaacaaaacagtgtgtccactctgtcatacaggctggagtacagtggcgcaatcatggctcactgcagcctcgacctcctgggctcaagagatgctcctgcctcagcctcccaagtagctaggactacaggtgcatgtcaccatgccc

SEQ ID NO: 349580 - DNA, 660 bp, Homo sapiens
agtagctgggattacaggcgcatgccaccaggcctggctaatttttgtattcttagtagaaacggggtttcactatgttggccaggctggtctctaactcccgaccttgtgatctgcccaccttggcctcccgaagtgctgggattacaggcgtgagccaccgcacctggcctgcctgttttaccttttaagatgtgacttagacgcaagaggaaagttctaccttcttcctgtcccttaggaatggcttttgttaaaggatgatagggttaagagttttttaagagatggcctcaaccatttcctaccccttacctacctgcttcagtggatttcatatttttctttttgacatggggcccagtaaaccttttgtaaaacatagtgattagtggtgtgtagtattgaacgttggcaaacatatcaggaagaaaatgtgaagcagtggaagcaggaccactcaccaccatggcagggaggagacttaatgagtttttgcagtagtctaaactaatgtgaacctgaaggaatagtgagcaaggaaaaggattcagcctatcctaaaaatgtgaattgacagaaatttgggtaatcactataaatgtacaaggaatgggactaagagtacaggaagttactactcggggtatgtcacgagtc

SEQ ID NO: 349581 - DNA, 2044 bp, Homo sapiens
agcggggcaggtggtggccgccggccgggccccgccctggggccgcctccccgcgggttccgttggctgtggcggcagctgacgcttgtggcggcggtggcttcggggtgggcgtaagatggcgacagcagcgcagggacccctaagcttgctgtggggctggctgtggagcgagcgcttctggctacccgagaacgtgagctgggctgatctggaggggccggccgacggctacggttacccccgcggccggcacatcctctcggtgttcccgctggcggcgggcatcttcttcgtgaggctgctcttcgagcgatttattgccaaaccctgtgcactccgtattggcatcgaggacagtggtccttatcaggcccaacccaatgccatccttgaaaaggtgttcatatctattaccaagtatcctgataagaaaaggctggagggcctgtcaaagcagctggattggaatgtccgaaaaatccaatgctggtttcgccatcggaggaatcaggacaagcccccaacgcttactaaattctgtgaaagcatgtggagattcacattttatttatgtatattctgctatggaattagatttctctggtcgtcaccttggttctgggacatccgacagtgctggcataactatccatttcagcctctttcaagtgggctttatcactattatatcatggaattggccttctattggtcccttatgttttctcagtttacagacattaaaagaaaggacttcctgatcatgtttgtgcatcacttggtcaccattgggcttatctccttctcctacatcaacaatatggttcgagtgggaactctgatcatgtgtctacatgatgtctcagacttcttgctggaggcagccaaactggccaattatgccaagtatcagcggctctgtgacaccctttttgtgatcttcagtgctgtttttatggttacacgactaggaatctatccattctggattctgaacacgaccctctttgagagttgggagataatcgggccttatgcttcatggtggctcctcaatggcctgctgctgaccctacagcttctgcatgtcatctggtcctacctaattgcacggattgctttgaaagccttgatcaggggaaaggtatcgaaggatgatcgcagtgatgtggagagcagctcagaggaagaagatgtgaccacctgcacaaaaagtccctgtgacagtagctccagcaatggtgccaatcgggtgaatggtcacatgggaggcagctactgggctgaagagtaaggtggttgctatagggacttcagcacacatggacttgtagggccactggcaacatactcctcttggcccttcccatatctactcttctgtgattgggagactgcaaggcactgaggagtatcaaagaagcaaatattttcactttgaaagaaaactgccattttgtatttaatagcctccaggttctttcagtaatgttatttgctctgtgtgtttttgtgtgtttgttgatgtgcgtttgtgcatatgcgtgagtttcattgccggggttggggcacaattgtggactggggccatgaggccttccctggtccccactgaacccaccttagttccacatttggctgcatcttgaattatgccgactccagacttctcctccttttttgcccttggctcttgacactctaaacccctggaccatctgaatggagcagccaagttcagtcccacatttctgtactgttcctctttcacagctggaatatgtcacatgatgaagttgtatagaaacagaaccatggatggatggccaggattgccgtggtccctagctagatccccttcctatcaatcacctgatagcaacagggacagctgccaataccctgctctttactcaatggtacccagggagggagcatgggaagagggtgagctgagggctggaggagggcaacagccactgggtgagctgttcacggtcttatactattgtttgtgattaaaagtgcttcaacccacctc

SEQ ID NO: 349582 - DNA, 2147 bp, Homo sapiens
agcggggcaggtggtggccgccggccgggccccgccctggggccgcctccccgcgggttccgttggctgtggcggcagctgacgcttgtggcggcggtggcttcggggtgggcgtaagatggcgacagcagcgcagggacccctaagcttgctgtggggctggctgtggagcgagcgcttctggctacccgagaacgtgagctgggctgatctggaggggccggccgacggctacggttacccccgcggccggcacatcctctcggtgttcccgctggcggcgggcatcttcttcgtgaggctgctcttcgagcgatttattgccaaaccctgtgcactccgtattggcatcgaggacagtggtccttatcaggcccaacccaatgccatccttgaaaaggtgttcatatctattaccaagtatcctgataagaaaaggctggagggcctgtcaaagcagctggattggaatgtccgaaaaatccaatgctggtttcgccatcggaggaatcaggacaagcccccaacgcttactaaattctgtgaaagcatgtggagattcacattttatttatgtatattctgctatggaattagatttctctggtcgtcaccttggttctgggacatccgacagtgctggcataactatccatttcagcctctttcaagtgggctttatcactattatatcatggaattggccttctattggtcccttatgttttctcagtttacagacattaaaagaaaggacttcctgatcatgtttgtgcatcacttggtcaccattgggcttatctccttctcctacatcaacaatatggttcgagtgggaactctgatcatgtgtctacatgatgtctcagacttcttgctggaggcagccaaactggccaattatgccaagtatcagcggctctgtgacaccctttttgtgatcttcagtgctgtttttatggttacacgactaggaatctatccattctggattctgaacacgaccctctttgagagttgggagataatcgggccttatgcttcatggtggctcctcaatggcctgctgctgaccctacagcttctgcatgtcatctggtcctacctaattgcacggattgctttgaaagccttgatcaggggaaaggtgacctgtccaggaaggattagaccctgtactttccactctttcctcacctccttccttttttctatgcctggcgggagctggacagtttcatctcttgcatgtatcgaaggatgatcgcagtgatgtggagagcagctcagaggaagaagatgtgaccacctgcacaaaaagtccctgtgacagtagctccagcaatggtgccaatcgggtgaatggtcacatgggaggcagctactgggctgaagagtaaggtggttgctatagggacttcagcacacatggacttgtagggccactggcaacatactcctcttggcccttcccatatctactcttctgtgattgggagactgcaaggcactgaggagtatcaaagaagcaaatattttcactttgaaagaaaactgccattttgtatttaatagcctccaggttctttcagtaatgttatttgctctgtgtgtttttgtgtgtttgttgatgtgcgtttgtgcatatgcgtgagtttcattgccggggttggggcacaattgtggactggggccatgaggccttccctggtccccactgaacccaccttagttccacatttggctgcatcttgaattatgccgactccagacttctcctccttttttgcccttggctcttgacactctaaacccctggaccatctgaatggagcagccaagttcagtcccacatttctgtactgttcctctttcacagctggaatatgtcacatgatgaagttgtatagaaacagaaccatggatggatggccaggattgccgtggtccctagctagatccccttcctatcaatcacctgatagcaacagggacagctgccaataccctgctctttactcaatggtacccagggagggagcatgggaagagggtgagctgagggctggaggagggcaacagccactgggtgagctgttcacggtcttatactattgtttgtgattaaaagtgcttcaacccacctc

SEQ ID NO: 349583 - DNA, 2069 bp, Homo sapiens
agcggggcaggtggtggccgccggccgggccccgccctggggccgcctccccgcgggttccgttggctgtggcggcagctgacgcttgtggcggcggtggcttcggggtgggcgtaagatggcgacagcagcgcagggacccctaagcttgctgtggggctggctgtggagcgagcgcttctggctacccgagaacgtgagctgggctgatctggaggggccggccgacggctacggttacccccgcggccggcacatcctctcggtgttcccgctggcggcgggcatcttcttcgtgaggctgctcttcgagcgatttattgccaaaccctgtgcactccgtattggcatcgaggacagtggtccttatcaggcccaacccaatgccatccttgaaaaggtgttcatatctattaccaagtatcctgataagaaaaggctggagggcctgtcaaagcagctggattggaatgtccgaaaaatccaatgctggtttcgccatcggaggaatcaggacaagcccccaacgcttactaaattctgtgaaagcatgtggagattcacattttatttatgtatattctgctatggaattagatttctctggtcgtcaccttggttctgggacatccgacagtgctggcataactatccatttcagcctctttcaagtgggctttatcactattatatcatggaattggccttctattggtcccttatgttttctcagtttacagacattaaaagaaaggacttcctgatcatgtttgtgcatcacttggtcaccattgggcttatctccttctcctacatcaacaatatggttcgagtgggaactctgatcatgtgtctacatgatgtctcagacttcttgctggagctcaattctttcttcctttctccaggcagccaaactggccaattatgccaagtatcagcggctctgtgacaccctttttgtgatcttcagtgctgtttttatggttacacgactaggaatctatccattctggattctgaacacgaccctctttgagagttgggagataatcgggccttatgcttcatggtggctcctcaatggcctgctgctgaccctacagcttctgcatgtcatctggtcctacctaattgcacggattgctttgaaagccttgatcaggggaaaggtatcgaaggatgatcgcagtgatgtggagagcagctcagaggaagaagatgtgaccacctgcacaaaaagtccctgtgacagtagctccagcaatggtgccaatcgggtgaatggtcacatgggaggcagctactgggctgaagagtaaggtggttgctatagggacttcagcacacatggacttgtagggccactggcaacatactcctcttggcccttcccatatctactcttctgtgattgggagactgcaaggcactgaggagtatcaaagaagcaaatattttcactttgaaagaaaactgccattttgtatttaatagcctccaggttctttcagtaatgttatttgctctgtgtgtttttgtgtgtttgttgatgtgcgtttgtgcatatgcgtgagtttcattgccggggttggggcacaattgtggactggggccatgaggccttccctggtccccactgaacccaccttagttccacatttggctgcatcttgaattatgccgactccagacttctcctccttttttgcccttggctcttgacactctaaacccctggaccatctgaatggagcagccaagttcagtcccacatttctgtactgttcctctttcacagctggaatatgtcacatgatgaagttgtatagaaacagaaccatggatggatggccaggattgccgtggtccctagctagatccccttcctatcaatcacctgatagcaacagggacagctgccaataccctgctctttactcaatggtacccagggagggagcatgggaagagggtgagctgagggctggaggagggcaacagccactgggtgagctgttcacggtcttatactattgtttgtgattaaaagtgcttcaacccacctc

SEQ ID NO: 349584 - DNA, 2325 bp, Homo sapiens
agcggggcaggtggtggccgccggccgggccccgccctggggccgcctccccgcgggttccgttggctgtggcggcagctgacgcttgtggcggcggtggcttcggggtgggcgtaagatggcgacagcagcgcagggacccctaagcttgctgtggggctggctgtggagcgagcgcttctggctacccgagaacgtgagctgggctgatctggaggggccggccgacggctacggttacccccgcggccggcacatcctctcggtgttcccgctggcggcgggcatcttcttcgtgaggctgctcttcgagcgatttattgccaaaccctgtgcactccgtattggcatcgaggacagtggtccttatcaggcccaacccaatgccatccttgaaaaggtgttcatatctattaccaagtatcctgataagaaaaggctggagggcctgtcaaagcagctggattggaatgtccgaaaaatccaatgctggtttcgccatcggaggaatcaggacaagcccccaacgcttactaaattctgtgaaagcatgtggagattcacattttatttatgtatattctgctatggaattagatttctctggtcgtcaccttggttctgggacatccgacagtgctggcataactatccatttcagcctctttcaagtgggctttatcactattatatcatggaattggccttctattggtcccttatgttttctcagtttacagacattaaaagaaaggacttcctgatcatgtttgtgcatcacttggtcaccattgggcttatctccttctcctacatcaacaatatggttcgagtgggaactctgatcatgtgtctacatgatgtctcagacttcttgctggaggcagccaaactggccaattatgccaagtatcagcggctctgtgacaccctttttgtgatcttcagtgctgtttttatggttacacgactaggaatctatccattctggattctgaacacgaccctctttgagagttgggagataatcgggccttatgcttcatggtggctcctcaatggcctgctgctgaccctacagcttctgcatgtcatctggtcctacctaattgcacggattgctttgaaagccttgatcaggggaaaggtatcgaaggatgatcgcagtgatgtggagagcagctcagaggaagaagatgtgaccacctgcacaaaaagtccctgtgacagtagctccagcaatggtgccaatcgggtgaatggtcacatgggaggcagctactgggctgaagagtaaggtggttgctatagggacttcagcacacatggacttgtagggccactggcaacatactcctcttggcccttcccatatctactcttctgtgattgggagactgcaaggcactgaggagtatcaaagaagcaaatattttcactttgaaagaaaactgccattttgtatttaatagcctccaggttctttcagtaatgttatttgctctgtgtgtttttgtgtgtttgttgatgtgcgtttgtgcatatgcgtgagtttcattgccggggttggggcacaattgtggactggggccatgaggccttccctggtccccactgaacccaccttagttccacatttggctgcatcttgaattatgccgactccagacttctcctccttttttgcccttggctcttgacactctaaacccctggaccatctgaatggagcagccaagttcagtcccacatttctgtactgttcctctttcacagctggaatatgtcacatgatgaagttgtatagaaacagaaccatggatggatggccaggattgccgtggtccctagctagatccccttcctatcaatcacctgatagcaacagggacagctgccaataccctgctctttactcaatggtacccagggagggagcatgggaagagggtgagctgagggctggaggagggcaacagccactgggtgagctgttcacggtcttatactattgtttgtgattaaaagtgcttcaacccacctctactgtctcaacctcttcagtgactctatccgcagtttcctgaatccataagctaattaagagcttttccaggtctgattcagaaggccctggacaccaaatttttcctttctgtgcatggtaggaagagtcagccagggtgcttacattttagagctttatgttttttaagaaaaagaagaatcacttgaacctgggaggcagaggttgcagcgagccaagatcgtgccactgcactccagcctgggcgacagaccgagactctgtctaaaaaaaaaaaa

SEQ ID NO: 349585 - DNA, 2101 bp, Homo sapiens
agcggggcaggtggtggccgccggccgggccccgccctggggccgcctccccgcgggttccgttggctgtggcggcagctgacgcttgtggcggcggtggcttcggggtgggcgtaagatggcgacagcagcgcagggacccctaagcttgctgtggggctggctgtggagcgagcgcttctggctacccgagaacgtgagctgggctgatctggaggggccggccgacggctacggttacccccgcggccggcacatcctctcggtgttcccgctggcggcgggcatcttcttcgtgaggctgctcttcgagcgtagagacggggtttcactatgttgaccaggctggtctccaactcctgaccttgtgatcctcctgcctcagcctcccaaagtgctgggattacaggcgtgagccaccacgcccggcttttttattctttttaaaaatttaaatccttgggactctgcttgatataacctcttcttttagatgatgaaaccaagacccaagagatttattgccaaaccctgtgcactccgtattggcatcgaggacagtggtccttatcaggcccaacccaatgccatccttgaaaaggtgttcatatctattaccaagtatcctgataagaaaaggctggagggcctgtcaaagcagctggattggaatgtccgaaaaatccaatgctggtttcgccatcggaggaatcaggacaagcccccaacgcttactaaattctgtgaaagcatgtggagattcacattttatttatgtatattctgctatggaattagatttctctggtcggacttcctgatcatgtttgtgcatcacttggtcaccattgggcttatctccttctcctacatcaacaatatggttcgagtgggaactctgatcatgtgtctacatgatgtctcagacttcttgctggaggcagccaaactggccaattatgccaagtatcagcggctctgtgacaccctttttgtgatcttcagtgctgtttttatggttacacgactaggaatctatccattctggattctgaacacgaccctctttgagagttgggagataatcgggccttatgcttcatggtggctcctcaatggcctgctgctgaccctacagcttctgcatgtcatctggtcctacctaattgcacggattgctttgaaagccttgatcaggggaaaggtatcgaaggatgatcgcagtgatgtggagagcagctcagaggaagaagatgtgaccacctgcacaaaaagtccctgtgacagtagctccagcaatggtgccaatcgggtgaatggtcacatgggaggcagctactgggctgaagagtaaggtggttgctatagggacttcagcacacatggacttgtagggccactggcaacatactcctcttggcccttcccatatctactcttctgtgattgggagactgcaaggcactgaggagtatcaaagaagcaaatattttcactttgaaagaaaactgccattttgtatttaatagcctccaggttctttcagtaatgttatttgctctgtgtgtttttgtgtgtttgttgatgtgcgtttgtgcatatgcgtgagtttcattgccggggttggggcacaattgtggactggggccatgaggccttccctggtccccactgaacccaccttagttccacatttggctgcatcttgaattatgccgactccagacttctcctccttttttgcccttggctcttgacactctaaacccctggaccatctgaatggagcagccaagttcagtcccacatttctgtactgttcctctttcacagctggaatatgtcacatgatgaagttgtatagaaacagaaccatggatggatggccaggattgccgtggtccctagctagatccccttcctatcaatcacctgatagcaacagggacagctgccaataccctgctctttactcaatggtacccagggagggagcatgggaagagggtgagctgagggctggaggagggcaacagccactgggtgagctgttcacggtcttatactattgtttgtgattaaaagtgcttcaacccacctc

SEQ ID NO: 349586 - DNA, 1449 bp, Homo sapiens
tgaggtgactctgaggatcccttcgggtttgtgcatcgacagtgctggcataactatccatttcagcctctttcaagtgggctttatcactattatatcatggaattggccttctattggtcccttatgttttctcagtttacagacattaaaagaaaggacttcctgatcatgtttgtgcatcacttggtcaccattgggcttatctccttctcctacatcaacaatatggttcgagtgggaactctgatcatgtgtctacatgatgtctcagacttcttgctggaggcagccaaactggccaattatgccaagtatcagcggctctgtgacaccctttttgtgatcttcagtgctgtttttatggttacacgactaggaatctatccattctggattctgaacacgaccctctttgagagttgggagataatcgggccttatgcttcatggtggctcctcaatggcctgctgctgaccctacagcttctgcatgtcatctggtcctacctaattgcacggattgctttgaaagccttgatcaggggaaaggtatcgaaggatgatcgcagtgatgtggagagcagctcagaggaagaagatgtgaccacctgcacaaaaagtccctgtgacagtagctccagcaatggtgccaatcgggtgaatggtcacatgggaggcagctactgggctgaagagtaaggtggttgctatagggacttcagcacacatggacttgtagggccactggcaacatactcctcttggcccttcccatatctactcttctgtgattgggagactgcaaggcactgaggagtatcaaagaagcaaatattttcactttgaaagaaaactgccattttgtatttaatagcctccaggttctttcagtaatgttatttgctctgtgtgtttttgtgtgtttgttgatgtgcgtttgtgcatatgcgtgagtttcattgccggggttggggcacaattgtggactggggccatgaggccttccctggtccccactgaacccaccttagttccacatttggctgcatcttgaattatgccgactccagacttctcctccttttttgcccttggctcttgacactctaaacccctggaccatctgaatggagcagccaagttcagtcccacatttctgtactgttcctctttcacagctggaatatgtcacatgatgaagttgtatagaaacagaaccatggatggatggccaggattgccgtggtccctagctagatccccttcctatcaatcacctgatagcaacagggacagctgccaataccctgctctttactcaatggtacccagggagggagcatgggaagagggtgagctgagggctggaggagggcaacagccactgggtgagctgttcacggtcttatactattgtttgtgattaaaagtgcttcaacccacctc

SEQ ID NO: 349587 - DNA, 2284 bp, Homo sapiens
agcggggcaggtggtggccgccggccgggccccgccctggggccgcctccccgcgggttccgttggctgtggcggcagctgacgcttgtggcggcggtggcttcggggtgggcgtaagatggcgacagcagcgcagggacccctaagcttgctgtggggctggctgtggagcgagcgcttctggctacccgagaacgtgagctgggctgatctggaggggccggccgacggctacggttacccccgcggccggcacatcctctcggtgttcccgctggcggcgggcatcttcttcgtgaggctgctcttcgagcgatttattgccaaaccctgtgcactccgtattggcatcgaggacagtggtccttatcaggcccaacccaatgccatccttgaaaaggtgttcatatctattaccaagtatcctgataagaaaaggctggagggcctgtcaaagcagctggattggaatgtccgaaaaatccaatgctggtttcgccatcggaggaatcaggacaagcccccaacgcttactaaattctgtgaaagcatgtggagattcacattttatttatgtatattctgctatggaattagatttctctggtcgtcaccttggttctgggacatccgacagtgctggcataactatccatttcagcctctttcaagtgggctttatcactattatatcatggaattggccttctattggtcccttatgttttctcagtttacagacattaaaagaaaggacttcctgatcatgtttgtgcatcacttggtcaccattgggcttatctccttctcctacatcaacaatatggttcgagtgggaactctgatcatgtgtctacatgatgtctcagacttcttgctggaggcagccaaactggccaattatgccaagtatcagcggctctgtgacaccctttttgtgatcttcagtgctgtttttatggttacacgactaggaatctatccattctggattctgaacacgaccctctttgagagttgggagataatcgggccttatgcttcatggtggctcctcaatggcctgctgctgaccctacagcttctgcatgtcatctggtcctacctaattgcacggattgctttgaaagccttgatcaggggaaaggtatcgaaggatgatcgcagtgatgtggagagcagctcagaggaagaagatgtgaccacctgcacaaaaagtccctgtgacagtagctccagcaatggtgccaatcgggtgaatggtcacatgggaggcagctactgggctgaagagtaaggtggttgctatagggacttcagcacacatggacttgtagggccactggcaacatactcctcttggcccttcccatatctactcttctgtgattgggagactgcaaggcactgaggagtatcaaagaagcaaatattttcactttgaaagaaaactgccattttgtatttaatagcctccaggttctttcagtaatgttatttgctctgtgtgtttttgtgtgtttgttgatgtgcgtttgtgcatatgcgtgagtttcattgccggggttggggcacaattgtggactggggccatgaggccttccctggtccccactgaacccaccttagttccacatttggctgcatcttgaattatgccgactccagacttctcctccttttttgcccttggctcttgacactctaaacccctggaccatctgaatggagcagccaagttcagtcccacatttctgtactgttcctctttcacagctggaatatgtcacatgatgaagttgtatagaaacagaaccatggatggatggccaggattgccgtggtccctagctagatccccttcctatcaatcacctgatagcaacagggacagctgccaataccctgctctttactcaatggtacccagggagggagcatgggaagagggtgagctgagggctggaggagggcaacagccactgggtgagctgttcacggtcttatactattgtttgtgattaaaagtgcttcaacccacctcaaaaaaaaaaaaaaaaaaaaaaaaaaaaaacaaaaaaaaaaaaaaaaaaaaaaaaaaaagaaacaaagagcacaacaacaacacacaaacaacccacagcgcacacgcaccaaagggccccacaagtacagaatgatcaagcgccccacccttgctccgcccctacccacacccaattacacacgaccaacaccgccacactcacccctcgggtccacgaccctacctttctggcagcgc

SEQ ID NO: 349588 - DNA, 1394 bp, Homo sapiens
tgtcctatcctatatgtgcctgaggagctcagtcattcataggattagagtcccactgctgtcctaatttcgtgaaactctggatatttgaagtgattaataatgtgacttaatccatcagttcctaagatttatatatctttctctgtccctaaggatagaaaacacaacaggctcctccctttctttattttcttactgtggatgacggtccctggaacttcagctgataaaagggctggtaggaaaacacacagggctctgcatccccaggactcagcttcatccctgtctgctgagctttgactctagaatctgactattggcctccctcttctaggattctgaacacgaccctctttgagagttgggagataatcgggccttatgcttcatggtggctcctcaatggcctgctgctgaccctacagcttctgcatgtcatctggtcctacctaattgcacggattgctttgaaagccttgatcaggggaaaggtatcgaaggatgatcgcagtgatgtggagagcagctcagaggaagaagatgtgaccacctgcacaaaaagtccctgtgacagtagctccagcaatggtgccaatcgggtgaatggtcacatgggaggcagctactgggctgaagagtaaggtggttgctatagggacttcagcacacatggacttgtagggccactggcaacatactcctcttggcccttcccatatctactcttctgtgattgggagactgcaaggcactgaggagtatcaaagaagcaaatattttcactttgaaagaaaactgccattttgtatttaatagcctccaggttctttcagtaatgttatttgctctgtgtgtttttgtgtgtttgttgatgtgcgtttgtgcatatgcgtgagtttcattgccggggttggggcacaattgtggactggggccatgaggccttccctggtccccactgaacccaccttagttccacatttggctgcatcttgaattatgccgactccagacttctcctccttttttgcccttggctcttgacactctaaacccctggaccatctgaatggagcagccaagttcagtcccacatttctgtactgttcctctttcacagctggaatatgtcacatgatgaagttgtatagaaacagaaccatggatggatggccaggattgccgtggtccctagctagatccccttcctatcaatcacctgatagcaacagggacagctgccaataccctgctctttactcaatggtacccagggagggagcatgggaagagggtgagctgagggctggaggagggcaacagccactgggtgagctgttcacggtcttatactattgtttgtgattaaaagtgcttcaacccacctc

SEQ ID NO: 349589 - DNA, 1899 bp, Homo sapiens
agtagctgggattacaggcgcatgccaccaggcctggctaatttttgtattcttagtagaaacggggtttcactatgttggccaggctggtctctaactcccgaccttgtgatctgcccaccttggcctcccgaagtgctgggattacaggcgtgagccaccgcacctggcctgcctgttttaccttttaagatgtgacttagacgcaagaggaaagttctaccttcttcctgtcccttaggaatggcttttgttaaaggatgatagggttaagagttttttaagagatggcctcaaccatttcctaccccttacctacctgcttcagtggatttcatatttttctttttgacatggggcccttttcaaaggaaatcatatgcagaaccatataaactgtataaaagcagattgttaagttgcctagaagtggtgtgtggtagttcacaagccaccacaaggtgaccatgctgtgatattcaagatatggtttatataaggaactaaatacccacctcaccccactagtgtatgaggcaagtgtcctaagtgaatgggtatgtagtgtttcaaatacccatcttatgccaagagcgaaagaaaggtgccacttaatgataaactcataattgaactttgcaagttttgaagcagtcagactgtagtcaaagggctagggatttcagcctaaaggaatacagaatcccaagtgggaggggctctgcttgagcaggtactgatactaggaccaagtgatggaatgtggcctagatattgatgatctcctgcatcattattccttatagctgccattggctcagaacttgctcagtgtgcctgtgcatcttgctgtagctactggacatctctgttctctcctgcttttctttcctgactaggtgacctgtccaggaaggattagaccctgtactttccactctttcctcacctccttccttttttctatgcctggcgggagctggacagtttcatctcttgcatgtatcgaaggatgatcgcagtgatgtggagagcagctcagaggaagaagatgtgaccacctgcacaaaaagtccctgtgacagtagctccagcaatggtgccaatcgggtgaatggtcacatgggaggcagctactgggctgaagagtaaggtggttgctatagggacttcagcacacatggacttgtagggccactggcaacatactcctcttggcccttcccatatctactcttctgtgattgggagactgcaaggcactgaggagtatcaaagaagcaaatattttcactttgaaagaaaactgccattttgtatttaatagcctccaggttctttcagtaatgttatttgctctgtgtgtttttgtgtgtttgttgatgtgcgtttgtgcatatgcgtgagtttcattgccggggttggggcacaattgtggactggggccatgaggccttccctggtccccactgaacccaccttagttccacatttggctgcatcttgaattatgccgactccagacttctcctccttttttgcccttggctcttgacactctaaacccctggaccatctgaatggagcagccaagttcagtcccacatttctgtactgttcctctttcacagctggaatatgtcacatgatgaagttgtatagaaacagaaccatggatggatggccaggattgccgtggtccctagctagatccccttcctatcaatcacctgatagcaacagggacagctgccaataccctgctctttactcaatggtacccagggagggagcatgggaagagggtgagctgagggctggaggagggcaacagccactgggtgagctgttcacggtcttatactattgtttgtgattaaaagtgcttcaacccacctc

SEQ ID NO: 349590 - DNA, 1102 bp, Homo sapiens
agcggggcaggtggtggccgccggccgggccccgccctggggccgcctccccgcgggttccgttggctgtggcggcagctgacgcttgtggcggcggtggcttcggggtgggcgtaagatggcgacagcagcgcagggacccctaagcttgctgtggggctggctgtggagcgagcgcttctggctacccgagaacgtgagctgggtatcgaaggatgatcgcagtgatgtggagagcagctcagaggaagaagatgtgaccacctgcacaaaaagtccctgtgacagtagctccagcaatggtgccaatcgggtgaatggtcacatgggaggcagctactgggctgaagagtaaggtggttgctatagggacttcagcacacatggacttgtagggccactggcaacatactcctcttggcccttcccatatctactcttctgtgattgggagactgcaaggcactgaggagtatcaaagaagcaaatattttcactttgaaagaaaactgccattttgtatttaatagcctccaggttctttcagtaatgttatttgctctgtgtgtttttgtgtgtttgttgatgtgcgtttgtgcatatgcgtgagtttcattgccggggttggggcacaattgtggactggggccatgaggccttccctggtccccactgaacccaccttagttccacatttggctgcatcttgaattatgccgactccagacttctcctccttttttgcccttggctcttgacactctaaacccctggaccatctgaatggagcagccaagttcagtcccacatttctgtactgttcctctttcacagctggaatatgtcacatgatgaagttgtatagaaacagaaccatggatggatggccaggattgccgtggtccctagctagatccccttcctatcaatcacctgatagcaacagggacagctgccaataccctgctctttactcaatggtacccagggagggagcatgggaagagggtgagctgagggctggaggagggcaacagccactgggtgagctgttcacggtcttatactattgtttgtgattaaaagtgcttcaacccacctc

SEQ ID NO: 349591 - DNA, 928 bp, Homo sapiens
acttttctgtctttggtctcatcccacccaggtatcgaaggatgatcgcagtgatgtggagagcagctcagaggaagaagatgtgaccacctgcacaaaaagtccctgtgacagtagctccagcaatggtgccaatcgggtgaatggtcacatgggaggcagctactgggctgaagagtaaggtggttgctatagggacttcagcacacatggacttgtagggccactggcaacatactcctcttggcccttcccatatctactcttctgtgattgggagactgcaaggcactgaggagtatcaaagaagcaaatattttcactttgaaagaaaactgccattttgtatttaatagcctccaggttctttcagtaatgttatttgctctgtgtgtttttgtgtgtttgttgatgtgcgtttgtgcatatgcgtgagtttcattgccggggttggggcacaattgtggactggggccatgaggccttccctggtccccactgaacccaccttagttccacatttggctgcatcttgaattatgccgactccagacttctcctccttttttgcccttggctcttgacactctaaacccctggaccatctgaatggagcagccaagttcagtcccacatttctgtactgttcctctttcacagctggaatatgtcacatgatgaagttgtatagaaacagaaccatggatggatggccaggattgccgtggtccctagctagatccccttcctatcaatcacctgatagcaacagggacagctgccaataccctgctctttactcaatggtacccagggagggagcatgggaagagggtgagctgagggctggaggagggcaacagccactgggtgagctgttcacggtcttatactattgtttgtgattaaaagtgcttcaacccacctc

SEQ ID NO: 349592 - DNA, 945 bp, Homo sapiens
tctttacacagtgaaaatattcgcttcttttatactcctcagtgccttgcagtctcccaatcacagaagagtagatatgggaagggccaagaggagtatgttgccagtggccctacaagtccctgtgacagtagctccagcaatggtgccaatcgggtgaatggtcacatgggaggcagctactgggctgaagagtaaggtggttgctatagggacttcagcacacatggacttgtagggccactggcaacatactcctcttggcccttcccatatctactcttctgtgattgggagactgcaaggcactgaggagtatcaaagaagcaaatattttcactttgaaagaaaactgccattttgtatttaatagcctccaggttctttcagtaatgttatttgctctgtgtgtttttgtgtgtttgttgatgtgcgtttgtgcatatgcgtgagtttcattgccggggttggggcacaattgtggactggggccatgaggccttccctggtccccactgaacccaccttagttccacatttggctgcatcttgaattatgccgactccagacttctcctccttttttgcccttggctcttgacactctaaacccctggaccatctgaatggagcagccaagttcagtcccacatttctgtactgttcctctttcacagctggaatatgtcacatgatgaagttgtatagaaacagaaccatggatggatggccaggattgccgtggtccctagctagatccccttcctatcaatcacctgatagcaacagggacagctgccaataccctgctctttactcaatggtacccagggagggagcatgggaagagggtgagctgagggctggaggagggcaacagccactgggtgagctgttcacggtcttatactattgtttgtgattaaaagtgcttcaacccacctc

SEQ ID NO: 349593 - DNA, 820 bp, Homo sapiens
taccctctgtaagcacggggttggcataattcaagatgcagtcatgtggaactaaggtgggttcagtggggaccagtgaaggcctcatggccccagtccacatggacttgtagggccactggcaacatactcctcttggcccttcccatatctactcttctgtgattgggagactgcaaggcactgaggagtatcaaagaagcaaatattttcactttgaaagaaaactgccattttgtatttaatagcctccaggttctttcagtaatgttatttgctctgtgtgtttttgtgtgtttgttgatgtgcgtttgtgcatatgcgtgagtttcattgccggggttggggcacaattgtggactggggccatgaggccttccctggtccccactgaacccaccttagttccacatttggctgcatcttgaattatgccgactccagacttctcctccttttttgcccttggctcttgacactctaaacccctggaccatctgaatggagcagccaagttcagtcccacatttctgtactgttcctctttcacagctggaatatgtcacatgatgaagttgtatagaaacagaaccatggatggatggccaggattgccgtggtccctagctagatccccttcctatcaatcacctgatagcaacagggacagctgccaataccctgctctttactcaatggtacccagggagggagcatgggaagagggtgagctgagggctggaggagggcaacagccactgggtgagctgttcacggtcttatactattgtttgtgattaaaagtgcttcaacccacctc

SEQ ID NO: 349594 - DNA, 1299 bp, Homo sapiens
agcggggcaggtggtggccgccggccgggccccgccctggggccgcctccccgcgggttccgttggctgtggcggcagctgacgcttgtggcggcggtggcttcggggtgggcgtaagatggcgacagcagcgcagggacccctaagcttgctgtggggctggctgtggagcgagcgcttctggctacccgagaacgtgagctgggctgatctggaggggccggccgacggctacggttacccccgcggccggcacatcctctcggtgttcccgctggcggcgggcatcttcttcgtgaggctgctcttcgagcgatttattgccaaaccctgtgcactccgtattggcatcgaggacagtggtccttatcaggcccaacccaatgccatccttgaaaaggtgttcatatctattaccaagtatcctgataagaaaaggctggagggcctgtcaaagcagctggattggaatgtccgaaaaatccaatgctggtttcgccatcggaggaatcaggacaagcccccaacgcttactaaattctgtgaaagcatgtggagattcacattttatttatgtatattctgctatggaattagatttctctggtcgtcaccttggttctgggacatccgacagtgctggcataactatccatttcagcctctttcaagtgggctttatcactattatatcatggaattggccttctattggtcccttatgttttctcagtttacagacattaaaagaaaggacttcctgatcatgtttgtgcatcacttggtcaccattgggcttatctccttctcctacatcaacaatatggttcgagtgggaactctgatcatgtgtctacatgatgtctcagacttcttgctggaggcagccaaactggccaattatgccaagtatcagcggctctgtgacaccctttttgtgatcttcagtgctgtttttatggttacacgactaggaatctatccattctggattctgaacacgaccctctttgagagttgggagataatcgggccttatgcttcatggtggctcctcaatggcctgctgctgaccctacagcttctgcatgtcatctggtcctacctaattgcacggattgctttgaaagccttgatcaggggaaaggtgaggatgaaagatggcttctttcttttgggtatggaagatagggattactcaacagacgttctctctccatcaaacctggtgagccccatctactcaagcaggccaagcaaaaagcctagggctccaagcctgattagggtaccgaccta

SEQ ID NO: 349595 - DNA, 1102 bp, Homo sapiens
agcggggcaggtggtggccgccggccgggccccgccctggggccgcctccccgcgggttccgttggctgtggcggcagctgacgcttgtggcggcggtggcttcggggtgggcgtaagatggcgacagcagcgcagggacccctaagcttgctgtggggctggctgtggagcgagcgcttctggctacccgagaacgtgagctgggctgatctggaggggccggccgacggctacggttacccccgcggccggcacatcctctcggtgttcccgctggcggcgggcatcttcttcgtgaggctgctcttcgagcgtagagacggggtttcactatgttgaccaggctggtctccaactcctgaccttgtgatcctcctgcctcagcctcccaaagtgctgggattacaggcgtgagccaccacgcccggcttttttattctttttaaaaatttaaatccttgggactctgcttgatataacctcttcttttagatgatgaaaccaagacccaagaggtaagtgattttaccaagtttatatgccttattagtagatctgagactacgatagagtgctaataggtgatttccttctcacctttcctagcttcctgatttctttcttctcgactcctgaaagatctaagtatttccataatctcttggttaggcaggaaggtatccaagatccaggatatctatatgcaggaagagcttagtctcagttctacttttccctccaattaagatcttggtcttttgatgtaaggaaactgccatttattaatcacctcctttgtgccagggtctttcatatacattatctcactgaattacttacaagattcttatgaagtagattagtggttctcacattttaatggacatgtgaatcacctggggatcttgttaaaatgcagattctgattttgcaagtctgagatgggctcaagattatgcatctctaaaaagcttccagccagcacagtggcccacgcctgtaatcccagcattttgggagactgaggctggtgaacattgtcaccctaaagaagtgataaatgttgaaagtgattgttccccgctgggatcctctggtcta

SEQ ID NO: 349596 - DNA, 934 bp, Homo sapiens
agcggggcaggtggtggccgccggccgggccccgccctggggccgcctccccgcgggttccgttggctgtggcggcagctgacgcttgtggcggcggtggcttcggggtgggcgtaagatggcgacagcagcgcagggacccctaagcttgctgtggggctggctgtggagcgagcgcttctggctacccgagaacgtgagctgggctgatctggaggggccggccgacggctacggttacccccgcggccggcacatcctctcggtgttcccgctggcggcgggcatcttcttcgtgaggctgctcttcgagcgtagagacggggtttcactatgttgaccaggctggtctccaactcctgaccttgtgatcctcctgcctcagcctcccaaagtgctgggattacaggcgtgagccaccacgcccggcttttttattctttttaaaaatttaaatccttgggactctgcttgatataacctcttcttttagatgatgaaaccaagacccaagaggtaagtgattttaccaagtttatatgccttattagtagatctgagactacgatagagtgctaataggtgatttccttctcacctttcctagcttcctgatttctttcttctcgactcctgaaagatctaagtatttccataatctcttggttaggcaggaaggtatccaagatccaggatatctatatgcaggaagagcttagtctcagttctacttttccctccaattaagatcttggtcttttgatgtaaggaaactgccatttattaatcacctcctttgtgccagggtctttcatatacattatctcactgaattacttacaagattcttatgaagtagattagtggttctcacattttaatggacatgtgaatcacctggggatcttgttaaaccagtgcggggtcctctaga

SEQ ID NO: 349597 - DNA, 664 bp, Homo sapiens
catgatgaaccaagacccaagaggtaagtgatattattagtagatctgagactacgatagagtgctatatctttctctctttcttctcgactcctgaaagatctaagtatttccataatctcttggttaggcaggaaggtatccaagatccaggatatctatatgcaggaagagcttagtctcagttctacttttccctccaattaagatcttggtcttttgatgtaaggaaactgccatttattaatcacctcctttgtgccagggtctttcatatacattatctcactgaattacttacaagattcttatgaagtagattagtggttctcacattttaatggacatgtgaatcacctggggatcttgttaaaatgcagattctgattttgcaagtctgagatgggctcaagattatgcatctctaaaaagcttccagccagcacagtggcccacgcctgtaatcccagcattttgggagactgaggctggtgaacattgtcaccctaaagaagtgataaatgttgaaagtgatggatatggtaattaccccagtttcatcattatactatgtatacatgcattgaaacatcacattgtaccccataaatatgtacaattattatgtgtcaactataaataaaatttttttaaaaagaattgg

SEQ ID NO: 349598 - DNA, 973 bp, Homo sapiens
agcggggcaggtggtggccgccggccgggccccgccctggggccgcctccccgcgggttccgttggctgtggcggcagctgacgcttgtggcggcggtggcttcggggtgggcgtaagatggcgacagcagcgcagggacccctaagcttgctgtggggctggctgtggagcgagcgcttctggctacccgagaacgtgagctgggctgatctggaggggccggccgacggctacggttacccccgcggccggcacatcctctcggtgttcccgctggcggcgggcatcttcttcgtgaggctgctcttcgagcgtagagacggggtttcactatgttgaccaggctggtctccaactcctgaccttgtgatcctcctgcctcagcctcccaaagtgctgggattacaggcgtgagccaccacgcccggcttttttattctttttaaaaatttaaatccttgggactctgcttgatataacctcttcttttagatgatgaaaccaagacccaagaggtaagtgattttaccaagtttatatgccttattagtagatctgagactacgatagagtgctaataggtgatttccttctcacctttcctagcttcctgatttctttcttctcgactcctgaaagatctaagtatttccataatctcttggttaggcaggaaggtatccaagatccaggatatctatatgcaggaagagcttagtctcagttctacttttccctccaattaagatcttggtcttttgatgtaaggaaactgccatttattaatcacctcctttgtgccagggtctttcatatacattatctcactgaattacttacaagattcttatgaagtagattagtggttctcacattttaatggacatgtgaatcacctggggatcttgttaaagttgcgtcagatatgcatctctaataagcgtccagccagcacgtctcgcattttggggg

SEQ ID NO: 349599 - DNA, 942 bp, Homo sapiens
agcggggcaggtggtggccgccggccgggccccgccctggggccgcctccccgcgggttccgttggctgtggcggcagctgacgcttgtggcggcggtggcttcggggtgggcgtaagatggcgacagcagcgcagggacccctaagcttgctgtggggctggctgtggagcgagcgcttctggctacccgagaacgtgagctgggctgatctggaggggccggccgacggctacggttacccccgcggccggcacatcctctcggtgttcccgctggcggcgggcatcttcttcgtgaggctgctcttcgagcgtagagacggggtttcactatgttgaccaggctggtctccaactcctgaccttgtgatcctcctgcctcagcctcccaaagtgctgggattacaggcgtgagccaccacgcccggcttttttattctttttaaaaatttaaatccttgggactctgcttgatataacctcttcttttagatgatgaaaccaagacccaagagatttattgccaaaccctgtgcactccgtattggcatcgaggacagtggtccttatcaggcccaacccaatgccatccttgaaaaggtgttcatatctattaccaaggtaagtgggcaaagaaacagagaggaatattcacataaggcgttgctccatggggcaggggaggatagagagcacgtacctctaagggtaaggataggatgggatggtccttcatatttgagtagtccatgtagctatatggagagctttatcccctcagggaaaacctttgggccctacgtatgtcaagtttacgtacgtagtaggtttgagttttaggcccagcagccacccttacccctctttccccagacacataccatatctggtttttgtttttccttgttccagtttctgtcactgcctagttgtgtgatcga

SEQ ID NO: 349600 - DNA, 649 bp, Homo sapiens
tgtcctatcctatatgtgcctgaggagctcagtcattcataggattagagtcccactgctgtcctaatttcgtgaaactctggatatttgaagtgattaataatgtgacttaatccatcagttcctaagatttatatatctttctctgtccctaaggatagaaaacacaacaggctcctccctttctttattttcttactgtggatgacggtccctggaacttcagctgataaaagggctggtaggaaaacacacagggctctgcatccccaggactcagcttcatccctgtctgctgagctttgactctagaatctgactattggcctccctcttctaggattctgaacacgaccctctttgagagttgggagataatcgggccttatgcttcatggtggctcctcaatggcctgctgctgaccctacagcttctgcatgtcatctggtcctacctaattgcacggattgctttgaaagccttgatcaggggaaaggtgaggatgaaagatggcttctttcttttgggtatggaagatagggattactcaacagacgttctctctccatcaaacctggtgagccccatctactcaagcaggccaagcaaaaagcctagggctccaagcctgattagggtaccgaccta

SEQ ID NO: 349601 - DNA, 624 bp, Homo sapiens
caaaaggatatgtataggtgagcagtacaggtccttgatatgtaagataaaatttcttactaaaaatgactttgggataaaacttggaaagataaacatcacttgagccacttatggctatcataccttgtcgctcagctagtcaatgggattgaaggaggggtatgaggagacgggtgttctgactctggttatacattcacagtatcctgataagaaaaggctggagggcctgtcaaagcagctggattggaatgtccgaaaaatccaatgctggtttcgccatcggaggaatcaggacaagcccccaacgcttactaaattctgtgaaagcatgtaagtacgcaaggagggagggagggaataaggaagacggtgggatacaactggactgaagtttctgttttgaacatcacttctgttgttaggacaacagttaatggatatagagaactaactcagcctattataggtaggaaagaagggaactggaacactgattcccttaagtttcttgggcatgttgccactaagctaggtgtggttctattttgttcccttttcctaaatagattgggagtaaatccttataactgtacttatgtaagtagatgtactaacaca

SEQ ID NO: 349602 - DNA, 535 bp, Homo sapiens
tttgagacggaatctcagtctgtcgcccaggctggagtgcagtggcgcgatctcagctcactgcaacctctacctcccaggtttgagcaattctcctgcctcagcctcccgagtagctgggattacaggcacatgccaccaagcccggcttatttttgtatttttagtagagacggggcttccccatgttggccaggctggtctcgaactcctgacctcaggtgatccgaccaccttgccctcccaaagtgctgggattacaggcatgagccacctcgcccggccaatggaaactattctatatggggtggggtaagattcttagagaataatgcaggacgttgggttggctggtgtttctagggcccagcttttacctccctcttctatttccattccttcctaggacttcctgatcatgtttgtgcatcacttggtcaccattgggcttatctccttctcctacatcaacaatatggttcgagtgggaactctgatcatgtgtctacatgatgtctcagacttcttgctggag

SEQ ID NO: 349603 - DNA, 2029 bp, Homo sapiens
gaattccggcagcaaagtgcaaacagagccggctctgggtgaaagctttagttatgaaaaataagaaaaaaaaaatccctaagcatttcttaacactagttttaaagaaaaccccctctccaaaggtatgtttctccttcaactttcttgactttgccaggctgtcaggatgcaagctacctactcttttctggatggatcgggacaagtttttaaacaaagactgtgtcctctccacaagcccttcccaccaccaccacccagccccccgccgccataattacaggggctcttcgagcgatttattgccaaaccctgtgcactccgtattggcatcgaggacagtggtccttatcaggcccaacccaatgccatccttgaaaaggtgttcatatctattaccaagtatcctgataagaaaaggctggagggcctgtcaaagcagctggattggaatgtccgaaaaatccaatgctggtttcgccatcggaggaatcaggacaagcccccaacgcttactaaattctgtgaaagcatgtggagattcacattttatttatgtatattctgctatggaattagatttctctggtcgtcaccttggttctgggacatccgacagtgctggcataactatccatttcagcctctttcaagtgggctttatcactattatatcatggaattggccttctattggtcccttatgttttctcagtttacagacattaaaagaaaggacttcctgatcatgtttgtgcatcacttggtcaccattgggcttatctccttctcctacatcaacaatatggttcgagtgggaactctgatcatgtgtctacatgatgtctcagacttcttgctggaggcagccaaactggccaattatgccaagtatcagcggctctgtgacaccctttttgtgatcttcagtgctgtttttatggttacacgactaggaatctatccattctggattctgaacacgaccctctttgagagttgggagataatcgggccttatgcttcatggtggctcctcaatggcctgctgctgaccctacagcttctgcatgtcatctggtcctacctaattgcacggattgctttgaaagccttgatcaggggaaaggtatcgaaggatgatcgcagtgatgtggagagcagctcagaggaagaagatgtgaccacctgcacaaaaagtccctgtgacagtagctccagcaatggtgccaatcgggtgaatggtcacatgggaggcagctactgggctgaagagtaaggtggttgctatagggacttcagcacacatggacttgtagggccactggcaacatactcctcttggcccttcccatatctactcttctgtgattgggagactgcaaggcactgaggagtatcaaagaagcaaatattttcactttgaaagaaaactgccattttgtatttaatagcctccaggttctttcagtaatgttatttgctctgtgtgtttttgtgtgtttgttgatgtgcgtttgtgcatatgcgtgagtttcattgccggggttggggcacaattgtggactggggccatgaggccttccctggtccccactgaacccaccttagttccacatttggctgcatcttgaattatgccgactccagacttctcctccttttttgcccttggctcttgacactctaaacccctggaccatctgaatggagcagccaagttcagtcccacatttctgtactgttcctctttcacagctggaatatgtcacatgatgaagttgtatagaaacagaaccatggatggatggccaggattgccgtggtccctagctagatccccttcctatcaatcacctgatagcaacagggacagctgccaataccctgctctttactcaatggtacccagggagggagcatgggaagagggtgagctgagggctggaggagggcaacagccactgggtgagctgttcacggtcttatactattgtttgtgattaaaagtgcttcaacccacctc

SEQ ID NO: 349604 - DNA, 2245 bp, Homo sapiens
agcggggcaggtggtggccgccggccgggccccgccctggggccgcctccccgcgggttccgttggctgtggcggcagctgacgcttgtggcggcggtggcttcggggtgggcgtaagatggcgacagcagcgcagggacccctaagcttgctgtggggctggctgtggagcgagcgcttctggctacccgagaacgtgagctgggctgatctggaggggccggccgacggctacggttacccccgcggccggcacatcctctcggtgttcccgctggcggcgggcatcttcttcgtgaggctgctcttcgagcgtagagacggggtttcactatgttgaccaggctggtctccaactcctgaccttgtgatcctcctgcctcagcctcccaaagtgctgggattacaggcgtgagccaccacgcccggcttttttattctttttaaaaatttaaatccttgggactctgcttgatataacctcttcttttagatgatgaaaccaagacccaagagatttattgccaaaccctgtgcactccgtattggcatcgaggacagtggtccttatcaggcccaacccaatgccatccttgaaaaggtgttcatatctattaccaagtatcctgataagaaaaggctggagggcctgtcaaagcagctggattggaatgtccgaaaaatccaatgctggtttcgccatcggaggaatcaggacaagcccccaacgcttactaaattctgtgaaagcatgtggagattcacattttatttatgtatattctgctatggaattagatttctctggtcgtcaccttggttctgggacatccgacagtgctggcataactatccatttcagcctctttcaagtgggctttatcactattatatcatggaattggccttctattggtcccttatgttttctcagtttacagacattaaaagaaaggacttcctgatcatgtttgtgcatcacttggtcaccattgggcttatctccttctcctacatcaacaatatggttcgagtgggaactctgatcatgtgtctacatgatgtctcagacttcttgctggaggcagccaaactggccaattatgccaagtatcagcggctctgtgacaccctttttgtgatcttcagtgctgtttttatggttacacgactaggaatctatccattctggattctgaacacgaccctctttgagagttgggagataatcgggccttatgcttcatggtggctcctcaatggcctgctgctgaccctacagcttctgcatgtcatctggtcctacctaattgcacggattgctttgaaagccttgatcaggggaaaggtatcgaaggatgatcgcagtgatgtggagagcagctcagaggaagaagatgtgaccacctgcacaaaaagtccctgtgacagtagctccagcaatggtgccaatcgggtgaatggtcacatgggaggcagctactgggctgaagagtaaggtggttgctatagggacttcagcacacatggacttgtagggccactggcaacatactcctcttggcccttcccatatctactcttctgtgattgggagactgcaaggcactgaggagtatcaaagaagcaaatattttcactttgaaagaaaactgccattttgtatttaatagcctccaggttctttcagtaatgttatttgctctgtgtgtttttgtgtgtttgttgatgtgcgtttgtgcatatgcgtgagtttcattgccggggttggggcacaattgtggactggggccatgaggccttccctggtccccactgaacccaccttagttccacatttggctgcatcttgaattatgccgactccagacttctcctccttttttgcccttggctcttgacactctaaacccctggaccatctgaatggagcagccaagttcagtcccacatttctgtactgttcctctttcacagctggaatatgtcacatgatgaagttgtatagaaacagaaccatggatggatggccaggattgccgtggtccctagctagatccccttcctatcaatcacctgatagcaacagggacagctgccaataccctgctctttactcaatggtacccagggagggagcatgggaagagggtgagctgagggctggaggagggcaacagccactgggtgagctgttcacggtcttatactattgtttgtgattaaaagtgcttcaacccacctc

SEQ ID NO: 349605 - DNA, 1986 bp, Homo sapiens
agcggggcaggtggtggccgccggccgggccccgccctggggccgcctccccgcgggttccgttggctgtggcggcagctgacgcttgtggcggcggtggcttcggggtgggcgtaagatggcgacagcagcgcagggacccctaagcttgctgtggggctggctgtggagcgagcgcttctggctacccgagaacgtgagctgggctgatctggaggggccggccgacggctacggttacccccgcggccggcacatcctctcggtgttcccgctggcggcgggcatcttcttcgtgaggctgctcttcgagcgatttattgccaaaccctgtgcactccgtattggcatcgaggacagtggtccttatcaggcccaacccaatgccatccttgaaaaggtgttcatatctattaccaagtatcctgataagaaaaggctggagggcctgtcaaagcagctggattggaatgtccgaaaaatccaatgctggtttcgccatcggaggaatcaggacaagcccccaacgcttactaaattctgtgaaagcattcaccttggttctgggacatccgacagtgctggcataactatccatttcagcctctttcaagtgggctttatcactattatatcatggaattggccttctattggtcccttatgttttctcagtttacagacattaaaagaaaggacttcctgatcatgtttgtgcatcacttggtcaccattgggcttatctccttctcctacatcaacaatatggttcgagtgggaactctgatcatgtgtctacatgatgtctcagacttcttgctggaggcagccaaactggccaattatgccaagtatcagcggctctgtgacaccctttttgtgatcttcagtgctgtttttatggttacacgactaggaatctatccattctggattctgaacacgaccctctttgagagttgggagataatcgggccttatgcttcatggtggctcctcaatggcctgctgctgaccctacagcttctgcatgtcatctggtcctacctaattgcacggattgctttgaaagccttgatcaggggaaaggtatcgaaggatgatcgcagtgatgtggagagcagctcagaggaagaagatgtgaccacctgcacaaaaagtccctgtgacagtagctccagcaatggtgccaatcgggtgaatggtcacatgggaggcagctactgggctgaagagtaaggtggttgctatagggacttcagcacacatggacttgtagggccactggcaacatactcctcttggcccttcccatatctactcttctgtgattgggagactgcaaggcactgaggagtatcaaagaagcaaatattttcactttgaaagaaaactgccattttgtatttaatagcctccaggttctttcagtaatgttatttgctctgtgtgtttttgtgtgtttgttgatgtgcgtttgtgcatatgcgtgagtttcattgccggggttggggcacaattgtggactggggccatgaggccttccctggtccccactgaacccaccttagttccacatttggctgcatcttgaattatgccgactccagacttctcctccttttttgcccttggctcttgacactctaaacccctggaccatctgaatggagcagccaagttcagtcccacatttctgtactgttcctctttcacagctggaatatgtcacatgatgaagttgtatagaaacagaaccatggatggatggccaggattgccgtggtccctagctagatccccttcctatcaatcacctgatagcaacagggacagctgccaataccctgctctttactcaatggtacccagggagggagcatgggaagagggtgagctgagggctggaggagggcaacagccactgggtgagctgttcacggtcttatactattgtttgtgattaaaagtgcttcaacccacctc

SEQ ID NO: 349606 - DNA, 1204 bp, Homo sapiens
agcggggcaggtggtggccgccggccgggccccgccctggggccgcctccccgcgggttccgttggctgtggcggcagctgacgcttgtggcggcggtggcttcggggtgggcgtaagatggcgacagcagcgcagggacccctaagcttgctgtggggctggctgtggagcgagcgcttctggctacccgagaacgtgagctgggctgatctggaggggccggccgacggctacggttacccccgcggccggcacatcctctcggtgttcccgctggcggcgggcatcttcttcgtgaggctgctcttcgagcgtagagacggggtttcactatgttgaccaggctggtctccaactcctgaccttgtgatcctcctgcctcagcctcccaaagtgctgggattacaggcgtgagccaccacgcccggcttttttattctttttaaaaatttaaatccttgggactctgcttgatataacctcttcttttagatgatgaaaccaagacccaagaggtaagtgattttaccaagtttatatgccttattagtagatctgagactacgatagagtgctaataggtgatttccttctcacctttcctagcttcctgatttctttcttctcgactcctgaaagatctaagtatttccataatctcttggttaggcaggaaggtatccaagatccaggatatctatatgcaggaagagcttagtctcagttctacttttccctccaattaagatcttggtcttttgatgtaaggaaactgccatttattaatcacctcctttgtgccagggtctttcatatacattatctcactgaattacttacaagattcttatgaagtagattagtggttctcacattttaatggacatgtgaatcacctggggatcttgttaaaatgcagattctgattttgcaagtctgagatgggctcaagattatgcatctctaaaaagcttccagccagcacagtggcccacgcctgtaatcccagcattttgggagactgaggctggtgaacattgtcaccctaaagaagtgataaatgttgaaagtgatggatatggtaattaccccagtttcatcattatactatgtatacatgcattgaaacatcacattgtaccccataaatatgtacaattattatgtgtcaactataaataaaatttttttaaaaagaattgg

SEQ ID NO: 349607 - DNA, 955 bp, Homo sapiens
  misc_feature (813)..(813): n is a, c, g, or t
  misc_feature (816)..(816): n is a, c, g, or t
  misc_feature (818)..(818): n is a, c, g, or t
  misc_feature (821)..(821): n is a, c, g, or t
  misc_feature (823)..(823): n is a, c, g, or t
  misc_feature (826)..(826): n is a, c, g, or t
  misc_feature (831)..(831): n is a, c, g, or t
  misc_feature (835)..(835): n is a, c, g, or t
  misc_feature (838)..(838): n is a, c, g, or t
agcggggcaggtggtggccgccggccgggccccgccctggggccgcctccccgcgggttccgttggctgtggcggcagctgacgcttgtggcggcggtggcttcggggtgggcgtaagatggcgacagcagcgcagggacccctaagcttgctgtggggctggctgtggagcgagcgcttctggctacccgagaacgtgagctgggctgatctggaggggccggccgacggctacggttacccccgcggccggcacatcctctcggtgttcccgctggcggcgggcatcttcttcgtgaggctgctcttcgagcgtagagacggggtttcactatgttgaccaggctggtctccaactcctgaccttgtgatcctcctgcctcagcctcccaaagtgctgggattacaggcgtgagccaccacgcccggcttttttattctttttaaaaatttaaatccttgggactctgcttgatataacctcttcttttagatgatgaaaccaagacccaagagatttattgccaaaccctgtgcactccgtattggcatcgaggacagtggtccttatcaggcccaacccaatgccatccttgaaaaggtgttcatatctattaccaagtatcctgataagaaaaggctggagggcctgtcaaagcagctggattggaatgtccgaaaaatccaatgctggtttcgccatcggaggaatcaggacaagcccccaacgcttactaaattctgtgaaagcatgtggagattcacattttatttatgtatattctgctatggaattagatttctctggtcgcnacntnggntntgngactncganagnggtgggaataaactatccattgcaggcctctttcaggtggggctatatcagctattatctcatggactggccctctatgggcccctatgttcctacagtaccgccttacacccacag

SEQ ID NO: 349608 - DNA, 203 bp, Homo sapiens
gcccctcagtaccagaaatattaacaggtaacaggtaaagtgcacgtcatgaggaattccgaaattccgaaattacatgaagttttgcatcctgaatttatttttgagggtgcacgaggcagttaccccgtctctgtttgcagtagcctgagttccgatgaactcactgatggcctccatctcttctgactttgcaaacgttg

SEQ ID NO: 349609 - DNA, 455 bp, Homo sapiens
actgttatgaggaattaacctgagttaagtacataggctttacctccagccttagcttaattcgtttacttctttgcaaaattgtagattaatttatttgagtcttttaaatattttctttttgtggccagagggtttaaggatcccttaagcccaccgcattagcataagtcaaaagtctgaacaacatcattctcaagaagaaaattaagccacatgtcctccttctacattatgtttgtgaaagtgtagttttattatgaggaaaacagcctttagcttttgttgaatggttcaagaaaaaacataacatagataaatttaggtaacattaatagaaacatttttcattaataattggttttgataaatctatgcggtttatcaatgggactcatgtacaggttgccaaaaactaattattctccctgagaaataatacttaaagcacttag

SEQ ID NO: 349610 - DNA, 2232 bp, Homo sapiens
cgcgcccgcggccctccgtcccgccccggccggctggcggtcacctggcacaccagcgcccgcaggatgcccaggtactgcttaggatgaatatgatttggagaaattccatttcttgtctaaggctaggaaaggtgccacacagataccaaagtggttaccacccagtggcccctctgggatcaaggattttaactgacccagccaaagtttttgaacacaacatgtgggatcacatgcagtggtctaaggaagaagaagcagcagccagaaaaaaagtaaaagaaaactcagctgtgcgagtccttctggaagagcaagttaagtatgagagagaagctagtaaatactgggacacattttacaagattcataagaataagtttttcaaggatcgtaattggctgttgagggaatttcctgaaattcttccagttgatcaaaaacctgaagagaaggcgagagaatcatcatgggatcatgtaaaaactagtgctacaaatcgtttctcaagaatgcactgtcctactgtgcctgatgaaaaaaatcattatgagaaaagttctggttcttcagaaggtcaaagcaaaacagaatctgatttttccaacctagactctgaaaaacacaaaaaaggacctatggagactggattgtttcctggtagcaatgccactttcaggatactagaggttggttgtggagctggaaatagtgtgtttccaattttgaacactttggagaactctccggagtcctttctgtattgttgtgattttgcttctggagctgtggagctcgtaaagtcacactcgtcctacagagcaacccagtgttttgcctttgttcatgatgtatgtgatgatggcttaccttacccttttccagatgggatcctggatgtcattctccttgtctttgtgctctcttctattcatcctgacaggatgcaaggtgttgtaaaccgactgtccaagttactgaaacctgggggaatgctgttatttcgagactatggaagatatgataagactcagcttcgttttaaaaagggacattgtttatctgaaaatttttatgttcgaggagatggtaccagagcatatttctttacaaaaggggaagtccacagtatgttctgcaaagccagtttagatgaaaagcaaaatctggttgatcgccgcttacaagttaataggaaaaaacaagtgaaaatgcaccgagtgtggattcaaggcaaattccagaaaccattgcaccagactcagaatagctccaatatggtatctacactcctttcacaagactgaactttgtaacatgttaaggtacaaagccagaggactgtgctattcaaggactactgtaagtctattgtttctcaaaagacaatgagaaaaaaagaagagaatttgtatttcctgccgttttgtcataggtgagctcctttgtgcattttaagcacatgtaagtggttcagcacagtatgcctttttctgtgctttgaaaacttgatatgctcaagcttgtttgaatttattacatctaaccattttgcttgttccttgatttttataagcattcaattaagttagtattatgtcaagtaattttgagaaaatgtaacttgacattttttgcaagtaaaaaaaattgtttatttgtttaggcttagtaaaccagttcccaaacacagtcagactcttcccattgtcatctgattgcagagagaaagcacaccttatttccagggaaagctacaacaagcccaaggtcaaagtgtattattttttgtcttgttgttgtctattttctcccaatttttttttgaaattcagaggctcatatctgaaatagaattttagttcctctttcctttcctaaaattggggaagtacagcccatgctgacattattttcaggctattcttagatatacaagttgttaggccaggtgcaatggctcgcacctgtaatcccagcactttggggggctgaggcaggcagatcgcttgagctcaggagttcaagaccagcctggacaacatggcaaaaccctgtctctcccaagaatacaaaaattagccaggcatggtggcacacacctgtggtcccagctactcaggagactgaggtgggaggatcgcttgagcctcggaggcggaggttgcagtgagctgagattgtaccactgcgctccaaactgggtgacatggtgagaccttgtctcca

SEQ ID NO: 349611 - DNA, 2107 bp, Homo sapiens
tgtcgtcgtgtccaagggttggttcccaccttgcaccctgagctgaggggataggcttcagccaccctcgaccctgaactggaataattaggtactgcttaggatgaatatgatttggagaaattccatttcttgtctaaggctaggaaaggtgccacacagataccaaagtggttaccacccagtggcccctctgggatcaaggattttaactgacccagccaaagtttttgaacacaacatgtgttaagtatgagagagaagctagtaaatactgggacacattttacaagattcataagaataagtttttcaaggatcgtaattggctgttgagggaatttcctgaaattcttccagttgatcaaaaacctgaagagaaggcgagagaatcatcatgggatcatgtaaaaactagtgctacaaatcgtttctcaagaatgcactgtcctactgtgcctgatgaaaaaaatcattatgagaaaagttctggttcttcagaaggtcaaagcaaaacagaatctgatttttccaacctagactctgaaaaacacaaaaaaggacctatggagactggattgtttcctggtagcaatgccactttcaggatactagaggaactctccggagtcctttctgtattgttgtgattttgcttctggagctgtggagctcgtaaagtcacactcgtcctacagagcaacccagtgttttgcctttgttcatgatgtatgtgatgatggcttaccttacccttttccagatgggatcctggatgtcattctccttgtctttgtgctctcttctattcatcctgacaggatgcaaggtgttgtaaaccgactgtccaagttactgaaacctgggggaatgctgttatttcgagactatggaagatatgataagactcagcttcgttttaaaaagggacattgtttatctgaaaatttttatgttcgaggagatggtaccagagcatatttctttacaaaaggggaagtccacagtatgttctgcaaagccagtttagatgaaaagcaaaatctggttgatcgccgcttacaagttaataggaaaaaacaagtgaaaatgcaccgagtgtggattcaaggcaaattccagaaaccattgcaccagactcagaatagctccaatatggtatctacactcctttcacaagactgaactttgtaacatgttaaggtacaaagccagaggactgtgctattcaaggactactgtaagtctattgtttctcaaaagacaatgagaaaaaaagaagagaatttgtatttcctgccgttttgtcataggtgagctcctttgtgcattttaagcacatgtaagtggttcagcacagtatgcctttttctgtgctttgaaaacttgatatgctcaagcttgtttgaatttattacatctaaccattttgcttgttccttgatttttataagcattcaattaagttagtattatgtcaagtaattttgagaaaatgtaacttgacattttttgcaagtaaaaaaaattgtttatttgtttaggcttagtaaaccagttcccaaacacagtcagactcttcccattgtcatctgattgcagagagaaagcacaccttatttccagggaaagctacaacaagcccaaggtcaaagtgtattattttttgtcttgttgttgtctattttctcccaatttttttttgaaattcagaggctcatatctgaaatagaattttagttcctctttcctttcctaaaattggggaagtacagcccatgctgacattattttcaggctattcttagatatacaagttgttaggccaggtgcaatggctcgcacctgtaatcccagcactttggggggctgaggcaggcagatcgcttgagctcaggagttcaagaccagcctggacaacatggcaaaaccctgtctctcccaagaatacaaaaattagccaggcatggtggcacacacctgtggtcccagctactcaggagactgaggtgggaggatcgcttgagcctcggaggcggaggttgcagtgagctgagattgtaccactgcgctccaaactgggtgacatggtgagaccttgtctcca

SEQ ID NO: 349612 - DNA, 1978 bp, Homo sapiens
tcttctctgtgctgcgagtggctagctgggcagagccctgggggcgcggtgctgccgcctccaggtctccgccccgtgtgtgcgccctgcacttagggatccctccctcactgccccggtactcacaagcttctcggccccgaccttcgccctgggaggttctggccaggtgccgggaggggcgctgtgtcgagggcgatccccccaaagcagcgtcccgtgctaaagaaacagagcctcactctgtcacctaggctggagtgcagtggtgcaattatggctcactgcagtttcaacctcccagattccagtcatcctcctgcctcagccacccaagaagctgggaccacagggatcacatgcagtggtctaaggaagaagaagcagcagccagaaaaaaagtaaaagaaaactcagctgtgcgagtccttctggaagagcaagttaagtatgagagagaagctagtaaatactgggacacattttacaagattcataagaataagtttttcaaggatcgtaattggctgttgagggaatttcctgaaattcttccagttgatcaaaaacctgaagagaaggcgagagaatcatcatgggatcatgtaaaaactagtgctacaaatcgtttctcaagaatgcactgtcctactgtgcctgatgaaaaaaatcattatgagaaaagttctggttcttcagaaggtcaaagcaaaacagaatctgatttttccaacctagactctgaaaaacacaaaaaaggacctatggagactggattgtttcctggtagcaatgccactttcaggatactagaggttggttgtggagctggaaatagtgtgtttccaattttgaacactttggagggaagtccacagtatgttctgcaaagccagtttagatgaaaagcaaaatctggttgatcgccgcttacaagttaataggaaaaaacaagtgaaaatgcaccgagtgtggattcaaggcaaattccagaaaccattgcaccagactcagaatagctccaatatggtatctacactcctttcacaagactgaactttgtaacatgttaaggtacaaagccagaggactgtgctattcaaggactactgtaagtctattgtttctcaaaagacaatgagaaaaaaagaagagaatttgtatttcctgccgttttgtcataggtgagctcctttgtgcattttaagcacatgtaagtggttcagcacagtatgcctttttctgtgctttgaaaacttgatatgctcaagcttgtttgaatttattacatctaaccattttgcttgttccttgatttttataagcattcaattaagttagtattatgtcaagtaattttgagaaaatgtaacttgacattttttgcaagtaaaaaaaattgtttatttgtttaggcttagtaaaccagttcccaaacacagtcagactcttcccattgtcatctgattgcagagagaaagcacaccttatttccagggaaagctacaacaagcccaaggtcaaagtgtattattttttgtcttgttgttgtctattttctcccaatttttttttgaaattcagaggctcatatctgaaatagaattttagttcctctttcctttcctaaaattggggaagtacagcccatgctgacattattttcaggctattcttagatatacaagttgttaggccaggtgcaatggctcgcacctgtaatcccagcactttggggggctgaggcaggcagatcgcttgagctcaggagttcaagaccagcctggacaacatggcaaaaccctgtctctcccaagaatacaaaaattagccaggcatggtggcacacacctgtggtcccagctactcaggagactgaggtgggaggatcgcttgagcctcggaggcggaggttgcagtgagctgagattgtaccactgcgctccaaactgggtgacatggtgagaccttgtctcca

SEQ ID NO: 349613 - DNA, 2248 bp, Homo sapiens
tcttctctgtgctgcgagtggctagctgggcagagccctgggggcgcggtgctgccgcctccaggtctccgccccgtgtgtgcgccctgcacttagggatccctccctcactgccccggtactcacaagcttctcggccccgaccttcgccctgggaggttctggccaggtgccgggaggggcgctgtgtcgagggcgatccccccaaagcagcgtcccgtgctaaagaaacagagcctcactctgtcacctaggctggagtgcagtggtgcaattatggctcactgcagtttcaacctcccagattccagtcatcctcctgcctcagccacccaagaagctgggaccacagggatcacatgcagtggtctaaggaagaagaagcagcagccagaaaaaaagtaaaagaaaactcagctgtgcgagtccttctggaagagcaagttaagtatgagagagaagctagtaaatactgggacacattttacaagattcataagaataagtttttcaaggatcgtaattggctgttgagggaatttcctgaaattcttccagttgatcaaaaacctgaagagaaggcgagagaatcatcatgggatcatgtaaaaactagtgctacaaatcgtttctcaagaatgcactgtcctactgtgcctgatgaaaaaaatcattatgagaaaagttctggttcttcagaaggtcaaagcaaaacagaatctgatttttccaacctagactctgaaaaacacaaaaaaggacctatggagactggattgtttcctggtagcaatgccactttcaggatactagaggttggttgtggagctggaaatagtgtgtttccaattttgaacactttggagaactctccggagtcctttctgtattgttgtgattttgcttctggagctgtggagctcgtaaagtcacactcgtcctacagagcaacccagtgttttgcctttgttcatgatgtatgtgatgatggcttaccttacccttttccagatgggatcctggatgtcattctccttgtctttgtgctctcttctattcatcctgacaggacattgtttatctgaaaatttttatgttcgaggagatggtaccagagcatatttctttacaaaaggggaagtccacagtatgttctgcaaagccagtttagatgaaaagcaaaatctggttgatcgccgcttacaagttaataggaaaaaacaagtgaaaatgcaccgagtgtggattcaaggcaaattccagaaaccattgcaccagactcagaatagctccaatatggtatctacactcctttcacaagactgaactttgtaacatgttaaggtacaaagccagaggactgtgctattcaaggactactgtaagtctattgtttctcaaaagacaatgagaaaaaaagaagagaatttgtatttcctgccgttttgtcataggtgagctcctttgtgcattttaagcacatgtaagtggttcagcacagtatgcctttttctgtgctttgaaaacttgatatgctcaagcttgtttgaatttattacatctaaccattttgcttgttccttgatttttataagcattcaattaagttagtattatgtcaagtaattttgagaaaatgtaacttgacattttttgcaagtaaaaaaaattgtttatttgtttaggcttagtaaaccagttcccaaacacagtcagactcttcccattgtcatctgattgcagagagaaagcacaccttatttccagggaaagctacaacaagcccaaggtcaaagtgtattattttttgtcttgttgttgtctattttctcccaatttttttttgaaattcagaggctcatatctgaaatagaattttagttcctctttcctttcctaaaattggggaagtacagcccatgctgacattattttcaggctattcttagatatacaagttgttaggccaggtgcaatggctcgcacctgtaatcccagcactttggggggctgaggcaggcagatcgcttgagctcaggagttcaagaccagcctggacaacatggcaaaaccctgtctctcccaagaatacaaaaattagccaggcatggtggcacacacctgtggtcccagctactcaggagactgaggtgggaggatcgcttgagcctcggaggcggaggttgcagtgagctgagattgtaccactgcgctccaaactgggtgacatggtgagaccttgtctcca

SEQ ID NO: 349614 - DNA, 2386 bp, Homo sapiens
tcttctctgtgctgcgagtggctagctgggcagagccctgggggcgcggtgctgccgcctccaggtctccgccccgtgtgtgcgccctgcacttagggatccctccctcactgccccggtactcacaagcttctcggccccgaccttcgccctgggaggttctggccaggtgccgggaggggcgctgtgtcgagggcgatccccccaaagcagcgtcccgtgctaaaggtactgcttaggatgaatatgatttggagaaattccatttcttgtctaaggctaggaaaggtgccacacagataccaaagtggttaccacccagtggcccctctgggatcaaggattttaactgacccagccaaagtttttgaacacaacatgtgggatcacatgcagtggtctaaggaagaagaagcagcagccagaaaaaaagtaaaagaaaactcagctgtgcgagtccttctggaagagcaagttaagtatgagagagaagctagtaaatactgggacacattttacaagattcataagaataagtttttcaaggatcgtaattggctgttgagggaatttcctgaaattcttccagttgatcaaaaacctgaagagaaggcgagagaatcatcatgggatcatgtaaaaactagtgctacaaatcgtttctcaagaatgcactgtcctactgtgcctgatgaaaaaaatcattatgagaaaagttctggttcttcagaaggtcaaagcaaaacagaatctgatttttccaacctagactctgaaaaacacaaaaaaggacctatggagactggattgtttcctggtagcaatgccactttcaggatactagaggttggttgtggagctggaaatagtgtgtttccaattttgaacactttggagaactctccggagtcctttctgtattgttgtgattttgcttctggagctgtggagctcgtaaagtcacactcgtcctacagagcaacccagtgttttgcctttgttcatgatgtatgtgatgatggcttaccttacccttttccagatgggatcctggatgtcattctccttgtctttgtgctctcttctattcatcctgacaggatgcaaggtgttgtaaaccgactgtccaagttactgaaacctgggggaatgctgttatttcgagactatggaagatatgataagactcagcttcgttttaaaaagggacattgtttatctgaaaatttttatgttcgaggagatggtaccagagcatatttctttacaaaaggggaagtccacagtatgttctgcaaagccagtttagatgaaaagcaaaatctggttgatcgccgcttacaagttaataggaaaaaacaagtgaaaatgcaccgagtgtggattcaaggcaaattccagaaaccattgcaccagactcagaatagctccaatatggtatctacactcctttcacaagactgaactttgtaacatgttaaggtacaaagccagaggactgtgctattcaaggactactgtaagtctattgtttctcaaaagacaatgagaaaaaaagaagagaatttgtatttcctgccgttttgtcataggtgagctcctttgtgcattttaagcacatgtaagtggttcagcacagtatgcctttttctgtgctttgaaaacttgatatgctcaagcttgtttgaatttattacatctaaccattttgcttgttccttgatttttataagcattcaattaagttagtattatgtcaagtaattttgagaaaatgtaacttgacattttttgcaagtaaaaaaaattgtttatttgtttaggcttagtaaaccagttcccaaacacagtcagactcttcccattgtcatctgattgcagagagaaagcacaccttatttccagggaaagctacaacaagcccaaggtcaaagtgtattattttttgtcttgttgttgtctattttctcccaatttttttttgaaattcagaggctcatatctgaaatagaattttagttcctctttcctttcctaaaattggggaagtacagcccatgctgacattattttcaggctattcttagatatacaagttgttaggccaggtgcaatggctcgcacctgtaatcccagcactttggggggctgaggcaggcagatcgcttgagctcaggagttcaagaccagcctggacaacatggcaaaaccctgtctctcccaagaatacaaaaattagccaggcatggtggcacacacctgtggtcccagctactcaggagactgaggtgggaggatcgcttgagcctcggaggcggaggttgcagtgagctgagattgtaccactgcgctccaaactgggtgacatggtgagaccttgtctcca

SEQ ID NO: 349615 - DNA, 2231 bp, Homo sapiens
tcttctctgtgctgcgagtggctagctgggcagagccctgggggcgcggtgctgccgcctccaggtctccgccccgtgtgtgcgccctgcacttagggatccctccctcactgccccggtactcacaagcttctcggccccgaccttcgccctgggaggttctggccaggtgccgggaggggcgctgtgtcgagggcgatccccccaaagcagcgtcccgtgctaaagggatcacatgcagtggtctaaggaagaagaagcagcagccagaaaaaaagtaaaagaaaactcagctgtgcgagtccttctggaagagcaagttaagtatgagagagaagctagtaaatactgggacacattttacaagattcataagaataagtttttcaaggatcgtaattggctgttgagggaatttcctgaaattcttccagttgatcaaaaacctgaagagaaggcgagagaatcatcatgggatcatgtaaaaactagtgctacaaatcgtttctcaagaatgcactgtcctactgtgcctgatgaaaaaaatcattatgagaaaagttctggttcttcagaaggtcaaagcaaaacagaatctgatttttccaacctagactctgaaaaacacaaaaaaggacctatggagactggattgtttcctggtagcaatgccactttcaggatactagaggttggttgtggagctggaaatagtgtgtttccaattttgaacactttggagaactctccggagtcctttctgtattgttgtgattttgcttctggagctgtggagctcgtaaagtcacactcgtcctacagagcaacccagtgttttgcctttgttcatgatgtatgtgatgatggcttaccttacccttttccagatgggatcctggatgtcattctccttgtctttgtgctctcttctattcatcctgacaggatgcaaggtgttgtaaaccgactgtccaagttactgaaacctgggggaatgctgttatttcgagactatggaagatatgataagactcagcttcgttttaaaaagggacattgtttatctgaaaatttttatgttcgaggagatggtaccagagcatatttctttacaaaaggggaagtccacagtatgttctgcaaagccagtttagatgaaaagcaaaatctggttgatcgccgcttacaagttaataggaaaaaacaagtgaaaatgcaccgagtgtggattcaaggcaaattccagaaaccattgcaccagactcagaatagctccaatatggtatctacactcctttcacaagactgaactttgtaacatgttaaggtacaaagccagaggactgtgctattcaaggactactgtaagtctattgtttctcaaaagacaatgagaaaaaaagaagagaatttgtatttcctgccgttttgtcataggtgagctcctttgtgcattttaagcacatgtaagtggttcagcacagtatgcctttttctgtgctttgaaaacttgatatgctcaagcttgtttgaatttattacatctaaccattttgcttgttccttgatttttataagcattcaattaagttagtattatgtcaagtaattttgagaaaatgtaacttgacattttttgcaagtaaaaaaaattgtttatttgtttaggcttagtaaaccagttcccaaacacagtcagactcttcccattgtcatctgattgcagagagaaagcacaccttatttccagggaaagctacaacaagcccaaggtcaaagtgtattattttttgtcttgttgttgtctattttctcccaatttttttttgaaattcagaggctcatatctgaaatagaattttagttcctctttcctttcctaaaattggggaagtacagcccatgctgacattattttcaggctattcttagatatacaagttgttaggccaggtgcaatggctcgcacctgtaatcccagcactttggggggctgaggcaggcagatcgcttgagctcaggagttcaagaccagcctggacaacatggcaaaaccctgtctctcccaagaatacaaaaattagccaggcatggtggcacacacctgtggtcccagctactcaggagactgaggtgggaggatcgcttgagcctcggaggcggaggttgcagtgagctgagattgtaccactgcgctccaaactgggtgacatggtgagaccttgtctcca

SEQ ID NO: 349616 - DNA, 372 bp, Homo sapiens
aaagatggtcatccatggaaatggccaaggctgaaaggatctggcattccgtcccgtttattgaatccctccagaaccaatctgatatcgtataaagctcacgaagaaataaaaatagtcaccttaatcatcaaaaaggtaattgcaaagggcactgttgcctgaaattctctagtcacctgaaaactgaaataactgaggcaagacttcttaaaatgcttagtttcaaacttaaacagaatggcctgataatgatcaaacatgtacagagaaatacatgaaatcagaattgtgaatgcagagaaataactgttttgctagtttaaaagtctgaagcttttccctcctccccagctgttaatgtaggagaca

SEQ ID NO: 349617 - DNA, 358 bp, Homo sapiens
cgtcgacgtttctttaaaaaaaaaaaaagaaaaagaaaaagaaaaagaaaaatattttaggcttagaattatctaatggaaaaaatgtaaaaaagtacaaaaatgaactaaaagtatatcagtatttgcattgtttacatataccctgcatttaaaccaattaaaacaatccaagtttctttaaaaaaaaaaagaaaaagaaaaagaaaaagaaaaatattttaggcttagaattatctaatggaaaaaatgtaaaaaagtacaaaaatgaactaaaagtatatcagtatttgcagtatttacatataccctgcatttaaaccaattaaaacaatccaagtttctttaaaaaaaaaaa

SEQ ID NO: 349618 - DNA, 4441 bp, Homo sapiens
agggagctcagcggagctgcgcgcctccgcctccagctcccctgccgcagcgcgccgcagccgggcgtccccgcgcgggcgccggagaggaaggaaggctggcagcctcgtcacgtgtccgctgcagtcgcgaaacagttccggtggtgaggagacctttccaaatataagaggaataaagaagtcacctccccagctgtcatcatcttccagcagattgagcaagaatattttgagcactacaggaaagacagtccatcaaacccgagatgatgatcagccacgtgattttttcaagaagaggaatagggtgaatgaatctcatcagaaaagcagcaatatgaatgctggcccatcttggaataaagtgcaacattcaaagaattcttcaggaaaaaggcagagtaaatcccaagtaccccacgcttcttcccagccgagaagcagcctcacagctgtcacccagcctactgaagaaaaacttaaagaaagcatttccccggaagcaagacgcaaaaggaatccactcggttccaggtgtcagggggcctcagggaataaactgtttcttgattttcagtcaatgaaaattattaaagagaatgctgatgaggacagtgcaagtgatctctctgattcggaaagaattcccattcctccttctcccctcacacctccagatctcaatcttcgagctgaagaaattgatccagtttactttgatcttcaccctggtcagggccatacaaaacctgaatactattatcctaatttccttccatcccctttcagctcctgggacctacgagatatggccctgcttctgaacgcagagaacaaaacggaagccgtgccccgagtgggaggacttcttgggaagtatatcgatagacttattcagcttgagtggctgcaagtccagactgtacagtgtgaaaaagcaaaggggggcaaagcaaggccccccactgcccctgggacctcaggggcactgaaaagccctgggagaagtaagctaattgctagtgctctgtccaagccactacctcaccaggaaggggcttcaaagtcaggcccttcccgaaagaaagcttttcaccatgaagaaatccacccatcacattatgcatttgagacttcccctagacccattgatgtgcttggtggtaccaggttttgttctcagaggcaaacccttgaaatgaggacagaagaaaagaaaaagaaatcaagtaagagtacgaagctgcagcgctgggatctgtccggcagtggaagcagctctaaggtggaaaccagcggtcacattcgagttcccaaacaggcagctgtgattctggactcagcagattcctgtaaggcctccaaaacacaagcacatgcacatcctaggaaaaagggaaaggcagagagctgtggtcatgccactgtatcgagtgagaaaaaactgaaaacaaacggagtaaagcaaaacacatataaactaaaataaatatctaaaatgctgaattgccaagacctgcaggtacctcaatgttagagcgcttccaaaagtcaaaatactgtgaattttaaggaattttacaaatactgacatttaagtagttgactggcatttttgtccacctttatttctaccctgagtggggttattttcaaagggaagtgtctttcaataagcctttctttgtattgtcagtcttaggcaaatgagagccctttagataaaaattatgtaaaatatgtgccatataaaggaataaaatggcacctctccagggaaagtgtcagtgaaacctcagctacagtagccggtctgtgtagagcagctagtggtgttacctccccattttcacatgcacgtaagtatatgaaatagtgcagactgtttcaaatggtgtggaatcctaaatgtttaaaataaggtccttcttgcccactccctcgcttacttttttataaactcctcaagcaaaatttctgttcattttacccttaggagaagctttagttcttcctcaagtcagggagtagtgagtttgtattttgagtagtcatttctcactaagctggttgctttctagagagacagtggaatctagtactttaatacattttctctgacatggttttttttttcttttttgaggggcattttaaacttagaggtggtggtaaaacctacttttgagttctccgaactgaggttaaaataacttgcagaattttccaaagtcaatgggcttagcatgattactgctgtttggtggggctgagaatgaaatatttgacattctggaattgctggcatgtaaagcttctccagagaggcaccccagggaaatcactctttacaatttggtaaaggaagggcctgtaaaaggatcaaaacacatggacctacattcagtgtaatagttacaaagttactgatttgggttccacaccctgtggtccttagtcaaaaataatgatctgtttcagtttgcaagagcaggattttattattttgcttggggtgaggggcgggagagtggaatatgagtaaggttgctgaatgaattctaaactcgcttatctggtcttcaggcttcccaactctctccaagccttcttatttcactgcagttaaataacatcttcttggttcctatagttgtgctgtgagttttctgttcatatttgcgcagtgtattttaatacggcccatgtcattatagttgattttatccctttaaacaattactgtatttgtttttgacgtagaggtttcaattttttcaccttgggggcaaatgaaaaacttggcatttttcatttgggaacatataatagcttgtaaacttttcagacagcagtaaatgtctgaaaaaatatcaaaaacagcataaagacaagattatgtagctctaattatacgtatataattataaaaaacaatgtgcaagggttatattttaaggtcttttaaaatctgattttgatcataccaaatgacataatattttttatggtagccttttactttcaagacttaattttcagacttgtacaagttccttcttacattctttccctctcacaccatcctactggagaaagcatacttttatgctaagatcttactttaagctttttatgtgaacaaaagatgtacatatagtaagtattacttccgtagtcctcaaatttactataacttttgtacttagtatatgttttatatttggaaaacagcactacgcttagttttcctgtagttcctgagtgatgtctgtgtgttccttgcctgcccttttttgtgagcacagattagtctgttatccatggctggcacttcacttatgatcctttctctgctagatttttatgcagctctctatgaagtttcatggcccatagatattcaaaagcaagatattctatacatatgtgtatatgtatatatactccttatgttaatactaaagtgtttatgctgagttgctgcctttccccgtcatgtatccatgtgcatgctcttagagaccttgaatggttgagggtaaagtgatttattagtaattctacttgccttgtgtatgtctgagctgaaaacaatcgtgattaagaaatttagaggtggctgggcgtggtggctcacgcctgtaatcccagcactttgggaggccgaggcaggcggatcacctgaggtcgggagttcaagaccagcctgaccaacatggagaaaccctgtctccactaaaaatacaaaattagccgggtgtggtggtgcatgcctgtaatcccagctactcggaagtttgagacgagaatctcttgaacccgggaggcggaggttgtggtgagccaagatcgtgccattgcactccagcctgggcaacaagagggaaactccgtttcaaaaaaaaaagaaaaagaaagaaattgagaagtaacgcctcataatatttgttcccagctttttaaattgaagctggttgcataatctggggaatagtcataatttcatgtgttatacagtttaaaaagcctgcaaaagtgactttgcttgtttactttctgcctcagattgactattttaaccaatattgtcacgactagatcatagctcctagtgaataacatgaggtgttttaaagttaggtctattacagaattaacataagcacaattttaattttatgatatctgatatgcctatctaatacatcttaatgcattaaatgctgcagataagaatcttgctatttttcaagtagacaacattagaaagttgaatcatgaactcattcaattcatcaagtcaaaagcactgagtgttttgctagtctagtgacatgggttattgtatttccgagaagtgcctctcatttctggggagttgtttacatataccctgcatttaaaccaattaaaacaatccaagtttctttaaaaa

SEQ ID NO: 349619 - DNA, 4499 bp, Homo sapiens
  misc_feature (71)..(71): n is a, c, g, or t
cactgtcgcgatcgatcgaggctgagcaggggacgctgtgggcgcggctcaggccatggccctttcccagntgctctggctaattgcttgaaaacaccttctagttccaccttgtaactggactcccaaaagatgaatgctgacatcttctgatgcttaacaagaaataaaaatagtcaccttaatcatcaaaaagttccggtggtgaggagacctttccaaatataagaggaataaagaagtcacctccccagctgtcatcatcttccagcagattgagcaagaatattttgagcactacaggaaagacagtccatcaaacccgagatgatgatcagccacgtgattttttcaagaagaggaatagggtgaatgaatctcatcagaaaagcagcaatatgaatgctggcccatcttggaataaagtgcaacattcaaagaattcttcaggaaaaaggcagagtaaatcccaagtaccccacgcttcttcccagccgagaagcagcctcacagctgtcacccagcctactgaagaaaaacttaaagaaagcatttccccggaagcaagacgcaaaaggaatccactcggttccaggtgtcagggggcctcagggaataaactgtttcttgattttcagtcaatgaaaattattaaagagaatgctgatgaggacagtgcaagtgatctctctgattcggaaagaattcccattcctccttctcccctcacacctccagatctcaatcttcgagctgaagaaattgatccagtttactttgatcttcaccctggtcagggccatacaaaacctgaatactattatcctaatttccttccatcccctttcagctcctgggacctacgagatatggccctgcttctgaacgcagagaacaaaacggaagccgtgccccgagtgggaggacttcttgggaagtatatcgatagacttattcagcttgagtggctgcaagtccagactgtacagtgtgaaaaagcaaaggggggcaaagcaaggccccccactgcccctgggacctcaggggcactgaaaagccctgggagaagtaagctaattgctagtgctctgtccaagccactacctcaccaggaaggggcttcaaagtcaggcccttcccgaaagaaagcttttcaccatgaagaaatccacccatcacattatgcatttgagacttcccctagacccattgatgtgcttggtggtaccaggttttgttctcagaggcaaacccttgaaatgaggacagaagaaaagaaaaagaaatcaagtaagagtacgaagctgcagcgctgggatctgtccggcagtggaagcagctctaaggtggaaaccagcggtcacattcgagttcccaaacaggcagctgtgattctggactcagcagattcctgtaaggcctccaaaacacaagcacatgcacatcctaggaaaaagggaaaggcagagagctgtggtcatgccactgtatcgagtgagaaaaaactgaaaacaaacggagtaaagcaaaacacatataaactaaaataaatatctaaaatgctgaattgccaagacctgcaggtacctcaatgttagagcgcttccaaaagtcaaaatactgtgaattttaaggaattttacaaatactgacatttaagtagttgactggcatttttgtccacctttatttctaccctgagtggggttattttcaaagggaagtgtctttcaataagcctttctttgtattgtcagtcttaggcaaatgagagccctttagataaaaattatgtaaaatatgtgccatataaaggaataaaatggcacctctccagggaaagtgtcagtgaaacctcagctacagtagccggtctgtgtagagcagctagtggtgttacctccccattttcacatgcacgtaagtatatgaaatagtgcagactgtttcaaatggtgtggaatcctaaatgtttaaaataaggtccttcttgcccactccctcgcttacttttttataaactcctcaagcaaaatttctgttcattttacccttaggagaagctttagttcttcctcaagtcagggagtagtgagtttgtattttgagtagtcatttctcactaagctggttgctttctagagagacagtggaatctagtactttaatacattttctctgacatggttttttttttcttttttgaggggcattttaaacttagaggtggtggtaaaacctacttttgagttctccgaactgaggttaaaataacttgcagaattttccaaagtcaatgggcttagcatgattactgctgtttggtggggctgagaatgaaatatttgacattctggaattgctggcatgtaaagcttctccagagaggcaccccagggaaatcactctttacaatttggtaaaggaagggcctgtaaaaggatcaaaacacatggacctacattcagtgtaatagttacaaagttactgatttgggttccacaccctgtggtccttagtcaaaaataatgatctgtttcagtttgcaagagcaggattttattattttgcttggggtgaggggcgggagagtggaatatgagtaaggttgctgaatgaattctaaactcgcttatctggtcttcaggcttcccaactctctccaagccttcttatttcactgcagttaaataacatcttcttggttcctatagttgtgctgtgagttttctgttcatatttgcgcagtgtattttaatacggcccatgtcattatagttgattttatccctttaaacaattactgtatttgtttttgacgtagaggtttcaattttttcaccttgggggcaaatgaaaaacttggcatttttcatttgggaacatataatagcttgtaaacttttcagacagcagtaaatgtctgaaaaaatatcaaaaacagcataaagacaagattatgtagctctaattatacgtatataattataaaaaacaatgtgcaagggttatattttaaggtcttttaaaatctgattttgatcataccaaatgacataatattttttatggtagccttttactttcaagacttaattttcagacttgtacaagttccttcttacattctttccctctcacaccatcctactggagaaagcatacttttatgctaagatcttactttaagctttttatgtgaacaaaagatgtacatatagtaagtattacttccgtagtcctcaaatttactataacttttgtacttagtatatgttttatatttggaaaacagcactacgcttagttttcctgtagttcctgagtgatgtctgtgtgttccttgcctgcccttttttgtgagcacagattagtctgttatccatggctggcacttcacttatgatcctttctctgctagatttttatgcagctctctatgaagtttcatggcccatagatattcaaaagcaagatattctatacatatgtgtatatgtatatatactccttatgttaatactaaagtgtttatgctgagttgctgcctttccccgtcatgtatccatgtgcatgctcttagagaccttgaatggttgagggtaaagtgatttattagtaattctacttgccttgtgtatgtctgagctgaaaacaatcgtgattaagaaatttagaggtggctgggcgtggtggctcacgcctgtaatcccagcactttgggaggccgaggcaggcggatcacctgaggtcgggagttcaagaccagcctgaccaacatggagaaaccctgtctccactaaaaatacaaaattagccgggtgtggtggtgcatgcctgtaatcccagctactcggaagtttgagacgagaatctcttgaacccgggaggcggaggttgtggtgagccaagatcgtgccattgcactccagcctgggcaacaagagggaaactccgtttcaaaaaaaaaagaaaaagaaagaaattgagaagtaacgcctcataatatttgttcccagctttttaaattgaagctggttgcataatctggggaatagtcataatttcatgtgttatacagtttaaaaagcctgcaaaagtgactttgcttgtttactttctgcctcagattgactattttaaccaatattgtcacgactagatcatagctcctagtgaataacatgaggtgttttaaagttaggtctattacagaattaacataagcacaattttaattttatgatatctgatatgcctatctaatacatcttaatgcattaaatgctgcagataagaatcttgctatttttcaagtagacaacattagaaagttgaatcatgaactcattcaattcatcaagtcaaaagcactgagtgttttgctagtctagtgacatgggttattgtatttccgagaagtgcctctcatttctggggagttgtttacatataccctgcatttaaaccaattaaaacaatccaagtttctttaaaaa

SEQ ID NO: 349620 - DNA, 5121 bp, Homo sapiens
agggagctcagcggagctgcgcgcctccgcctccagctcccctgccgcagcgcgccgcagccgggcgtccccgcgcgggcgccggagaggaaggaaggctggcagcctcgtcacgtgtccgctgcagtcgcgaaacagttccggtggtgaggagacctttccaaatataagaggaataaagaagtcacctccccagctgtcatcatcttccagcagattgagcaagaatattttgagcactacaggaaagacagtccatcaaacccgagatgatgatcagccacgtgattttttcaagaagaggaatagggtgaatgaatctcatcagaaaagcagcaatatgaatgctggcccatcttggaataaagtgcaacattcaaagaattcttcaggaaaaaggcagagtaaatcccaagtaccccacgcttcttcccagccgagaagcagcctcacagctgtcacccagcctactgaagaaaaacttaaagaaagcatttccccggaagcaagacgcaaaaggaatccactcggttccaggtgtcagggggcctcagggaataaactgtttcttgattttcagtcaatgaaaattattaaagagaatgctgatgaggacagtgcaagtgatctctctgattcggaaagaattcccattcctccttctcccctcacacctccagatctcaatcttcgagctgaagaaattgatccagtttactttgatcttcaccctggtcagggccatacaaaacctgaatactattatcctaatttccttccatcccctttcagctcctgggacctacgagatatggccctgcttctgaacgcagagaacaaaacggaagccgtgccccgagtgggaggacttcttgggaagtatatcgatagacttattcagcttgagtggctgcaagtccagactgtacagtgtgaaaaagcaaaggggggcaaagcaaggccccccactgcccctgggacctcaggggcactgaaaagccctgggagaagtaagctaattgctagtgctctgtccaagccactacctcaccaggaaggggcttcaaagtcaggcccttcccgaaagaaagcttttcaccatgaagaaatccacccatcacattatgcatttgagacttcccctagacccattgatgtgcttggtggtaccaggttttgttctcagaggcaaacccttgaaatgaggacagaagaaaagaaaaagaaatcaagtaagagtacgaagctgcagcgctgggatctgtccggcagtggaagcagctctaaggtggaaaccagcggtcacattcgagttcccaaacaggcagctgtgattctggactcagcagattcctgtaaggcctccaaaacacaagcacatgcacatcctaggaaaaagggaaaggcagagagctgtggtcatgccactgtatcgagtgagaaaaaactgaaaacaaacggagtaaagcaaaacacatataaactaaaataaatatctaaaatgctgaattgccaagacctgcaggtacctcaatgttagagcgcttccaaaagtcaaaatactgtgaattttaaggaattttacaaatactgacatttaagtagttgactggcatttttgtccacctttatttctaccctgagtggggttattttcaaagggaagtgtctttcaataagcctttctttgtattgtcagtcttaggcaaatgagagccctttagataaaaattatgtaaaatatgtgccatataaaggaataaaatggcacctctccagggaaagtgtcagtgaaacctcagctacagtagccggtctgtgtagagcagctagtggtgttacctccccattttcacatgcacgtaagtatatgaaatagtgcagactgtttcaaatggtgtggaatcctaaatgtttaaaataaggtccttcttgcccactccctcgcttacttttttataaactcctcaagcaaaatttctgttcattttacccttaggagaagctttagttcttcctcaagtcagggagtagtgagtttgtattttgagtagtcatttctcactaagctggttgctttctagagagacagtggaatctagtactttaatacattttctctgacatggttttttttttcttttttgaggggcattttaaacttagaggtggtggtaaaacctacttttgagttctccgaactgaggttaaaataacttgcagaattttccaaagtcaatgggcttagcatgattactgctgtttggtggggctgagaatgaaatatttgacattctggaattgctggcatgtaaagcttctccagagaggcaccccagggaaatcactctttacaatttggtaaaggaagggcctgtaaaaggatcaaaacacatggacctacattcagtgtaatagttacaaagttactgatttgggttccacaccctgtggtccttagtcaaaaataatgatctgtttcagtttgcaagagcaggattttattattttgcttggggtgaggggcgggagagtggaatatgagtaaggttgctgaatgaattctaaactcgcttatctggtcttcaggcttcccaactctctccaagccttcttatttcactgcagttaaataacatcttcttggttcctatagttgtgctgtgagttttctgttcatatttgcgcagtgtattttaatacggcccatgtcattatagttgattttatccctttaaacaattactgtatttgtttttgacgtagaggtttcaattttttcaccttgggggcaaatgaaaaacttggcatttttcatttgggaacatataatagcttgtaaacttttcagacagcagtaaatgtctgaaaaaatatcaaaaacagcataaagacaagattatgtagctctaattatacgtatataattataaaaaacaatgtgcaagggttatattttaaggtcttttaaaatctgattttgatcataccaaatgacataatattttttatggtagccttttactttcaagacttaattttcagacttgtacaagttccttcttacattctttccctctcacaccatcctactggagaaagcatacttttatgctaagatcttactttaagctttttatgtgaacaaaagatgtacatatagtaagtattacttccgtagtcctcaaatttactataacttttgtacttagtatatgttttatatttggaaaacagcactacgcttagttttcctgtagttcctgagtgatgtctgtgtgttccttgcctgcccttttttgtgagcacagattagtctgttatccatggctggcacttcacttatgatcctttctctgctagatttttatgcagctctctatgaagtttcatggcccatagatattcaaaagcaagatattctatacatatgtgtatatgtatatatactccttatgttaatactaaagtgtttatgctgagttgctgcctttccccgtcatgtatccatgtgcatgctcttagagaccttgaatggttgagggtaaagtgatttattagtaattctacttgccttgtgtatgtctgagctgaaaacaatcgtgattaagaaatttagaggtggctgggcgtggtggctcacgcctgtaatcccagcactttgggaggccgaggcaggcggatcacctgaggtcgggagttcaagaccagcctgaccaacatggagaaaccctgtctccactaaaaatacaaaattagccgggtgtggtggtgcatgcctgtaatcccagctactcggaagtttgagacgagaatctcttgaacccgggaggcggaggttgtggtgagccaagatcgtgccattgcactccagcctgggcaacaagagggaaactccgtttcaaaaaaaaaagaaaaagaaagaaattgagaagtaacgcctcataatatttgttcccagctttttaaattgaagctggttgcataatctggggaatagtcataatttcatgtgttatacagtttaaaaagcctgcaaaagtgactttgcttgtttactttctgcctcagattgactattttaaccaatattgtcacgactagatcatagctcctagtgaataacatgaggtgttttaaagttaggtctattacagaattaacataagcacaattttaattttatgatatctgatatgcctatctaatacatcttaatgcattaaatgctgcagataagaatcttgctatttttcaagtagacaacattagaaagttgaatcatgaactcattcaattcatcaagtcaaaagcactgagtgttttgctagtctagtgacatgggttattgtatttccgagaagtgcctctcatttctggggagttgtttacatataccctgcatttaaaccaattaaaacaatccaagtttctttaaaaaaaaaaagaaaaagaaaaagaaaaagaaaaatattttaggcttagaattatctaatggaaaaaatgtaaaaaagtacaaaaatgaactaaaagtatatcagtatttgcagtatttgctgtgattacttaggtttagactttctcaacttcttagatgactaaatgggctgaagacttgtaactaacttgaataggatagacttcataccctgtgacaaaaaggatggggaagagaatatcattggtcttgccatatacctcctagctaaaaggaaaatggtttgtagttgttcttgggcctactgtgttgcttttcagaaggacataagactttctactttatctgatatggatatcgtctacttcctcattcctttatgctcacttatggagtagttacatagaaatataactcttggtggtactgtattttaaggtaattcagaagcagtatgtattatttatgtacatgtacaggacaccattcaaaatggcttgaaaatattcagcatgtttgttatttgctgttatattgtatgtttagttttgtatgtgataaacagaattgatgtaagtttttgtggacttgaatttctccttccttgagatcaattaaacagcagaaaaatcttcttggttataatgtcgacgcgggccgccattttggtattattcgtcgac

SEQ ID NO: 349621 - DNA, 5055 bp, Homo sapiens
agggagctcagcggagctgcgcgcctccgcctccagctcccctgccgcagcgcgccgcagccgggcgtccccgcgcgggcgccggagaggaaggaaggctggcagcctcgtcacgtgtccgctgcagtcgcgaaacagttccggtggtgaggagacctttccaaatataagaggaataaagaagtcacctccccagctgtcatcatcttccagcagattgagcaagaatattttgagcactacaggaaagacagtccatcaaacccgagatgatgatcagccacgtgattttttcaagaagaggaatagggtgaatgaatctcatcagaaaagcagcaatatgaatgctggcccatcttggaataaagtgcaacattcaaagaattcttcaggaaaaaggcagagtaaatcccaagtaccccacgcttcttcccagccgagaagcagcctcacagctgtcacccagcctactgaagaaaaacttaaagaaagcatttccccggaagcaagacgcaaaaggaatccactcggttccaggtgtcagggggcctcagggaataaactgtttcttgattttcagtcaatgaaaattattaaagagaatgctgatgaggacagtgcaagtgatctctctgattcggaaagaattcccattcctccttctcccctcacacctccagatctcaatcttcgagctgaagaaattgatccagtttactttgatcttcaccctggtcagggccatacaaaacctgaatactattatcctaatttccttccatcccctttcagctcctgggacctacgagatatggccctgcttctgaacgcagagaacaaaacggaagccgtgccccgagtgggaggacttcttgggaagtatatcgatagacttattcagcttgagtggctgcaagtccagactgtacagtgtgaaaaagcaaaggggggcaaagcaaggccccccactgcccctgggacctcaggggcactgaaaagccctgggagaagtaagctaattgctagtgctctgtccaagccactacctcaccaggaaggggcttcaaagtcaggcccttcccgaaagaaagcttttcaccatgaagaaatccacccatcacattatgcatttgagacttcccctagacccattgatgtgcttggtggtaccaggttttgttctcagaggcaaacccttgaaatgaggacagaagaaaagaaaaagaaatcaagtaagagtacgaagctgcagcgctgggatctgtccggcagtggaagcagctctaaggtggaaaccagcggtcacattcgagttcccaaacaggcagctgtgattctggactcagcagattcctgtaaggcctccaaaacacaagcacatgcacatcctaggaaaaagggaaaggcagagagctgtggtcatgccactgtatcgagtgagaaaaaactgaaaacaaacggagtaaagcaaaacacatataaactaaaataaatatctaaaatgctgaattgccaagacctgcaggtacctcaatgttagagcgcttccaaaagtcaaaatactgtgaattttaaggaattttacaaatactgacatttaagtagttgactggcatttttgtccacctttatttctaccctgagtggggttattttcaaagggaagtgtctttcaataagcctttctttgtattgtcagtcttaggcaaatgagagccctttagataaaaattatgtaaaatatgtgccatataaaggaataaaatggcacctctccagggaaagtgtcagtgaaacctcagctacagtagccggtctgtgtagagcagctagtggtgttacctccccattttcacatgcacgtaagtatatgaaatagtgcagactgtttcaaatggtgtggaatcctaaatgtttaaaataaggtccttcttgcccactccctcgcttacttttttataaactcctcaagcaaaatttctgttcattttacccttaggagaagctttagttcttcctcaagtcagggagtagtgagtttgtattttgagtagtcatttctcactaagctggttgctttctagagagacagtggaatctagtactttaatacattttctctgacatggttttttttttcttttttgaggggcattttaaacttagaggtggtggtaaaacctacttttgagttctccgaactgaggttaaaataacttgcagaattttccaaagtcaatgggcttagcatgattactgctgtttggtggggctgagaatgaaatatttgacattctggaattgctggcatgtaaagcttctccagagaggcaccccagggaaatcactctttacaatttggtaaaggaagggcctgtaaaaggatcaaaacacatggacctacattcagtgtaatagttacaaagttactgatttgggttccacaccctgtggtccttagtcaaaaataatgatctgtttcagtttgcaagagcaggattttattattttgcttggggtgaggggcgggagagtggaatatgagtaaggttgctgaatgaattctaaactcgcttatctggtcttcaggcttcccaactctctccaagccttcttatttcactgcagttaaataacatcttcttggttcctatagttgtgctgtgagttttctgttcatatttgcgcagtgtattttaatacggcccatgtcattatagttgattttatccctttaaacaattactgtatttgtttttgacgtagaggtttcaattttttcaccttgggggcaaatgaaaaacttggcatttttcatttgggaacatataatagcttgtaaacttttcagacagcagtaaatgtctgaaaaaatatcaaaaacagcataaagacaagattatgtagctctaattatacgtatataattataaaaaacaatgtgcaagggttatattttaaggtcttttaaaatctgattttgatcataccaaatgacataatattttttatggtagccttttactttcaagacttaattttcagacttgtacaagttccttcttacattctttccctctcacaccatcctactggagaaagcatacttttatgctaagatcttactttaagctttttatgtgaacaaaagatgtacatatagtaagtattacttccgtagtcctcaaatttactataacttttgtacttagtatatgttttatatttggaaaacagcactacgcttagttttcctgtagttcctgagtgatgtctgtgtgttccttgcctgcccttttttgtgagcacagattagtctgttatccatggctggcacttcacttatgatcctttctctgctagatttttatgcagctctctatgaagtttcatggcccatagatattcaaaagcaagatattctatacatatgtgtatatgtatatatactccttatgttaatactaaagtgtttatgctgagttgctgcctttccccgtcatgtatccatgtgcatgctcttagagaccttgaatggttgagggtaaagtgatttattagtaattctacttgccttgtgtatgtctgagctgaaaacaatcgtgattaagaaatttagaggtggctgggcgtggtggctcacgcctgtaatcccagcactttgggaggccgaggcaggcggatcacctgaggtcgggagttcaagaccagcctgaccaacatggagaaaccctgtctccactaaaaatacaaaattagccgggtgtggtggtgcatgcctgtaatcccagctactcggaagtttgagacgagaatctcttgaacccgggaggcggaggttgtggtgagccaagatcgtgccattgcactccagcctgggcaacaagagggaaactccgtttcaaaaaaaaaagaaaaagaaagaaattgagaagtaacgcctcataatatttgttcccagctttttaaattgaagctggttgcataatctggggaatagtcataatttcatgtgttatacagtttaaaaagcctgcaaaagtgactttgcttgtttactttctgcctcagattgactattttaaccaatattgtcacgactagatcatagctcctagtgaataacatgaggtgttttaaagttaggtctattacagaattaacataagcacaattttaattttatgatatctgatatgcctatctaatacatcttaatgcattaaatgctgcagataagaatcttgctatttttcaagtagacaacattagaaagttgaatcatgaactcattcaattcatcaagtcaaaagcactgagtgttttgctagtctagtgacatgggttattgtatttccgagaagtgcctctcatttctggggagttgtttacatataccctgcatttaaaccaattaaaacaatccaagtttctttaaaaaaaaaaagtacaaaaatgaactaaaagtatatcagtatttgcagtatttgctgtgattacttaggtttagactttctcaacttcttagatgactaaatgggctgaagacttgtaactaacttgaataggatagacttcataccctgtgacaaaaaggatggggaagagaatatcattggtcttgccatatacctcctagctaaaaggaaaatggtttgtagttgttcttgggcctactgtgttgcttttcagaaggacataagactttctactttatctgatatggatatcgtctacttcctcattcctttatgctcacttatggagtagttacatagaaatataactcttggtggtactgtattttaaggtaattcagaagcagtatgtattatttatgtacatgtacaggacaccattcaaaatggcttgaaaatattcagcatgtttgttatttgctgttatattgtatgtttagttttgtatgtgataaacagaattgatgtaagtttttgtggacttgaatttctccttccttgagatcaattaaacagcagaaaaatcttcttggttataatgtcgacgcgggccgccattttggtattattcgtcgac

SEQ ID NO: 349622 - DNA, 430 bp, Homo sapiens
  misc_feature (71)..(71): n is a, c, g, or t
cactgtcgcgatcgatcgaggctgagcaggggacgctgtgggcgcggctcaggccatggccctttcccagntgctctggctaattgcttgaaaacaccttctagttccaccttgtaactggactcccaaaagatgaatgctgacatcttctgatgcttaacaagaaataaaaatagtcaccttaatcatcaaaaaggtaattgcaaagggcactgttgcctgaaattctctagtcacctgaaaactgaaataactgaggcaagacttcttaaaatgcttagtttcaaacttaaacagaatggcctgataatgatcaaacatgtacagagaaatacatgaaatcagaattgtgaatgcagagaaataactgttttgctagtttaaaagtctgaagcttttccctcctccccagctgttaatgtaggagaca

SEQ ID NO: 349623 - DNA, 4383 bp, Homo sapiens
aacaagtgaaaaaccaacccgatactggtggtaggaccatttgcaatcaatagttactgacagtattctgttgcttctagttccggtggtgaggagacctttccaaatataagaggaataaagaagtcacctccccagctgtcatcatcttccagcagattgagcaagaatattttgagcactacaggaaagacagtccatcaaacccgagatgatgatcagccacgtgattttttcaagaagaggaatagggtgaatgaatctcatcagaaaagcagcaatatgaatgctggcccatcttggaataaagtgcaacattcaaagaattcttcaggaaaaaggcagagtaaatcccaagtaccccacgcttcttcccagccgagaagcagcctcacagctgtcacccagcctactgaagaaaaacttaaagaaagcatttccccggaagcaagacgcaaaaggaatccactcggttccaggtgtcagggggcctcagggaataaactgtttcttgattttcagtcaatgaaaattattaaagagaatgctgatgaggacagtgcaagtgatctctctgattcggaaagaattcccattcctccttctcccctcacacctccagatctcaatcttcgagctgaagaaattgatccagtttactttgatcttcaccctggtcagggccatacaaaacctgaatactattatcctaatttccttccatcccctttcagctcctgggacctacgagatatggccctgcttctgaacgcagagaacaaaacggaagccgtgccccgagtgggaggacttcttgggaagtatatcgatagacttattcagcttgagtggctgcaagtccagactgtacagtgtgaaaaagcaaaggggggcaaagcaaggccccccactgcccctgggacctcaggggcactgaaaagccctgggagaagtaagctaattgctagtgctctgtccaagccactacctcaccaggaaggggcttcaaagtcaggcccttcccgaaagaaagcttttcaccatgaagaaatccacccatcacattatgcatttgagacttcccctagacccattgatgtgcttggtggtaccaggttttgttctcagaggcaaacccttgaaatgaggacagaagaaaagaaaaagaaatcaagtaagagtacgaagctgcagcgctgggatctgtccggcagtggaagcagctctaaggtggaaaccagcggtcacattcgagttcccaaacaggcagctgtgattctggactcagcagattcctgtaaggcctccaaaacacaagcacatgcacatcctaggaaaaagggaaaggcagagagctgtggtcatgccactgtatcgagtgagaaaaaactgaaaacaaacggagtaaagcaaaacacatataaactaaaataaatatctaaaatgctgaattgccaagacctgcaggtacctcaatgttagagcgcttccaaaagtcaaaatactgtgaattttaaggaattttacaaatactgacatttaagtagttgactggcatttttgtccacctttatttctaccctgagtggggttattttcaaagggaagtgtctttcaataagcctttctttgtattgtcagtcttaggcaaatgagagccctttagataaaaattatgtaaaatatgtgccatataaaggaataaaatggcacctctccagggaaagtgtcagtgaaacctcagctacagtagccggtctgtgtagagcagctagtggtgttacctccccattttcacatgcacgtaagtatatgaaatagtgcagactgtttcaaatggtgtggaatcctaaatgtttaaaataaggtccttcttgcccactccctcgcttacttttttataaactcctcaagcaaaatttctgttcattttacccttaggagaagctttagttcttcctcaagtcagggagtagtgagtttgtattttgagtagtcatttctcactaagctggttgctttctagagagacagtggaatctagtactttaatacattttctctgacatggttttttttttcttttttgaggggcattttaaacttagaggtggtggtaaaacctacttttgagttctccgaactgaggttaaaataacttgcagaattttccaaagtcaatgggcttagcatgattactgctgtttggtggggctgagaatgaaatatttgacattctggaattgctggcatgtaaagcttctccagagaggcaccccagggaaatcactctttacaatttggtaaaggaagggcctgtaaaaggatcaaaacacatggacctacattcagtgtaatagttacaaagttactgatttgggttccacaccctgtggtccttagtcaaaaataatgatctgtttcagtttgcaagagcaggattttattattttgcttggggtgaggggcgggagagtggaatatgagtaaggttgctgaatgaattctaaactcgcttatctggtcttcaggcttcccaactctctccaagccttcttatttcactgcagttaaataacatcttcttggttcctatagttgtgctgtgagttttctgttcatatttgcgcagtgtattttaatacggcccatgtcattatagttgattttatccctttaaacaattactgtatttgtttttgacgtagaggtttcaattttttcaccttgggggcaaatgaaaaacttggcatttttcatttgggaacatataatagcttgtaaacttttcagacagcagtaaatgtctgaaaaaatatcaaaaacagcataaagacaagattatgtagctctaattatacgtatataattataaaaaacaatgtgcaagggttatattttaaggtcttttaaaatctgattttgatcataccaaatgacataatattttttatggtagccttttactttcaagacttaattttcagacttgtacaagttccttcttacattctttccctctcacaccatcctactggagaaagcatacttttatgctaagatcttactttaagctttttatgtgaacaaaagatgtacatatagtaagtattacttccgtagtcctcaaatttactataacttttgtacttagtatatgttttatatttggaaaacagcactacgcttagttttcctgtagttcctgagtgatgtctgtgtgttccttgcctgcccttttttgtgagcacagattagtctgttatccatggctggcacttcacttatgatcctttctctgctagatttttatgcagctctctatgaagtttcatggcccatagatattcaaaagcaagatattctatacatatgtgtatatgtatatatactccttatgttaatactaaagtgtttatgctgagttgctgcctttccccgtcatgtatccatgtgcatgctcttagagaccttgaatggttgagggtaaagtgatttattagtaattctacttgccttgtgtatgtctgagctgaaaacaatcgtgattaagaaatttagaggtggctgggcgtggtggctcacgcctgtaatcccagcactttgggaggccgaggcaggcggatcacctgaggtcgggagttcaagaccagcctgaccaacatggagaaaccctgtctccactaaaaatacaaaattagccgggtgtggtggtgcatgcctgtaatcccagctactcggaagtttgagacgagaatctcttgaacccgggaggcggaggttgtggtgagccaagatcgtgccattgcactccagcctgggcaacaagagggaaactccgtttcaaaaaaaaaagaaaaagaaagaaattgagaagtaacgcctcataatatttgttcccagctttttaaattgaagctggttgcataatctggggaatagtcataatttcatgtgttatacagtttaaaaagcctgcaaaagtgactttgcttgtttactttctgcctcagattgactattttaaccaatattgtcacgactagatcatagctcctagtgaataacatgaggtgttttaaagttaggtctattacagaattaacataagcacaattttaattttatgatatctgatatgcctatctaatacatcttaatgcattaaatgctgcagataagaatcttgctatttttcaagtagacaacattagaaagttgaatcatgaactcattcaattcatcaagtcaaaagcactgagtgttttgctagtctagtgacatgggttattgtatttccgagaagtgcctctcatttctggggagttgtttacatataccctgcatttaaaccaattaaaacaatccaagtttctttaaaaa

SEQ ID NO: 349624 - DNA, 4665 bp, Homo sapiens
agggagctcagcggagctgcgcgcctccgcctccagctcccctgccgcagcgcgccgcagccgggcgtccccgcgcgggcgccggagaggaaggaaggctggcagcctcgtcacgtgtccgctgcagtcgcgaaacagttccggtggtgaggagacctttccaaatataagaggaataaagaagtcacctccccagctgtcatcatcttccagcagattgagcaagaatattttgagcactacaggaaagacagtccatcaaacccgagatgatgatcagccacgtgattttttcaagaagaggaatagggtgaatgaatctcatcagaaaagcagctcctgggacctacgagatatggccctgcttctgaacgcagagaacaaaacggaagccgtgccccgagtgggaggacttcttgggaagtatatcgatagacttattcagcttgagtggctgcaagtccagactgtacagtgtgaaaaagcaaaggggggcaaagcaaggccccccactgcccctgggacctcaggggcactgaaaagccctgggagaagtaagctaattgctagtgctctgtccaagccactacctcaccaggaaggggcttcaaagtcaggcccttcccgaaagaaagcttttcaccatgaagaaatccacccatcacattatgcatttgagacttcccctagacccattgatgtgcttggtggtaccaggttttgttctcagaggcaaacccttgaaatgaggacagaagaaaagaaaaagaaatcaagtaagagtacgaagctgcagcgctgggatctgtccggcagtggaagcagctctaaggtggaaaccagcggtcacattcgagttcccaaacaggcagctgtgattctggactcagcagattcctgtaaggcctccaaaacacaagcacatgcacatcctaggaaaaagggaaaggcagagagctgtggtcatgccactgtatcgagtgagaaaaaactgaaaacaaacggagtaaagcaaaacacatataaactaaaataaatatctaaaatgctgaattgccaagacctgcaggtacctcaatgttagagcgcttccaaaagtcaaaatactgtgaattttaaggaattttacaaatactgacatttaagtagttgactggcatttttgtccacctttatttctaccctgagtggggttattttcaaagggaagtgtctttcaataagcctttctttgtattgtcagtcttaggcaaatgagagccctttagataaaaattatgtaaaatatgtgccatataaaggaataaaatggcacctctccagggaaagtgtcagtgaaacctcagctacagtagccggtctgtgtagagcagctagtggtgttacctccccattttcacatgcacgtaagtatatgaaatagtgcagactgtttcaaatggtgtggaatcctaaatgtttaaaataaggtccttcttgcccactccctcgcttacttttttataaactcctcaagcaaaatttctgttcattttacccttaggagaagctttagttcttcctcaagtcagggagtagtgagtttgtattttgagtagtcatttctcactaagctggttgctttctagagagacagtggaatctagtactttaatacattttctctgacatggttttttttttcttttttgaggggcattttaaacttagaggtggtggtaaaacctacttttgagttctccgaactgaggttaaaataacttgcagaattttccaaagtcaatgggcttagcatgattactgctgtttggtggggctgagaatgaaatatttgacattctggaattgctggcatgtaaagcttctccagagaggcaccccagggaaatcactctttacaatttggtaaaggaagggcctgtaaaaggatcaaaacacatggacctacattcagtgtaatagttacaaagttactgatttgggttccacaccctgtggtccttagtcaaaaataatgatctgtttcagtttgcaagagcaggattttattattttgcttggggtgaggggcgggagagtggaatatgagtaaggttgctgaatgaattctaaactcgcttatctggtcttcaggcttcccaactctctccaagccttcttatttcactgcagttaaataacatcttcttggttcctatagttgtgctgtgagttttctgttcatatttgcgcagtgtattttaatacggcccatgtcattatagttgattttatccctttaaacaattactgtatttgtttttgacgtagaggtttcaattttttcaccttgggggcaaatgaaaaacttggcatttttcatttgggaacatataatagcttgtaaacttttcagacagcagtaaatgtctgaaaaaatatcaaaaacagcataaagacaagattatgtagctctaattatacgtatataattataaaaaacaatgtgcaagggttatattttaaggtcttttaaaatctgattttgatcataccaaatgacataatattttttatggtagccttttactttcaagacttaattttcagacttgtacaagttccttcttacattctttccctctcacaccatcctactggagaaagcatacttttatgctaagatcttactttaagctttttatgtgaacaaaagatgtacatatagtaagtattacttccgtagtcctcaaatttactataacttttgtacttagtatatgttttatatttggaaaacagcactacgcttagttttcctgtagttcctgagtgatgtctgtgtgttccttgcctgcccttttttgtgagcacagattagtctgttatccatggctggcacttcacttatgatcctttctctgctagatttttatgcagctctctatgaagtttcatggcccatagatattcaaaagcaagatattctatacatatgtgtatatgtatatatactccttatgttaatactaaagtgtttatgctgagttgctgcctttccccgtcatgtatccatgtgcatgctcttagagaccttgaatggttgagggtaaagtgatttattagtaattctacttgccttgtgtatgtctgagctgaaaacaatcgtgattaagaaatttagaggtggctgggcgtggtggctcacgcctgtaatcccagcactttgggaggccgaggcaggcggatcacctgaggtcgggagttcaagaccagcctgaccaacatggagaaaccctgtctccactaaaaatacaaaattagccgggtgtggtggtgcatgcctgtaatcccagctactcggaagtttgagacgagaatctcttgaacccgggaggcggaggttgtggtgagccaagatcgtgccattgcactccagcctgggcaacaagagggaaactccgtttcaaaaaaaaaagaaaaagaaagaaattgagaagtaacgcctcataatatttgttcccagctttttaaattgaagctggttgcataatctggggaatagtcataatttcatgtgttatacagtttaaaaagcctgcaaaagtgactttgcttgtttactttctgcctcagattgactattttaaccaatattgtcacgactagatcatagctcctagtgaataacatgaggtgttttaaagttaggtctattacagaattaacataagcacaattttaattttatgatatctgatatgcctatctaatacatcttaatgcattaaatgctgcagataagaatcttgctatttttcaagtagacaacattagaaagttgaatcatgaactcattcaattcatcaagtcaaaagcactgagtgttttgctagtctagtgacatgggttattgtatttccgagaagtgcctctcatttctggggagttgtttacatataccctgcatttaaaccaattaaaacaatccaagtttctttaaaaaaaaaaagaaaaagaaaaagaaaaagaaaaatattttaggcttagaattatctaatggaaaaaatgtaaaaaagtacaaaaatgaactaaaagtatatcagtatttgcagtatttgctgtgattacttaggtttagactttctcaacttcttagatgactaaatgggctgaagacttgtaactaacttgaataggatagacttcataccctgtgacaaaaaggatggggaagagaatatcattggtcttgccatatacctcctagctaaaaggaaaatggtttgtagttgttcttgggcctactgtgttgcttttcagaaggacataagactttctactttatctgatatggatatcgtctacttcctcattcctttatgctcacttatggagtagttacatagaaatataactcttggtggtactgtattttaaggtaattcagaagcagtatgtattatttatgtacatgtacaggacaccattcaaaatggcttgaaaatattcagcatgtttgttatttgctgttatattgtatgtttagttttgtatgtgataaacagaattgatgtaagtttttgtggacttgaatttctccttccttgagatcaattaaacagcagaaaaatcttcttggttataatgtcgacgcgggccgccattttggtattattcgtcgac

SEQ ID NO: 349625 - DNA, 2051 bp, Homo sapiens
agggagctcagcggagctgcgcgcctccgcctccagctcccctgccgcagcgcgccgcagccgggcgtccccgcgcgggcgccggagaggaaggaaggctggcagcctcgtcacgtgtccgctgcagtcgcgaaacagttccggtggtgaggagacctttccaaatataagaggaataaagaagtcacctccccagctgtcatcatcttccagcagattgagcaagaatattttgagcactacaggaaagacagtccatcaaacccgagatgatgatcagccacgtgattttttcaagaagaggaatagggtgaatgaatctcatcagaaaagcagcaatatgaatgctggcccatcttggaataaagtgcaacattcaaagaattcttcaggaaaaaggcagagtaaatcccaagtaccccacgcttcttcccagccgagaagcagcctcacagctgtcacccagcctactgaagaaaaacttaaagaaagcatttccccggaagcaagacgcaaaaggaatccactcggttccaggtgtcagggggcctcagggaataaactgtttcttgattttcagtcaatgaaaattattaaagagaatgctgatgaggacagtgcaagtgatctctctgattcggaaagaattcccattcctccttctcccctcacacctccagatctcaatcttcgagctgaagaaattgatccagtttactttgatcttcaccctggtcagggccatacaaaacctgaatactattatcctaatttccttccatcccctttcagctcctgggacctacgagatatggccctgcttctgaacgcagagaacaaaacggaagccgtgccccgagtgggaggacttcttgggaagtatatcgatagatttttaaattgaagctggttgcataatctggggaatagtcataatttcatgtgttatacagtttaaaaagcctgcaaaagtgactttgcttgtttactttctgcctcagattgactattttaaccaatattgtcacgactagatcatagctcctagtgaataacatgaggtgttttaaagttaggtctattacagaattaacataagcacaattttaattttatgatatctgatatgcctatctaatacatcttaatgcattaaatgctgcagataagaatcttgctatttttcaagtagacaacattagaaagttgaatcatgaactcattcaattcatcaagtcaaaagcactgagtgttttgctagtctagtgacatgggttattgtatttccgagaagtgcctctcatttctggggagttgtttacatataccctgcatttaaaccaattaaaacaatccaagtttctttaaaaaaaaaaagaaaaagaaaaagaaaaagaaaaatattttaggcttagaattatctaatggaaaaaatgtaaaaaagtacaaaaatgaactaaaagtatatcagtatttgcagtatttgctgtgattacttaggtttagactttctcaacttcttagatgactaaatgggctgaagacttgtaactaacttgaataggatagacttcataccctgtgacaaaaaggatggggaagagaatatcattggtcttgccatatacctcctagctaaaaggaaaatggtttgtagttgttcttgggcctactgtgttgcttttcagaaggacataagactttctactttatctgatatggatatcgtctacttcctcattcctttatgctcacttatggagtagttacatagaaatataactcttggtggtactgtattttaaggtaattcagaagcagtatgtattatttatgtacatgtacaggacaccattcaaaatggcttgaaaatattcagcatgtttgttatttgctgttatattgtatgtttagttttgtatgtgataaacagaattgatgtaagtttttgtggacttgaatttctccttccttgagatcaattaaacagcagaaaaatcttcttggttataatgtcgacgcgggccgccattttggtattattcgtcgac

SEQ ID NO: 349626 - DNA, 434 bp, Homo sapiens
ctctctgagctctgaaagttctttaatctgtaaaaatgagattattatccttgttttgtaggcttgatacaaggaacagcagtaataatgtatataaagggtttagcacagtgcctacatttggtaaatttttaaataaataaaggcagctcatatggtagtatttcaccagtctcctctcctcccatctttgagctttcatacatggtattttcattctctagaattctcttcctcttactttactgcctcttcctctccctactccactttttaaaaacatattcatgttttaggttaagcaccacctcctctaagaagccttcctttgaccccctccctggaccagactaggtttcccctagcactgtgaatttatctttaatatggagtggtaatcatactatgttgtatttgccaactgactgaactcc

SEQ ID NO: 349627 - DNA, 732 bp, Homo sapiens
ctgtctcccgttctacctctgccacccctggaactgcaagaccaactctcctcttccttctcagtctactcagtgtgaagataaggatggagacatttatgatgatccacttccacttaatgaatagcttgtgcagacataagagccagttcagtgttttggcagcaaatggagtttgttgatagcctgcatggccaacccaagatgccagaatggttatctacacacccttctcatggcaatcgagttgagtacttggatagacttatacctcaggctctcaaaattagagagatgtgtaattgtccaccactgtctaatccagaccctcgattactattcaaactcagcacgaagcattttcttgaagaatcagagaaagaagacctaaatatcacgaagaaacagaaaatggatactcttcctattcaaaaacaggagcaaataccattaacatacatagttgagaaaagaacgggcagttgaattaaaatttatgagacacaagatatatgaagaatgttgcagtccttatcattttatgttactttttaaaaaatgatgtttgaagtgaaaaaaaaaaggatattcagggtcaaatcatgtacattacagatattatctaaattcttctagaatttatttttcatgaaatattgatgtattttaatctatgttaaaatatcttcaatgaggaaaatgtcacagaataaatttatattacacatttta

SEQ ID NO: 349628 - DNA, 659 bp, Homo sapiens
  misc_feature (42)..(43): n is a, c, g, or t
  misc_feature (45)..(46): n is a, c, g, or t
cgggagggcccgccttggccaagcagggcttcgtcttttttnngnngtttccgtcttgtgacccactttagaccagttcagtgttttggcagcaaatggagtttgttgatagcctgcatggccaacccaagatgccagaatggttatctacacacccttctcatggcaatcgagttgagtacttggatagacttatacctcaggctctcaaaattagagagatgtgtaattgtccaccactgtctaatccagaccctcgattactattcaaactcagcacgaagcattttcttgaagaatcagagaaagaagacctaaatatcacgaagaaacagaaaatggatactcttcctattcaaaaacaggagcaaataccattaacatacatagttgagaaaagaacgggcagttgaattaaaatttatgagacacaagatatatgaagaatgttgcagtccttatcattttatgttactttttaaaaaatgatgtttgaagtgaaaaaaaaaaggatattcagggtcaaatcatgtacattacagatattatctaaattcttctagaatttatttttcatgaaatattgatgtattttaatctatgttaaaatatcttcaatgaggaaaatgtcacagaataaatttatattacacatttta

SEQ ID NO: 349629 - DNA, 1969 bp, Homo sapiens
  misc_feature (69)..(69): n is a, c, g, or t
agcgaagggcgccccggccggtatggcgggcaggaagtgcgagtgcgcgcctgcgcataggtcgggtcngcggtgtcaccgctttcgcttctgcttgatcctcacggtgacgcttttccccagcttttccgagtaatcaagtgaaaaaatgagcttcatctgtggattgcagtctgctgctagaaaccatgttttcttccgatttaattcactgtctaactggagaaaatgtaacacattagcatccacctcacggggctgtcatcaagtacaagttaaccatatagtaaataagtatcagggactgggagtaaatcagtgtgacaggtggagttttctgcctggaaactttcatttttatagtacttttaacaacaaaagaacaggaggcctctcaagtaccaaaagtaaggaaatttggaggattaccagcaaatgtactgtatggaatgatgctttttcaagacagctgctaataaaagaagttacagcagtccctagtctgtcagtattgcatcctctaagccctgcttccataagagctattaggaatttccatacttctccacggtttcaagctgctccggttcctctcttgttgatgattcttaaaccagtacagaagttatttgcaatcattgtaggcaggggcataaggaaatggtggcaggcacttcctcctaacaagaaggaagtagttaaagaaaatataaggaagaataaatggaagctattccttggtttgagtagttttggattgctctttgtggtgttttattttactcacctggaagtaagtccaatcacaggaaggagcaagctactattattggggaaagaacagttcagacttttatcggaactggaatatgaagcatggatggaagaatttaaaaatgatatgctaactgagaaagatgcccgatacctggctgttaaagaagtgctttgtcatctaattgaatgcaataaagatgttccagggatctctcagatcaattgggttattcatgtggttgattccccaattattaatgccttcgtgcttccaaatggacaaatgtttgttttcactggatttttaaatagtgtaaccgatattcatcaactttctttccttctgggccatgaaatagcacatgcagtacttgggcatgctgcagaaaaggctggcatggttcatttgttggatttcctaggtatgattttcctcacaatgatttgggccatttgtcctcgagatagcttggcacttttgtgccagtggatacagtctaaattgcaggagtatatgtttaatagaccatacagcagaaaattggaggccgaagctgacaaaattggactactgcttgctgcaaaggcttgtgcagacataagagccagttcagtgttttggcagcaaatggagtttgttgatagcctgcatggccaacccaagatgccagaatggttatctacacacccttctcatggcaatcgagttgagtacttggatagacttatacctcaggctctcaaaattagagagatgtgtaattgtccaccactgtctaatccagaccctcgattactattcaaactcagcacgaagcattttcttgaagaatcagagaaagaagacctaaatatcacgaagaaacagaaaatggatactcttcctattcaaaaacaggagcaaataccattaacatacatagttgagaaaagaacgggcagttgaattaaaatttatgagacacaagatatatgaagaatgttgcagtccttatcattttatgttactttttaaaaaatgatgtttgaagtgaaaaaaaaaaggatattcagggtcaaatcatgtacattacagatattatctaaattcttctagaatttatttttcatgaaatattgatgtattttaatctatgttaaaatatcttcaatgaggaaaatgtcacagaataaatttatattacacatttta

SEQ ID NO: 349630 - DNA, 1998 bp, Homo sapiens
  misc_feature (69)..(69): n is a, c, g, or t
agcgaagggcgccccggccggtatggcgggcaggaagtgcgagtgcgcgcctgcgcataggtcgggtcngcggtgtcaccgctttcgcttctgcttgatcctcacggtgacgcttttccccagcttttccgagtaggatcgtgcccaggggaggaggcagagtaatcaagtgaaaaaatgagcttcatctgtggattgcagtctgctgctagaaaccatgttttcttccgatttaattcactgtctaactggagaaaatgtaacacattagcatccacctcacggggctgtcatcaagtacaagttaaccatatagtaaataagtatcagggactgggagtaaatcagtgtgacaggtggagttttctgcctggaaactttcatttttatagtacttttaacaacaaaagaacaggaggcctctcaagtaccaaaagtaaggaaatttggaggattaccagcaaatgtactgtatggaatgatgctttttcaagacagctgctaataaaagaagttacagcagtccctagtctgtcagtattgcatcctctaagccctgcttccataagagctattaggaatttccatacttctccacggtttcaagctgctccggttcctctcttgttgatgattcttaaaccagtacagaagttatttgcaatcattgtaggcaggggcataaggaaatggtggcaggcacttcctcctaacaagaaggaagtagttaaagaaaatataaggaagaataaatggaagctattccttggtttgagtagttttggattgctctttgtggtgttttattttactcacctggaagtaagtccaatcacaggaaggagcaagctactattattggggaaagaacagttcagacttttatcggaactggaatatgaagcatggatggaagaatttaaaaatgatatgctaactgagaaagatgcccgatacctggctgttaaagaagtgctttgtcatctaattgaatgcaataaagatgttccagggatctctcagatcaattgggttattcatgtggttgattccccaattattaatgccttcgtgcttccaaatggacaaatgtttgttttcactggatttttaaatagtgtaaccgatattcatcaactttctttccttctgggccatgaaatagcacatgcagtacttgggcatgctgcagaaaaggctggcatggttcatttgttggatttcctaggtatgattttcctcacaatgatttgggccatttgtcctcgagatagcttggcacttttgtgccagtggatacagtctaaattgcaggagtatatgtttaatagaccatacagcagaaaattggaggccgaagctgacaaaattggactactgcttgctgcaaaggcttgtgcagacataagagccagttcagtgttttggcagcaaatggagtttgttgatagcctgcatggccaacccaagatgccagaatggttatctacacacccttctcatggcaatcgagttgagtacttggatagacttatacctcaggctctcaaaattagagagatgtgtaattgtccaccactgtctaatccagaccctcgattactattcaaactcagcacgaagcattttcttgaagaatcagagaaagaagacctaaatatcacgaagaaacagaaaatggatactcttcctattcaaaaacaggagcaaataccattaacatacatagttgagaaaagaacgggcagttgaattaaaatttatgagacacaagatatatgaagaatgttgcagtccttatcattttatgttactttttaaaaaatgatgtttgaagtgaaaaaaaaaaggatattcagggtcaaatcatgtacattacagatattatctaaattcttctagaatttatttttcatgaaatattgatgtattttaatctatgttaaaatatcttcaatgaggaaaatgtcacagaataaatttatattacacatttta

SEQ ID NO: 349631 - DNA, 1419 bp, Homo sapiens
  misc_feature (69)..(69): n is a, c, g, or t
agcgaagggcgccccggccggtatggcgggcaggaagtgcgagtgcgcgcctgcgcataggtcgggtcngcggtgtcaccgctttcgcttctgcttgagggcataaggaaatggtggcaggcacttcctcctaacaagaaggaagtagttaaagaaaatataaggaagaataaatggaagctattccttggtttgagtagttttggattgctctttgtggtgttttattttactcacctggaagtaagtccaatcacaggaaggagcaagctactattattggggaaagaacagttcagacttttatcggaactggaatatgaagcatggatggaagaatttaaaaatgatatgctaactgagaaagatgcccgatacctggctgttaaagaagtgctttgtcatctaattgaatgcaataaagatgttccagggatctctcagatcaattgggttattcatgtggttgattccccaattattaatgccttcgtgcttccaaatggacaaatgtttgttttcactggatttttaaatagtgtaaccgatattcatcaactttctttccttctgggccatgaaatagcacatgcagtacttgggcatgctgcagaaaaggctggcatggttcatttgttggatttcctaggtatgattttcctcacaatgatttgggccatttgtcctcgagatagcttggcacttttgtgccagtggatacagtctaaattgcaggagtatatgtttaatagaccatacagcagaaaattggaggccgaagctgacaaaattggactactgcttgctgcaaaggcttgtgcagacataagagccagttcagtgttttggcagcaaatggagtttgttgatagcctgcatggccaacccaagatgccagaatggttatctacacacccttctcatggcaatcgagttgagtacttggatagacttatacctcaggctctcaaaattagagagatgtgtaattgtccaccactgtctaatccagaccctcgattactattcaaactcagcacgaagcattttcttgaagaatcagagaaagaagacctaaatatcacgaagaaacagaaaatggatactcttcctattcaaaaacaggagcaaataccattaacatacatagttgagaaaagaacgggcagttgaattaaaatttatgagacacaagatatatgaagaatgttgcagtccttatcattttatgttactttttaaaaaatgatgtttgaagtgaaaaaaaaaaggatattcagggtcaaatcatgtacattacagatattatctaaattcttctagaatttatttttcatgaaatattgatgtattttaatctatgttaaaatatcttcaatgaggaaaatgtcacagaataaatttatattacacatttta

SEQ ID NO: 349632 - DNA, 2723 bp, Homo sapiens
  misc_feature (69)..(69): n is a, c, g, or t
agcgaagggcgccccggccggtatggcgggcaggaagtgcgagtgcgcgcctgcgcataggtcgggtcngcggtgtcaccgctttcgcttctgcttgagtaatcaagtgaaaaaatgagcttcatctgtggattgcagtctgctgctagaaaccatgttttcttccgatttaattcactgtctaactggagaaaatgtaacacattagcatccacctcacggggctgtcatcaagtacaagttaaccatatagtaaataagtatcagggactgggagtaaatcagtgtgacaggtggagttttctgcctggaaactttcatttttatagtacttttaacaacaaaagaacaggaggcctctcaagtaccaaaagtaaggaaatttggaggattaccagcaaatgtactgtatggaatgatgctttttcaagacagctgctaataaaagaagttacagcagtccctagtctgtcagtattgcatcctctaagccctgcttccataagagctattaggaatttccatacttctccacggtttcaagctgctccggttcctctcttgttgatgattcttaaaccagtacagaagttatttgcaatcattgtaggcaggggcataaggaaatggtggcaggcacttcctcctaacaagaaggaagtagttaaagaaaatataaggaagaataaatggaagctattccttggtttgagtagttttggattgctctttgtggtgttttattttactcacctggaagtaagtccaatcacaggaaggagcaagctactattattggggaaagaacagttcagacttttatcggaactggaatatgaagcatggatggaagaatttaaaaatgatatgctaactgagaaagatgcccgatacctggctgttaaagaagtgctttgtcatctaattgaatgcaataaagatgttccagggatctctcagatcaattgggttattcatgtggttgattccccaattattaatgccttcgtgcttccaaatggacaaatgtttgttttcactggatttttaaatagtgtaaccgatattcatcaactttctttccttctgggccatgaaatagcacatgcagtacttgggcatgctgcagaaaaggctggcatggttcatttgttggatttcctaggtatgattttcctcacaatgatttgggccatttgtcctcgagatagcttggcacttttgtgccagtggatacagtctaaattgcaggagtatatgtttaatagaccatacagcagaaaattggaggccgaagctgacaaaattggactactgcttgctgcaaaggcttgtgcagacataagagccagttcagtgttttggcagcaaatggagtttgttgatagcctgcatggccaacccaagatgccagaatggttatctacacacccttctcatggcaatcgagttgagtacttggatagacttatacctcaggctctcaaaattagagagatgtgtaattgtccaccactgtctaatccagaccctcgattactattcaaactcagcacgaagcattttcttgaagaatcagagaaagaagacctaaatatcacgaagaaacagaaaatggatactcttcctattcaaaaacaggagcaaataccattaacatacatagttgagaaaagaacgggcagttgaattaaaatttatgagacacaagatatatgaagaatgttgcagtccttatcattttatgttactttttaaaaaatgatgtttgaagtgaaaaaaaaaaggatattcagggtcaaatcatgtacattacagatattatctaaattcttctagaatttatttttcatgaaatattgatgtattttaatctatgttaaaatatcttcaatgaggaaaatgtcacagaataaatttatattacacattttactctgtcttctacttgcttttgatttagaaggcagacccctagtggatgagaaatgagcccatacggtagtttttatagtagagaatgtttcaactgagcctaaactggatttctaagtctgggtcgttatgatgaagggggaaacagtctgaaggtatctgtttgcaggaaatagtttgcattggggtgggattatgtggaaaagggggcctcaggatagagaatttccttgtcttcacctgtggatgactggagaaaatgctactggcagaagccattttcatagggaggcaaaagaagtacagtttgtggttcagatgacaaagcaagaaacagaattgggggagagggcatttccacagagatacagcgtgttcctggtgcactgaaatcttaacagaagtttatgtcatttggttgctccatgagattaccatttgggaatctcgggttcccagagaagaaaaagaggcaaaggcaaggcactgtccctcaaaagaggctgaggcaaggcactgtccccaagttgaccttcctgagcagcagatatcaacaagacgactggaggaaaacgacaagagaagcagcacaagacatacccccagtggtgcccagaaattgctgcattatataaatgtggaaatacgagttatttaatatttgtattcccaaactagtgaagtctagtgatgcttaggttatatttctaagaagggcatttttcttgaaatacattatattaaataaatattttcttagagaattaaagaggaaagggactactttg

SEQ ID NO: 349633 - DNA, 2091 bp, Homo sapiens
  misc_feature (69)..(69): n is a, c, g, or t
agcgaagggcgccccggccggtatggcgggcaggaagtgcgagtgcgcgcctgcgcataggtcgggtcngcggtgtcaccgctttcgcttctgcttgagtaatcaagtgaaaaaatgagcttcatctgtggattgcagtctgctgctagaaaccatgttttcttccgatttaattcactgtctaactggagaaaatgtaacacattagcatccacctcacggggctgtcatcaagtacaagttaaccatatagtaaataagtatcagggactgggagtaaatcagtgtgacaggtggagttttctgcctggaaactttcatttttatagtacttttaacaacaaaagaacaggaggcctctcaagtaccaaaagtaaggaaatttggaggattaccagcaaatgtactgtatggaatgatgctttttcaagacagctgctaataaaagaagttacagcagtccctagtctgtcagtattgcatcctctaagccctgcttccataagagctattaggaatttccatacttctccacggtttcaagctgctccggttcctctcttgttgatgattcttaaaccagtacagaagttatttgcaatcattgtaggcaggggcataaggaaatggtggcaggcacttcctcctaacaagaaggaagtagttaaagaaaatataaggaagaataaatggaagctattccttggtttgagtagttttggattgctctttgtggtgttttattttactcacctggaagtaagtccaatcacaggaaggagcaagctactattattggggaaagaacagttcagacttttatcggaactggaatatgaagcatggatggaagaatttaaaaatgatatgctaactgagaaagatgcccgatacctggctgttaaagaagtgctttgtcatctaattgaatgcaataaagatgttccagggatctctcagatcaattgggttattcatgtggttgattccccaattattaatgccttcgtgcttccaaatggacaaatgtttgttttcactggatttttaaatagtgtaaccgatattcatcaactttctttccttctgggccatgaaatagcacatgcagtacttgggcatgctgcagaaaaggctggcatggttcatttgttggatttcctaggtatgattttcctcacaatgatttgggccatttgtcctcgagatagcttggcacttttgtgccagtggatacagtctaaattgcaggagtatatgtttaatagaccatacagcagaaaattggaggccgaagctgacaaaattggactactgcttgctgcaaaggcttgtgcagacataagagccagttcagtgttttggcagcaaatggagtttgttgatagcctgcatggccaacccaagatgccagaatggttatctacacacccttctcatggcaatcgagttgagtacttggatagacttatacctcaggctctcaaaattagagagatgtgtaattgtccaccactgtctaatccagaccctcgattactattcaaactcagcacgaagcattttcttgaagaatcagagaaagaagacctaaatatcacgaagaaacagaaaatggatactcttcctattcaaaaacaggagcaaataccattaacatacatagttgagaaaagaacgggcagttgaattaaaatttatgagacacaagatatatgaagaatgttgcagtccttatcattttatgttactttttaaaaaatgatgtttgaagtgaaaaaaaaaaggatattcagggtcaaatcatgtacattacagatattatctaaattcttctagaatttatttttcatgaaatattgatgtattttaatctatgttaaaatatcttcaatgaggaaaatgtcacagaataaatttatattacacattttaaaaaaaaaaagcggactcgttggccttcacggcggagctttggcgggcgttttcgtttattgaggggtgtatcttaggcctcgcccactgactcgccaggattaggcctttggctgtcagaagccgtttcactcctctcacggggtaattggttat

SEQ ID NO: 349634 - DNA, 1581 bp, Homo sapiens
  misc_feature (69)..(69): n is a, c, g, or t
agcgaagggcgccccggccggtatggcgggcaggaagtgcgagtgcgcgcctgcgcataggtcgggtcngcggtgtcaccgctttcgcttctgcttgagtaatcaagtgaaaaaatgagcttcatctgtggattgcagtctgctgctagaaaccatgttttcttccgatttaattcactgtctaactggagaaaatgtaacacattagcatccacctcacggggctgtcatcaagtacaagttaaccatatagtaaataagtatcagggactgggagtaaatcagtgtgacaggtggagttttctgcctggaaactttcatttttatagtacttttaacaacaaaagaacaggaggcctctcaagtaccaaaagtaaggaaatttggaggattaccagcaaatgtactgtatggaatgatgctttttcaagacagctgctaataaaagaagttacagcagtccctagtctgtcagtattgcatcctctaagccctgcttccataagagctattaggaatttccatacttctccacggtttcaagctgctccggttcctctcttgttgatgattcttaaaccagtacagaagttatttgcaatcattgtaggcaggggcataaggaaatggtggcaggcacttcctcctaacaagaaggaagtagttaaagaaaatataaggaagaataaatggaagctattccttggtttgagtagttttggattgctctttgtggtgttttattttactcacctggaagtaagtccaatcacaggaaggagcaagctactattattggggaaagaacagttcagacttttatcggaactggaatatgaagcatggatggaagaatttaaaaatgatatgctaactgagaaagatgcccgatacctggctgttaaagaagtgctttgtcatctaattgaatgcaataaagatgttccagggatctctcagatcaattgggttattcatgtggttgattccccaattattaatgccttcgtgcttccaaatggacaaatgtttgttttcactggatttttaaatagtgtaaccgatattcatcaactttctttccttctgggccatgaaatagcacatgcagtacttgggcatgctgcagaaaaggctggcatggttcatttgttggatttcctaggtatgattttcctcacaatgatttgggccatttgtcctcgagatagcttggcacttttgtgccagtggatacagtctaaattgcaggagtatatgtttaatagaccatacagcagaaaattggaggccgaagctgacaaaattggactactgcttgctgcaaaggcttgtgcagacataagagccagttcagtgttttggcagcaaatggagtttgttgatagcctgcatggccaacccaagatgccagaatggttatctacacacccttctcatggcaatcgagttgagtacttggatagacttatacctcaggatatgcatgtatccccaagggcagccagggactttgaaagagcccagtggaacctacacctaagtggaaatggaattctttccttttattaaaaccttcag

SEQ ID NO: 349635 - DNA, 1140 bp, Homo sapiens
  misc_feature (69)..(69): n is a, c, g, or t
agcgaagggcgccccggccggtatggcgggcaggaagtgcgagtgcgcgcctgcgcataggtcgggtcngcggtgtcaccgctttcgcttctgcttgagggcataaggaaatggtggcaggcacttcctcctaacaagaaggaagtagttaaagaaaatataaggaagaataaatggaagctattccttggtttgagtagttttggattgctctttgtggtgttttattttactcacctggaagtaagtccaatcacaggaaggagcaagctactattattggggaaagaacagttcagacttttatcggaactggaatatgaagcatggatggaagaatttaaaaatgatatgctaactgagaaagatgcccgatacctggctgttaaagaagtgctttgtcatctaattgaatgcaataaagatgttccagggatctctcagatcaattgggttattcatgtggttgattccccaattattaatgccttcgtgcttccaaatggacaaatgtttgttttcactggatttttaaatagtgtaaccgatattcatcaactttctttccttctgggccatgaaatagcacatgcagtacttgggcatgcttatatgtttaatagaccatacagcagaaaattggaggccgaagctgacaaaattggactactgcttgctgcaaaggctctcaaaattagagagatgtgtaattgtccaccactgtctaatccagaccctcgattactattcaaactcagcacgaagcattttcttgaagaatcagagaaagaagacctaaatatcacgaagaaacagaaaatggatactcttcctattcaaaaacaggagcaaataccattaacatacatagttgagaaaagaacgggcagttgaattaaaatttatgagacacaagatatatgaagaatgttgcagtccttatcattttatgttactttttaaaaaatgatgtttgaagtgaaaaaaaaaaggatattcagggtcaaatcatgtacattacagatattatctaaattcttctagaatttatttttcatgaaatattgatgtattttaatctatgttaaaatatcttcaatgaggaaaatgtcacagaataaatttatattacacatttta

SEQ ID NO: 349636 - DNA, 485 bp, Homo sapiens
catgaaaacaactgttcactgtagatttttcagtggttctcttttatgtgttataatcaagataccttttattaaaaaaataacaatacattctttgttttacatggagcatattagggattactgaaacaatctgaatacattgatgtatatatatagtatttttttattttattatttctttataggctctcaaaattagagagatgtgtaattgtccaccactgtctaatccagaccctcgattactattcaaactcagcacgaagcattttcttgaagaatcagagaaagaagacctaaatatcacgaagaaacagaaaatggatactcttcctattcaaaaacaggagcaaataccattaacatacatagttgagaaaagaacgggcagttgaattaaaatttatgagacacaagatatatgaagaatgttgcagtccttatcattttatgttactttttaaaaaatgatgtttgaagtg

SEQ ID NO: 349637 - DNA, 1935 bp, Homo sapiens
  misc_feature (69)..(69): n is a, c, g, or t
agcgaagggcgccccggccggtatggcgggcaggaagtgcgagtgcgcgcctgcgcataggtcgggtcngcggtgtcaccgctttcgcttctgcttgagtaatcaagtgaaaaaatgagcttcatctgtggattgcagtctgctgctagaaaccatgttttcttccgatttaattcactgtctaactggagaaaatgtaacacattagcatccacctcacggggctgtcatcaagtacaagttaaccatatagtaaataagtatcagggactgggagtaaatcagtgtgacaggtggagttttctgcctggaaactttcatttttatagtacttttaacaacaaaagaacaggaggcctctcaagtaccaaaagtaaggaaatttggaggattaccagcaaatgtactgtatggaatgatgctttttcaagacagctgctaataaaagaagttacagcagtccctagtctgtcagtattgcatcctctaagccctgcttccataagagctattaggaatttccatacttctccacggtttcaagctgctccggttcctctcttgttgatgattcttaaaccagtacagaagttatttgcaatcattgtaggcaggggcataaggaaatggtggcaggcacttcctcctaacaagaaggaagtagttaaagaaaatataaggaagaataaatggaagctattccttggtttgagtagttttggattgctctttgtggtgttttattttactcacctggaagtaagtccaatcacaggaaggagcaagctactattattggggaaagaacagttcagacttttatcggaactggaatatgaagcatggatggaagaatttaaaaatgatatgctaactgagaaagatgcccgatacctggctgttaaagaagtgctttgtcatctaattgaatgcaataaagatgttccagggatctctcagatcaattgggttattcatgtggttgattccccaattattaatgccttcgtgcttccaaatggacaaatgtttgttttcactggatttttaaatagtgtaaccgatattcatcaactttctttccttctgggccatgaaatagcacatgcagtacttgggcatgctgcagaaaaggctggcatggttcatttgttggatttcctaggtatgattttcctcacaatgatttgggccatttgtcctcgagatagcttggcacttttgtgccagtggatacagtctaaattgcaggagtatatgtttaatagaccatacagcagaaaattggaggccgaagctgacaaaattggactactgcttgctgcaaaggcttgtgcagacataagagccagttcagtgttttggcagcaaatggagtttgttgatagcctgcatggccaacccaagatgccagaatggttatctacacacccttctcatggcaatcgagttgagtacttggatagacttatacctcaggctctcaaaattagagagatgtgtaattgtccaccactgtctaatccagaccctcgattactattcaaactcagcacgaagcattttcttgaagaatcagagaaagaagacctaaatatcacgaagaaacagaaaatggatactcttcctattcaaaaacaggagcaaataccattaacatacatagttgagaaaagaacgggcagttgaattaaaatttatgagacacaagatatatgaagaatgttgcagtccttatcattttatgttactttttaaaaaatgatgtttgaagtgaaaaaaaaaaggatattcagggtcaaatcatgtacattacagatattatctaaattcttctagaatttatttttcatgaaatattgatgtattttaatctatgttaaaatatcttcaatgaggaaaatgtcacagaataaatttatattacacatttta

SEQ ID NO: 349638 - DNA, 2008 bp, Homo sapiens
gccttcctgaactcttcagctactcatggatgtctttttaagaatgcatacagttctcattctgttgcccacgccggagtgtagtggcacaattttggctcactgcagtctcttgcctcccaggttcaagtgattctcctgcctcagcctcccaagtagctgggtttacaggtaatcaagtgaaaaaatgagcttcatctgtggattgcagtctgctgctagaaaccatgttttcttccgatttaattcactgtctaactggagaaaatgtaacacattagcatccacctcacggggctgtcatcaagtacaagttaaccatatagtaaataagtatcagggactgggagtaaatcagtgtgacaggtggagttttctgcctggaaactttcatttttatagtacttttaacaacaaaagaacaggaggcctctcaagtaccaaaagtaaggaaatttggaggattaccagcaaatgtactgtatggaatgatgctttttcaagacagctgctaataaaagaagttacagcagtccctagtctgtcagtattgcatcctctaagccctgcttccataagagctattaggaatttccatacttctccacggtttcaagctgctccggttcctctcttgttgatgattcttaaaccagtacagaagttatttgcaatcattgtaggcaggggcataaggaaatggtggcaggcacttcctcctaacaagaaggaagtagttaaagaaaatataaggaagaataaatggaagctattccttggtttgagtagttttggattgctctttgtggtgttttattttactcacctggaagtaagtccaatcacaggaaggagcaagctactattattggggaaagaacagttcagacttttatcggaactggaatatgaagcatggatggaagaatttaaaaatgatatgctaactgagaaagatgcccgatacctggctgttaaagaagtgctttgtcatctaattgaatgcaataaagatgttccagggatctctcagatcaattgggttattcatgtggttgattccccaattattaatgccttcgtgcttccaaatggacaaatgtttgttttcactggatttttaaatagtgtaaccgatattcatcaactttctttccttctgggccatgaaatagcacatgcagtacttgggcatgctgcagaaaaggctggcatggttcatttgttggatttcctaggtatgattttcctcacaatgatttgggccatttgtcctcgagatagcttggcacttttgtgccagtggatacagtctaaattgcaggagtatatgtttaatagaccatacagcagaaaattggaggccgaagctgacaaaattggactactgcttgctgcaaaggcttgtgcagacataagagccagttcagtgttttggcagcaaatggagtttgttgatagcctgcatggccaacccaagatgccagaatggttatctacacacccttctcatggcaatcgagttgagtacttggatagacttatacctcaggctctcaaaattagagagatgtgtaattgtccaccactgtctaatccagaccctcgattactattcaaactcagcacgaagcattttcttgaagaatcagagaaagaagacctaaatatcacgaagaaacagaaaatggatactcttcctattcaaaaacaggagcaaataccattaacatacatagttgagaaaagaacgggcagttgaattaaaatttatgagacacaagatatatgaagaatgttgcagtccttatcattttatgttactttttaaaaaatgatgtttgaagtgaaaaaaaaaaggatattcagggtcaaatcatgtacattacagatattatctaaattcttctagaatttatttttcatgaaatattgatgtattttaatctatgttaaaatatcttcaatgaggaaaatgtcacagaataaatttatattacacatttta

SEQ ID NO: 349639 - DNA, 1806 bp, Homo sapiens
  misc_feature (69)..(69): n is a, c, g, or t
agcgaagggcgccccggccggtatggcgggcaggaagtgcgagtgcgcgcctgcgcataggtcgggtcngcggtgtcaccgctttcgcttctgcttgagtaatcaagtgaaaaaatgagcttcatctgtggattgcagtctgctgctagaaaccatgttttcttccgatttaattcactgtctaactggagaaaatgtaacacattagcatccacctcacggggctgtcatcaagtacaagttaaccatatagtaaataagtatcagggactgggagtaaatcagtgtgacaggtggagttttctgcctggaaactttcatttttatagtacttttaacaacaaaagaacaggaggcctctcaagtaccaaaagtaaggaaatttggaggattaccagcaaatgtactgtatggaatgatgctttttcaagacagctgctaataaaagaagttacagcagtccctagtctgtcagtattgcatcctctaagccctgcttccataagagctattaggaatttccatacttctccacggtttcaagctgctccggttcctctcttgttgatgattcttaaaccagtacagaagttatttgcaatcattgtaggcaggggcataaggaaatggtggcaggcacttcctcctaacaagaaggaagtagttaaagaaaatataaggaagaataaatggaagctattccttggtttgagtagttttggattgctctttgtggtgttttattttactcacctggaagtaagtccaatcacaggaaggagcaagctactattattggggaaagaacagttcagacttttatcggaactggaatatgaagcatggatggaagaatttaaaaatgatatgctaactgagaaagatgcccgatacctggctgttaaagaagtgctttgtcatctaattgaatgcaataaagatgttccagggatctctcagatcaattgggttattcatgtggttgattccccaattattaatgccttcgtgcttccaaatggacaaatgtttgttttcactggatttttaaatagtgtaaccgatattcatcaactttctttccttctgggccatgaaatagcacatgcagtacttgggcatgcttatatgtttaatagaccatacagcagaaaattggaggccgaagctgacaaaattggactactgcttgctgcaaaggcttgtgcagacataagagccagttcagtgttttggcagcaaatggagtttgttgatagcctgcatggccaacccaagatgccagaatggttatctacacacccttctcatggcaatcgagttgagtacttggatagacttatacctcaggctctcaaaattagagagatgtgtaattgtccaccactgtctaatccagaccctcgattactattcaaactcagcacgaagcattttcttgaagaatcagagaaagaagacctaaatatcacgaagaaacagaaaatggatactcttcctattcaaaaacaggagcaaataccattaacatacatagttgagaaaagaacgggcagttgaattaaaatttatgagacacaagatatatgaagaatgttgcagtccttatcattttatgttactttttaaaaaatgatgtttgaagtgaaaaaaaaaaggatattcagggtcaaatcatgtacattacagatattatctaaattcttctagaatttatttttcatgaaatattgatgtattttaatctatgttaaaatatcttcaatgaggaaaatgtcacagaataaatttatattacacatttta

SEQ ID NO: 349640 - DNA, 2086 bp, Homo sapiens
  misc_feature (69)..(69): n is a, c, g, or t
agcgaagggcgccccggccggtatggcgggcaggaagtgcgagtgcgcgcctgcgcataggtcgggtcngcggtgtcaccgctttcgcttctgcttgagtaatcaagtgaaaaaatgagcttcatctgtggattgcagtctgctgctagaaaccatgttttcttccgatttaattcactgtctaactggagaaaatgtaacacattagcatccacctcacggggctgtcatcaagtacaagttaaccatatagtaaataagtatcagggactgggagtaaatcagtgtgacaggtggagttttctgcctggaaactttcatttttatagtacttttaacaacaaaagaacaggaggcctctcaagtaccaaaagtaaggaaatttggaggattaccagcaaatgtactgtatggaatgatgctttttcaagacagctgctaataaaagaagttacagcagtccctagtctgtcagtattgcatcctctaagccctgcttccataagagctattaggaatttccatacttctccacggtttcaagctgctccggttcctctcttgttgatgattcttaaaccagtacagaagttatttgcaatcattgtaggcaggggcataaggaaatggtggcaggcacttcctcctaacaagaaggaagtagttaaagaaaatataaggaagaataaatggaagctattccttggtttgagtagttttggattgctctttgtggtgttttattttactcacctggaagtaagtccaatcacaggaaggagcaagctactattattggggaaagaacagttcagacttttatcggaactggaatatgaagcatggatggaagaatttaaaaatgatatgctaactgagaaagatgcccgatacctggctgttaaagaagtgctttgtcatctaattgaatgcaataaagatgttccagggatctctcagatcaattgggttattcatgtggttgattccccaattattaatgccttcgtgcttccaaatggacaaatgtttgttttcactggatttttaaatagtgtaaccgatattcatcaactttctttccttctgggccatgaaatagcacatgcagtacttgggcatgctgcagaaaaggctggcatggttcatttgttggatttcctaggtatgattttcctcacaatgatttgggccatttgtcctcgagatagcttggcacttttgtgccagtggatacagtctaaattgcaggagtatatgtttaatagaccatacagcagaaaattggaggccgaagctgacaaaattggactactgcttgctgcaaaggcttgtgcagacataagagccagttcagtgttttggcagcaaatggagtttgttgatagcctgcatggccaacccaagatgccagaatggttatctacacacccttctcatggcaatcgagttgagtacttggatagacttatacctcaggctctcaaaattagagagatgtgtaattgtccaccactgtctaatccagaccctcgattactattcaaactcagcacgaagcattttcttgaagaatcagagaaagaagacctaaatatcacgaagaaacagaaaatggatactcttcctattcaaaaacaggagcaaataccattaacatacatagttgagaaaagaacgggcagttgaattaaaatttatgagacacaagatatatgaagaatgttgcagtccttatcattttatgttactttttaaaaaatgatgtttgaagtgaaaaaaaaaaggatattcagggtcaaatcatgtacattacagatattatctaaattcttctagaatttatttttcatgaaatattgatgtattttaatctatgttaaaatatcttcaatgaggaaaatgtcacagaataaatttatattacacattttaaactataaggccgctcttaccagcctcagctccgcctctttctattctgcttaccaaatgatttatttggcccttttggcctttgggggggagttctggccccctctcctttttgggggggaaaattagagcccccgtcccataactcgct

SEQ ID NO: 349641 - DNA, 1785 bp, Homo sapiens
  misc_feature (69)..(69): n is a, c, g, or t
agcgaagggcgccccggccggtatggcgggcaggaagtgcgagtgcgcgcctgcgcataggtcgggtcngcggtgtcaccgctttcgcttctgcttgagtaatcaagtgaaaaaatgagcttcatctgtggattgcagtctgctgctagaaaccatgttttcttccgatttaattcactgtctaactggagaaaatgtaacacattagcatccacctcacggggctgtcatcaagtacaagttaaccatatagtaaataagtatcagggactgggagtaaatcagtgtgacaggtggagttttctgcctggaaactttcatttttatagtacttttaacaacaaaagaacaggaggcctctcaagtaccaaaagtaaggaaatttggaggattaccagcaaatgtactgtatggaatgatgctttttcaagacagctgctaataaaagaagttacagcagtccctagtctgtcagtattgcatcctctaagccctgcttccataagagctattaggaatttccatacttctccacggtttcaagctgctccggttcctctcttgttgatgattcttaaaccagtacagaagttatttgcaatcattgtaggcaggggcataaggaaatggtggcaggcacttcctcctaacaagaaggaagtagttaaagaaaatataaggaagaataaatggaagctattccttggtttgagtagttttggattgctctttgtggtgttttattttactcacctggaagtaagtccaatcacaggaaggagcaagctactattattggggaaagaacagttcagacttttatcggaactggaatatgaagcatggatggaagaatttaaaaatgatatgctaactgagaaagatgcccgatacctggctgttaaagaagtgctttgtcatctaattgaatgcaataaagatgttccagggatctctcagatcaattgggttattcatgtggttgattccccaattattaatgccttcgtgcttccaaatggacaaatgtttgttttcactggatttttaaatagtgtaaccgatattcatcaactttctttccttctgggccatgaaatagcacatgcagtacttgggcatgctgcagaaaaggctggcatggttcatttgttggatttcctaggtatgattttcctcacaatgatttgggccatttgtcctcgagatagcttggcacttttgtgccagtggatacagtctaaattgcaggagtatatgtttaatagaccatacagcagaaaattggaggccgaagctgacaaaattggactactgcttgctgcaaaggctctcaaaattagagagatgtgtaattgtccaccactgtctaatccagaccctcgattactattcaaactcagcacgaagcattttcttgaagaatcagagaaagaagacctaaatatcacgaagaaacagaaaatggatactcttcctattcaaaaacaggagcaaataccattaacatacatagttgagaaaagaacgggcagttgaattaaaatttatgagacacaagatatatgaagaatgttgcagtccttatcattttatgttactttttaaaaaatgatgtttgaagtgaaaaaaaaaaggatattcagggtcaaatcatgtacattacagatattatctaaattcttctagaatttatttttcatgaaatattgatgtattttaatctatgttaaaatatcttcaatgaggaaaatgtcacagaataaatttatattacacatttta

SEQ ID NO: 349642 - DNA, 1722 bp, Homo sapiens
  misc_feature (69)..(69): n is a, c, g, or t
agcgaagggcgccccggccggtatggcgggcaggaagtgcgagtgcgcgcctgcgcataggtcgggtcngcggtgtcaccgctttcgcttctgcttgagtaatcaagtgaaaaaatgagcttcatctgtggattgcagtctgctgctagaaaccatgttttcttccgatttaattcactgtctaactggagaaaatgtaacacattagcatccacctcacggggctgtcatcaagtacaagttaaccatatagtaaataagtatcagggactgggagtaaatcagtgtgacaggtggagttttctgcctggaaactttcatttttatagtacttttaacaacaaaagaacaggaggcctctcaagtaccaaaagtaaggaaatttggaggattaccagcaaatgtactgtatggaatgatgctttttcaagacagctgctaataaaagaagttacagcagtccctagtctgtcagtattgcatcctctaagccctgcttccataagagctattaggaatttccatacttctccacggtttcaagctgctccggttcctctcttgttgatgattcttaaaccagtacagaagttatttgcaatcattgtaggcaggggcataaggaaatggtggcaggcacttcctcctaacaagaaggaagtagttaaagaaaatataaggaagaataaatggaagctattccttggtttgagtagttttggattgctctttgtggtgttttattttactcacctggaagtaagtccaatcacaggaaggagcaagctactattattggggaaagaacagttcagacttttatcggaactggaatatgaagcatggatggaagaatttaaaaatgatatgctaactgagaaagatgcccgatacctggctgttaaagaagtgctttgtcatctaattgaatgcaataaagatgttccagggatctctcagatcaattgggttattcatgtggttgattccccaattattaatgccttcgtgcttccaaatggacaaatgtttgttttcactggatttttaaatagtgtaaccgatattcatcaactttctttccttctgggccatgaaatagcacatgcagtacttgggcatgctgcagaaaaggctggcatggttcatttgttggatttcctaggtatgattttcctcacaatgatttgggccatttgtcctcgagatagcttggcacttttgtgccagtggatacagtctaaattgcaggagtatatgtttaatagaccatacagcagaaaattggaggccgaagctgacaaaattggactactgcttgctgcaaaggcttgtgcagacataagagccagttcagtgttttggcagcaaatggagtttgttgatagcctgcatggccaacccaagatgccagaatggttatctacacacccttctcatggcaatcgagttgagtacttggatagacttatacctcagaggaggaaactgaagcacataaggtcaaatgaacagcctgaggttacctgcttaataagaagtctggctaagttgtatgctattgaagttaaagggatttaatgcgggatatttgtcttctgggtgaaaatctaaagcaatggctccccatattctgaccaccgatgaccacatatctgattttcttacatcattaactccacccttgaaagatttcatccaataaaaacactgtactcatta

SEQ ID NO: 349643 - DNA, 433 bp, Homo sapiens
tttttagagacagggtcttgctgtcacccaggctggagtgcagtggtgcaatcacggttccctgcagcctcaacctcctggcctcaagtgatcctcccatctcagcctcctgagtagttgggattacaggtgtgtgccaccacccttgactaatttttgttatttttttgagagacagggcatggtagtgtgtgcctgtaatcccagctactcgggaggctgaggctagacaatcgcttgaacctgggaggtagaggttgcagtgagccgaaatcgcgccactgcactccagcctgggtgacagagcaagacactgtctttaaaaataaataaataaaggtcttggtggaaccagatcagctctgccacagctcattattctgtcatttgttggcacctactgtgtacccagacctgctccaagaccctgaag

SEQ ID NO: 349644 - DNA, 1163 bp, Homo sapiens
gcattctggaaattactcaatttagtggcagggtggttttttaattttcttctgtttctgatttttgttgtttggggtgtgtgtgtgtgtttgtgtgtgtgtgtgtgtgtgtgtgtgtgtgtgtgtaacagagaatatggccagtgcttgagttctttctccttctctctctctcttttttttttaaataactcttctgggaagttggtttataagcctttgccaggtgtaactgttgtgaaatacccaccactaaagtttttttaagttccatattttctccattttgccttcttatgtattttcaagattattctgtgcactttaaatttacttaacttaccataaatgcagtgtgacttttcccacacactggattgtgaggctcttaacttcttaaaagtataatggcatcttgtgaatcctataagcagtctttatgtctcttaacattcacacctactttttaaaaacaaatattattactatttttattattgtttgtcctttataaattttcttaaagattaagttaaatatgtcttgtatagttcatattcatggctgaaacttgaccacactattgctgattgtatggttttcacctggacaccgtgtagaatgcttgattacttgtactcttcttatgctaatatgctctgggctggagaaatgaaatcctcaagccatcaggatttgctatttaagtggcttgacaactgggccaccaaagaacttgaacttcaccttttaggatttgagctgttctggaacacattgctgcactttggaaagtcaaaatcaagtgccagtggcgccctttccatagagaatttgcccagctttgctttaaaagatgtcttgttttttatatacacataatcaataggtccaatctgctctcaaggccttggtcctggtgggattccttcaccaattactttaattaaaaatggctgcaactgtaagaacccttgtctgatatatttgcaactatgctcccatttacaaatgtaccttctaatgctcagttgccaggttccaatgcaaaggtggcgtggactccctttgtgtgggtggggtttgtgggtagtggtgaaggaccgatatcagaaaaatgccttcaagtgtactaatttattaataaacattaggtgttgtta

SEQ ID NO: 349645 - DNA, 1895 bp, Homo sapiens
gcattctggaaattactcaatttagtggcagggtggttttttaattttcttctgtttctgatttttgttgtttggggtgtgtgtgtgtgtttgtgtgtgtgtgtgtgtgtgtgtgtgtgtgtgtgtaacagagaatatggccagtgcttgagttctttctccttctctctctctcttttttttttaaataactcttctgggaagttggtttataagcctttgccaggtgtaactgttgtgaaatacccaccactaaagtttttttaagttccatattttctccattttgccttcttatgtattttcaagattattctgtgcactttaaatttacttaacttaccataaatgcagtgtgacttttcccacacactggattgtgaggctcttaacttcttaaaagtataatggcatcttgtgaatcctataagcagtctttatgtctcttaacattcacacctactttttaaaaacaaatattattactatttttattattgtttgtcctttataaattttcttaaagattaagaaaatttaagaccccattgagttactgtaatgcaattcaactttgagttatcttttaaatatgtcttgtatagttcatattcatggctgaaacttgaccacactattgctgattgtatggttttcacctggacaccgtgtagaatgcttgattacttgtactcttcttatgctaatatgctctgggctggagaaatgaaatcctcaagccatcaggatttgctatttaagtggcttgacaactgggccaccaaagaacttgaacttcaccttttaggatttgagctgttctggaacacattgctgcactttggaaagtcaaaatcaagtgccagtggcgccctttccatagagaatttgcccagctttgctttaaaagatgtcttgttttttatatacacataatcaataggtccaatctgctctcaaggccttggtcctggtgggattccttcaccaattactttaattaaaaatggctgcaactgtaagaacccttgtctgatatatttgcaactatgctcccatttacaaatgtaccttctaatgctcagttgccaggttccaatgcaaaggtggcgtggactccctttgtgtgggtggggtttgtgggtagtggtgaaggaccgatatcagaaaaatgccttcaagtgtactaatttattaataaacattaggtgttgttaaaaaaaaaaaaaaaaaaaaaaaaaaaaaaaaaaaaaaaaaaaaaaaaaaaaaaaaaaaaaggggggggcggccaaaaaaacccccacggaggggcaccaaagaaagagagacacagatttaagtacacaaagagggcccacataagagaacaatataaaaacacacaaccacatcgggcacggctaatacaacagcagctcacaaggggaaaaaatggacacagtggagaccactgctggaagaaaacccacaaacagcggggcgcgcacaaaacatgtgaggacacaaaacccacaaaaggagactatacgacggcacaacagagagacaaatataaaaacatcagaagaagggacacaccgaggggcaacaaacaaacggagacaacagagaggcggcgcagagaacacctacgagcacacggggacatcaaaagtcagccgcaaccacaatatcttaaccaaggagcggggagcgacacataaaacatagcacgacagcgaaagaacaaacaaaacgaaaagccacaaccagaagaccagcacaagcagacaacagcgagtcaagcagagcagagacgaacgacgaagatagcacaggcagcgaagacgccgaaaaacgacagaagtagaacaacacagtcagaacaaaagagacaacaagacagacagaacaac

SEQ ID NO: 349646 - DNA, 2328 bp, Homo sapiens
gcattctggaaattactcaatttagtggcagggtggttttttaattttcttctgtttctgatttttgttgtttggggtgtgtgtgtgtgtttgtgtgtgtgtgtgtgtgtgtgtgtgtgtgtgtgtaacagagaatatggccagtgcttgagttctttctccttctctctctctcttttttttttaaataactcttctgggaagttggtttataagcctttgccaggtgtaactgttgtgaaatacccaccactaaagtttttttaagttccatattttctccattttgccttcttatgtattttcaagattattctgtgcactttaaatttacttaacttaccataaatgcagtgtgacttttcccacacactggattgtgaggctcttaacttcttaaaagtataatggcatcttgtgaatcctataagcagtctttatgtctcttaacattcacacctactttttaaaaacaaatattattactatttttattattgtttgtcctttataaattttcttaaagattaagaaaatttaagaccccattgagttactgtaatgcaattcaactttgagttatcttttaaatatgtcttgtatagttcatattcatggctgaaacttgaccacactattgctgattgtatggttttcacctggacaccgtgtagaatgcttgattacttgtactcttcttatgctaatatgctctgggctggagaaatgaaatcctcaagccatcaggatttgctatttaagtggcttgacaactgggccaccaaagaacttgaacttcaccttttaggatttgagctgttctggaacacattgctgcactttggaaagtcaaaatcaagtgccagtggcgccctttccatagagaatttgcccagctttgctttaaaagatgtcttgttttttatatacacataatcaataggtccaatctgctctcaaggccttggtcctggtgggattccttcaccaattactttaattaaaaatggctgcaactgtaagaacccttgtctgatatatttgcaactatgctcccatttacaaatgtaccttctaatgctcagttgccaggttccaatgcaaaggtggcgtggactccctttgtgtgggtggggtttgtgggtagtggtgaaggaccgatatcagaaaaatgccttcaagtgtactaatttattaataaacattaggtgttgttaaaaaaaaaaaaaaaaaaaaaaaaaaaaaaaaaaaaaaaaaaaaaaaaaaaaaaaaaaaaaaaaaaaaaaaaaaaaaaaaaagaaaaaaaaaaacgaaaaaaaaaaaaaaagacaaaaaagagaaaacaaaaaaaagaaaagaagaggcagtaaggaaggagacagacaaacacacaaacagagagcgaacggaacacaaccaaaggccacgacgacacgacgacaccagacggcgcaggagctgagagcaggcgcgaagaggcagagaacgtagagagggagaagagggaggggctgacgaaggcatagacacagagctagatagtacagtggcgaggcggcgagagccacgaagagcggtcggacagtcaaccaacagtaagcagggagaagcaataacgactacggagcgagatagagagaagataaagatgagagaagagagtgtcacacgaagtagcgaatggaatgaaacgcagctggcgtggataacgacaagaagagaagtgggagatgaagaggtgagtggagcaaaaaaaagaacaataaaggaaggagagcggagacagaacgaggggagaggaggagagaggagagagaagaaagaaacaaagacgcagacggagcgagcggaggcgagagggcgaaggaaggagcaggaaagagaagaagagacagagaggacaagaagaagagagtgagaggagaggaggaagcgaaaagagaagcgagagagaggagggggaagagagcagcagagacagggggaggagagacagggagagaagggaggaagggaggagaagagaagggcacagaggggaaaagcaagaaggaagagagagcgagggggacggagacgggcaaggaagagacgaggaggagacgagagaaagaagagcaaggcaagagagagcaagaacacgaaagagcggagaggcaggagcagagacagagcgacagcagaaagaagagagagaaggagcgagcagctacgcacgaagcataaacaggatgaggagaacaacagagagagaagaagagacaaaaacataggagaaagaagaacgacagcacagaagaagaagaaggaaagaaaggaacgaacaaa

SEQ ID NO: 349647 - DNA, 1214 bp, Homo sapiens
gcattctggaaattactcaatttagtggcagggtggttttttaattttcttctgtttctgatttttgttgtttggggtgtgtgtgtgtgtttgtgtgtgtgtgtgtgtgtgtgtgtgtgtgtgtgtaacagagaatatggccagtgcttgagttctttctccttctctctctctcttttttttttaaataactcttctgggaagttggtttataagcctttgccaggtgtaactgttgtgaaatacccaccactaaagtttttttaagttccatattttctccattttgccttcttatgtattttcaagattattctgtgcactttaaatttacttaacttaccataaatgcagtgtgacttttcccacacactggattgtgaggctcttaacttcttaaaagtataatggcatcttgtgaatcctataagcagtctttatgtctcttaacattcacacctactttttaaaaacaaatattattactatttttattattgtttgtcctttataaattttcttaaagattaagaaaatttaagaccccattgagttactgtaatgcaattcaactttgagttatcttttaaatatgtcttgtatagttcatattcatggctgaaacttgaccacactattgctgattgtatggttttcacctggacaccgtgtagaatgcttgattacttgtactcttcttatgctaatatgctctgggctggagaaatgaaatcctcaagccatcaggatttgctatttaagtggcttgacaactgggccaccaaagaacttgaacttcaccttttaggatttgagctgttctggaacacattgctgcactttggaaagtcaaaatcaagtgccagtggcgccctttccatagagaatttgcccagctttgctttaaaagatgtcttgttttttatatacacataatcaataggtccaatctgctctcaaggccttggtcctggtgggattccttcaccaattactttaattaaaaatggctgcaactgtaagaacccttgtctgatatatttgcaactatgctcccatttacaaatgtaccttctaatgctcagttgccaggttccaatgcaaaggtggcgtggactccctttgtgtgggtggggttcgcggtcaccgtgaagggggccagccacccgggggccgcagcggcgcgtctctgaacgcgagccgggcccttcccg

SEQ ID NO: 349648 - DNA, 960 bp, Homo sapiens
gcattctggaaattactcaatttagtggcagggtggttttttaattttcttctgtttctgatttttgttgtttggggtgtgtgtgtgtgtttgtgtgtgtgtgtgtgtgtgtgtgtgtgtgtgtgtaacagagaatatggccagtgcttgagttctttctccttctctctctctcttttttttttaaataactcttctgggaagttggtttataagcctttgccaggtgtaactgttgtgaaatacccaccactaaagtttttttaagttccatattttctccattttgccttcttatgtattttcaagattattctgtgcactttaaatttacttaacttaccataaatgcagtgtgacttttcccacacactggattgtgaggctcttaacttcttaaaagtataatggcatcttgtgaatcctataagcagtctttatgtctcttaacattcacacctactttttaaaaacaaatattattactatttttattattgtttgtcctttataaattttcttaaagattaagaaaatttaagaccccattgagttactgtaatgcaattcaactttgagttatcttttaaatatgtcttgtatagttcatattcatggctgaaacttgaccacactattgctgattgtatggttttcacctggacaccgtgtagaataatcaataggtccaatctgctctcaaggccttggtcctggtgggattccttcaccaattactttaattaaaaatggctgcaactgtaagaacccttgtctgatatatttgcaactatgctcccatttacaaatgtaccttctaatgctcagttgccaggttccaatgcaaaggtggcgtggactccctttgtgtgggtggggtttgtgggtagtggtgaaggaccgatatcagaaaaatgccttcaagtgtactaatttattaataaacattaggtgttgtta

SEQ ID NO: 349649 - DNA, 1217 bp, Homo sapiens
gcattctggaaattactcaatttagtggcagggtggttttttaattttcttctgtttctgatttttgttgtttggggtgtgtgtgtgtgtttgtgtgtgtgtgtgtgtgtgtgtgtgtgtgtgtgtaacagagaatatggccagtgcttgagttctttctccttctctctctctcttttttttttaaataactcttctgggaagttggtttataagcctttgccaggtgtaactgttgtgaaatacccaccactaaagtttttttaagttccatattttctccattttgccttcttatgtattttcaagattattctgtgcactttaaatttacttaacttaccataaatgcagtgtgacttttcccacacactggattgtgaggctcttaacttcttaaaagtataatggcatcttgtgaatcctataagcagtctttatgtctcttaacattcacacctactttttaaaaacaaatattattactatttttattattgtttgtcctttataaattttcttaaagattaagaaaatttaagaccccattgagttactgtaatgcaattcaactttgagttatcttttaaatatgtcttgtatagttcatattcatggctgaaacttgaccacactattgctgattgtatggttttcacctggacaccgtgtagaatgcttgattacttgtactcttcttatgctaatatgctctgggctggagaaatgaaatcctcaagccatcaggatttgctatttaagtggcttgacaactgggccaccaaagaacttgaacttcaccttttaggatttgagctgttctggaacacattgctgcactttggaaagtcaaaatcaagtgccagtggcgccctttccatagagaatttgcccagctttgctttaaaagatgtcttgttttttatatacacataatcaataggtccaatctgctctcaaggccttggtcctggtgggattccttcaccaattactttaattaaaaatggctgcaactgtaagaacccttgtctgatatatttgcaactatgctcccatttacaaatgtaccttctaatgctcagttgccaggttccaatgcaaaggtggcgtggactccctttgtgtgggtggggtttgtgggtagtggtgaaggaccgatatcagaaaaatgccttcaagtgtactaatttattaataaacattaggtgttgtta

SEQ ID NO: 349650 - DNA, 607 bp, Homo sapiens
cagaccctccctcacaggcctcaggaggaaccaaccctgccgacaccctgacctgaacttcagccttcagaaccaagagacaatgaatgcctgccattgaagctaccgtcttcagcactttgttatcacagccctagcaaactcacagaggggcaactgccagccggtgccagcgtgccttccaatattcagccatctcctcatgaagcctgggatgtgattcttgtgcctctagctctttcctgaggggcactggtacctccaggacctggagtgtactggaagaaatggtgcagtccaggtacagcatggaccccagatcacccccaccccactccctttcagtgattattgtcttatgaactaggagggggagtggggcagagatgcctctttcatggctccctgcacacacagaacccctttgtactgggcacttctactcccaaggaccctgacttgcacccagcagctaaggtcatctcacccccacctcccacctgcccctgggccagcaggaggggcttggccatatgtaggcgagacaggacttcttgaagctgaaagatttcccaccccataaaagagccagaatgtgacaaaaaaa

SEQ ID NO: 349651 - DNA, 488 bp, Homo sapiens
gcccaggggtcccccccctgccctgtagaaggggcaactgccagccggtgccagcgtgccttccaatattcagccatctcctcatgaagcctgggatgtgattcttgtgcctctagctctttcctgaggggcactggtacctccaggacctggagtgtactggaagaaatggtgcagtccaggtacagcatggaccccagatcacccccaccccactccctttcagtgattattgtcttatgaactaggagggggagtggggcagagatgcctctttcatggctccctgcacacacagaacccctttgtactgggcacttctactcccaaggaccctgacttgcacccagcagctaaggtcatctcacccccacctcccacctgcccctgggccagcaggaggggcttggccatatgtaggcgagacaggacttcttgaagctgaaagatttcccaccccataaaagagccagaatgtgacaaaaaaa

SEQ ID NO: 349652 - DNA, 2931 bp, Homo sapiens
gcggccgccggggcggtgctggggaaacccttggcgcccccgcggagcggtcccaaggagggggcggtgcctggagggatggtccgccccgactgcgggtttctagccctcgcgtggcgtggggacaattaggcgccacgccctgtcgcttcactgcgcgacgctcgcgaggccggggacgccactcccagaccgggcgggacgcgcacgctcacagtgaggtctcaaaagatccccacctcagttttctcatctggaaagtggggcctcgtaatcctgtccgacccggcgcgggacagtaggtgtcagggattttggtgaccccacgctcgaggcctctgcaaaagggggctgtccagtggcccagagacgcagccggcggggcttttgtctagcgggggagtcttaactgagaggccacgcaggccggcaggaagccgctccacaggagggggctcaaggagaggggatctcctccctccagactccggccccgccagagtagctctagggtatcttcccagaaactgccccgcacgcactggcgagctgggagcgccaccacggctttcaaaaaacccgcacacaccaagataataatgtgtcgttcgctcgtttcgcgcaagcggagtcgcgtccgccttcccgagctccggcacacagacctcaggccgctctcgcgctctccggggccccgagaacaatgcccgtcctctccgcgcgcaggagggagttggcggaccacgcggggtcggggcgacggagcgggcccagccccacggccaggtcggggccccacctctcggctctgagagcccagccggcccgggccgcgcacctgtcaggtcgggggacctacgtgcgccgcgacacggcgggaggcgggccgggccaggctcgtcccctcggccctcccggaactagtctcctaggccgcggcgcccgccggagcggagagggctggtgccccggagccttcgagtcgggggctagagcggccaggcctccgagccgggtcgagccgaggctggcgacggctgcgtcacgcgagggggcggggctgccacgggcggaggtcgcagccggaagcggaagaggcgctcggagcggggagtggggcctagctgcagccggagcctgggagacgatgcatcactgtaagcgataccgctcccctgaaccagacccgtacctgagctaccgatggaagaggaggaggtcctacagtcgggaacatgaagggagactgcgatacccgtcccgaagggagcctcccccacgaagatctcggtccagaagccatgaccgcctgccctaccagaggaggtaccgggagcgccgtgacagcgatacataccggtgtgaagagcggagcccatcctttggagaggactactatggaccttcacgttctcgtcatcgtcggcgatcgcgggagagggggccataccggacccgcaagcatgcccaccactgccacaaacgccgcaccaggtcttgtagcagcgcctcctcgagaagccaacagagcagtaagcgcagcagccggagtgtggaagatgacaaggagggtcacctggtgtgccggatcggcgattggctccaagagcgatatgagattgtggggaacctgggtgaaggcacctttggcaaggtggtggagtgcttggaccatgccagagggaagtctcaggttgccctgaagatcatccgcaacgtgggcaagtaccgggaggctgcccggctagaaatcaacgtgctcaaaaaaatcaaggagaaggacaaagaaaacaagttcctgtgtgtcttgatgtctgactggttcaacttccacggtcacatgtgcatcgcctttgagctcctgggcaagaacacctttgagttcctgaaggagaataacttccagccttaccccctaccacatgtccggcacatggcctaccagctctgccacgcccttagatttctgcatgagaatcagctgacccatacagacttgaaaccagagaacatcctgtttgtgaattctgagtttgaaaccctctacaatgagcacaagagctgtgaggagaagtcagtgaagaacaccagcatccgagtggctgactttggcagtgccacatttgaccatgagcaccacaccaccattgtggccacccgtcactatcgcccgcctgaggtgatccttgagctgggctgggcacagccctgtgacgtctggagcattggctgcattctctttgagtactaccggggcttcacactcttccagacccacgaaaaccgagagcacctggtgatgatggagaagatcctagggcccatcccatcacacatgatccaccgtaccaggaagcagaaatatttctacaaagggggcctagtttgggatgagaacagctctgacggccggtatgtgaaggagaactgcaaacctctgaagagttacatgctccaagactccctggagcacgtgcagctgtttgacctgatgaggaggatgttagaatttgaccctgcccagcgcatcacactggccgaggccctgctgcaccccttctttgctggcctgacccctgaggagcggtccttccacaccagccgcaacccaagcagatgacaggcacaggccaccgcatgaggagatggagggcgggactgggccgcccagccccttgactccagcctcgaccgccagccccaggccagagccacccaatgaacagtgcaatgtgaaggaaggcaggagcctgcaggggagcagacttggtgcccagctgccagaaagcacagatttgacccaagctatttatatgttataaagttataataaagtgtttcttactgtttgtaacccctggtaccagtgtgtccatctccaggctccttgccttccccttacctgaccttattaataaagtctttcttagc

SEQ ID NO: 349653 - DNA, 1988 bp, Homo sapiens
cagaccctccctcacaggcctcaggaggaaccaaccctgccgacaccctgacctgaacttcagccttcagaaccaagagacaatgaatgcctgccattgaagctaccgtcttcagcactttgttatcacagccctagcaaactcacagaggggcaactgccagccggtgccagcgtgccttccaatattcagccatctcctcatgaagcctgggatgtgattcttgtgcctctagctctttcctgaggggcactggtacctccaggacctggagtgtactggaagaaatggtgcagtccagatgcatcactgtaagcgataccgctcccctgaaccagacccgtacctgagctaccgatggaagaggaggaggtcctacagtcgggaacatgaagggagactgcgatacccgtcccgaagggagcctcccccacgaagatctcggtccagaagccatgaccgcctgccctaccagaggaggtaccgggagcgccgtgacagcgatacataccggtgtgaagagcggagcccatcctttggagaggactactatggaccttcacgttctcgtcatcgtcggcgatcgcgggagagggggccataccggacccgcaagcatgcccaccactgccacaaacgccgcaccaggtcttgtagcagcgcctcctcgatgagattgtggggaacctgggtgaaggcacctttggcaaggtggtggagtgcttggaccatgccagagggaagtctcaggttgccctgaagatcatccgcaacgtgggcaagtaccgggaggctgcccggctagaaatcaacgtgctcaaaaaaatcaaggagaaggacaaagaaaacaagttcctgtgtgtcttgatgtctgactggttcaacttccacggtcacatgtgcatcgcctttgagctcctgggcaagaacacctttgagttcctgaaggagaataacttccagccttaccccctaccacatgtccggcacatggcctaccagctctgccacgcccttagatttctgcatgagaatcagctgacccatacagacttgaaaccagagaacatcctgtttgtgaattctgagtttgaaaccctctacaatgagcacaagagctgtgaggagaagtcagtgaagaacaccagcatccgagtggctgactttggcagtgccacatttgaccatgagcaccacaccaccattgtggccacccgtcactatcgcccgcctgaggtgatccttgagctgggctgggcacagccctgtgacgtctggagcattggctgcattctctttgagtactaccggggcttcacactcttccagacccacgaaaaccgagagcacctggtgatgatggagaagatcctagggcccatcccatcacacatgatccaccgtaccaggaagcagaaatatttctacaaagggggcctagtttgggatgagaacagctctgacggccggtatgtgaaggagaactgcaaacctctgaagagttacatgctccaagactccctggagcacgtgcagctgtttgacctgatgaggaggatgttagaatttgaccctgcccagcgcatcacactggccgaggccctgctgcaccccttctttgctggcctgacccctgaggagcggtccttccacaccagccgcaacccaagcagatgacaggcacaggccaccgcatgaggagatggagggcgggactgggccgcccagccccttgactccagcctcgaccgccagccccaggccagagccacccaatgaacagtgcaatgtgaaggaaggcaggagcctgcaggggagcagacttggtgcccagctgccagaaagcacagatttgacccaagctatttatatgttataaagttataataaagtgtttcttactgtttgtaacccctggtaccagtgtgtccatctccaggctccttgccttccccttacctgaccttattaataaagtctttcttagc

SEQ ID NO: 349654 - DNA, 1913 bp, Homo sapiens
ttcagttgtatttactgtgtccctgtggctgtcaatatcacataggcgccacgccctgtcgcttcactgcgcgacgctcgcgaggccggggacgccactcccagaccgggcgggacgcgcacgctcacagtgaggtctcaaaagatccccacctcagttttctcatctggaaagtggggcctcgtaatcctgtccgacccggcgcgggacagtaggtgtcagggattttggtgaccccacgctcgaggcctctgcaaaagggggctgtccagtggcccagagacgcagccggcggggcttttgtctagcgggggagtcttaactgagaggccacgcaggccggcaggaagccgctccacaggagggggctcaaggagaggggatctcctccctccagactccggccccgccagagtagctctagggtatcttcccagaaactgccccgcacgcactggcgagctgggagcgccaccacggctttcaaaaaacccgcacacaccaagataataatgtgtcgttcgctcgtttcgcgcaagcggagtcgcgtccgccttcccgagctccggcacacagacctcaggccgctctcgcgctctccggggccccgagaacaatgcccgtcctctccgcgcgcaggagggagttggcggaccacgcggggtcggggcgacggagcgggcccagccccacggccaggtcggggccccacctctcggctctgagagcccagccggcccgggccgcgcacctgtcaggtcgggggacctacgtgcgccgcgacacggcgggaggcgggccgggccaggctcgtcccctcggccctcccggaactagtctcctaggccgcggcgcccgccggagcggagagggctggtgccccggagccttcgagtcgggggctagagcggccaggcctccgagccgggtcgagccgaggctggcgacggctgcgtcacgcgagggggcggggctgccacgggcggaggtcgcagccggaagcggaagaggcgctcggagcggggagtggggcctagctgcagccggagcctgggagacgatgcatcactgtaagcgataccgctcccctgaaccagacccgtacctgagctaccgatggaagaggaggaggtcctacagtcgggaacatgaagggagactgcgatacccgtcccgaagggagcctcccccacgaagatctcggtccagaagccatgaccgcctgccctaccagaggaggtaccgggagcgccgtgacagcgatacataccggtgtgaagagcggagcccatcctttggagaggactactatggaccttcacgttctcgtcatcgtcggcgatcgcgggagagggggccataccggacccgcaagcatgcccaccactgccacaaacgccgcaccaggtcttgtagcagcgcctcctcgagaagccaacagagcagtaagcgcagcagccggagtgtggaagatgacaaggagggtcacctggtgtgccggatcggcgattggctccaagagcgatatgagattgtggggaacctgggtgaaggcacctttggcaaggtggtggagtgcttggaccatgccagagggaagtctcaggttgccctgaagatcatccgcaacgtgggcaagtaccgggaggctgcccggctagaaatcaacgtgctcaaaaaaatcaaggagaagaaacaagaagcataaaaggactgcaggaggtgctgtgggttggagccgtgggctgtggagggtttgtgtatgatgagaagccctgtacagtcttgtcaagaaataccctgagccagtctctgagacgcttcggtaaaaaatgtccctggatggaatcaagattttaaattcaaataaagcctaatatcatgttgtgtccacattaaaaaaaaacaacaca

SEQ ID NO: 349655 - DNA, 2749 bp, Homo sapiens
ttcagttgtatttactgtgtccctgtggctgtcaatatcacataggcgccacgccctgtcgcttcactgcgcgacgctcgcgaggccggggacgccactcccagaccgggcgggacgcgcacgctcacagtgaggtctcaaaagatccccacctcagttttctcatctggaaagtggggcctcgtaatcctgtccgacccggcgcgggacagtaggtgtcagggattttggtgaccccacgctcgaggcctctgcaaaagggggctgtccagtggcccagagacgcagccggcggggcttttgtctagcgggggagtcttaactgagaggccacgcaggccggcaggaagccgctccacaggagggggctcaaggagaggggatctcctccctccagactccggccccgccagagtagctctagggtatcttcccagaaactgccccgcacgcactggcgagctgggagcgccaccacggctttcaaaaaacccgcacacaccaagataataatgtgtcgttcgctcgtttcgcgcaagcggagtcgcgtccgccttcccgagctccggcacacagacctcaggccgctctcgcgctctccggggccccgagaacaatgcccgtcctctccgcgcgcaggagggagttggcggaccacgcggggtcggggcgacggagcgggcccagccccacggccaggtcggggccccacctctcggctctgagagcccagccggcccgggccgcgcacctgtcaggtcgggggacctacgtgcgccgcgacacggcgggaggcgggccgggccaggctcgtcccctcggccctcccggaactagtctcctaggccgcggcgcccgccggagcggagagggctggtgccccggagccttcgagtcgggggctagagcggccaggcctccgagccgggtcgagccgaggctggcgacggctgcgtcacgcgagggggcggggctgccacgggcggaggtcgcagccggaagcggaagaggcgctcggagcggggagtggggcctagctgcagccggagcctgggagacggtaagtgtgggctggggtccgcggcggcgacagcggcggcggcggccggggatgcatcactgtaagcgataccgctcccctgaaccagacccgtacctgagctaccgatggaagaggaggaggtcctacagtcgggaacatgaagggagactgcgatacccgtcccgaagggagcctcccccacgaagatctcggtccagaagccatgaccgcctgccctaccagaggaggtaccgggagcgccgtgacagcgatacataccggtgtgaagagcggagcccatcctttggagaggactactatggaccttcacgttctcgtcatcgtcggcgatcgcgggagagggggccataccggacccgcaagcatgcccaccactgccacaaacgccgcaccaggtcttgtagcagcgcctcctcgagaagccaacagagcagtaagcgcagcagccggagtgtggaagatgacaaggagggtcacctggtgtgccggatcggcgattggctccaagagcgatagggaagtctcaggttgccctgaagatcatccgcaacgtgggcaagtaccgggaggctgcccggctagaaatcaacgtgctcaaaaaaatcaaggagaaggacaaagaaaacaagttcctgtgtgtcttgatgtctgactggttcaacttccacggtcacatgtgcatcgcctttgagctcctgggcaagaacacctttgagttcctgaaggagaataacttccagccttaccccctaccacatgtccggcacatggcctaccagctctgccacgcccttagatttctgcatgagaatcagctgacccatacagacttgaaaccagagaacatcctgtttgtgaattctgagtttgaaaccctctacaatgagcacaagagctgtgaggagaagtcagtgaagaacaccagcatccgagtggctgactttggcagtgccacatttgaccatgagcaccacaccaccattgtggccacccgtcactatcgcccgcctgaggtgatccttgagctgggctgggcacagccctgtgacgtctggagcattggctgcattctctttgagtactaccggggcttcacactcttccagacccacgaaaaccgagagcacctggtgatgatggagaagatcctagggcccatcccatcacacatgatccaccgtaccaggaagcagaaatatttctacaaagggggcctagtttgggatgagaacagctctgacggccggtatgtgaaggagaactgcaaacctctgaagagttacatgctccaagactccctggagcacgtgcagctgtttgacctgatgaggaggatgttagaatttgaccctgcccagcgcatcacactggccgaggccctgctgcaccccttctttgctggcctgacccctgaggagcggtccttccacaccagccgcaacccaagcagatgacaggcacaggccaccgcatgaggagatggagggcgggactgggccgcccagccccttgactccagcctcgaccgccagccccaggccagagccacccaatgaacagtgcaatgtgaaggaaggcaggagcctgcaggggagcagacttggtgcccagctgccagaaagcacagatttgacccaagctatttatatgttataaagttataataaagtgtttcttactgtttgt

SEQ ID NO: 349656 - DNA, 3002 bp, Homo sapiens
ttcagttgtatttactgtgtccctgtggctgtcaatatcacataggcgccacgccctgtcgcttcactgcgcgacgctcgcgaggccggggacgccactcccagaccgggcgggacgcgcacgctcacagtgaggtctcaaaagatccccacctcagttttctcatctggaaagtggggcctcgtaatcctgtccgacccggcgcgggacagtaggtgtcagggattttggtgaccccacgctcgaggcctctgcaaaagggggctgtccagtggcccagagacgcagccggcggggcttttgtctagcgggggagtcttaactgagaggccacgcaggccggcaggaagccgctccacaggagggggctcaaggagaggggatctcctccctccagactccggccccgccagagtagctctagggtatcttcccagaaactgccccgcacgcactggcgagctgggagcgccaccacggctttcaaaaaacccgcacacaccaagataataatgtgtcgttcgctcgtttcgcgcaagcggagtcgcgtccgccttcccgagctccggcacacagacctcaggccgctctcgcgctctccggggccccgagaacaatgcccgtcctctccgcgcgcaggagggagttggcggaccacgcggggtcggggcgacggagcgggcccagccccacggccaggtcggggccccacctctcggctctgagagcccagccggcccgggccgcgcacctgtcaggtcgggggacctacgtgcgccgcgacacggcgggaggcgggccgggccaggctcgtcccctcggccctcccggaactagtctcctaggccgcggcgcccgccggagcggagagggctggtgccccggagccttcgagtcgggggctagagcggccaggcctccgagccgggtcgagccgaggctggcgacggctgcgtcacgcgagggggcggggctgccacgggcggaggtcgcagccggaagcggaagaggcgctcggagcggggagtggggcctagctgcagccggagcctgggagacgatgcatcactgtaagcgataccgctcccctgaaccagacccgtacctgagctaccgatggaagaggaggaggtcctacagtcgggaacatgaagggagactgcgatacccgtcccgaagggagcctcccccacgaagatctcggtccagaagccatgaccgcctgccctaccagaggaggtaccgggagcgccgtgacagcgatacataccggtgtgaagagcggagcccatcctttggagaggactactatggaccttcacgttctcgtcatcgtcggcgatcgcgggagagggggccataccggacccgcaagcatgcccaccactgccacaaacgccgcaccaggtcttgtagcagcgcctcctcgtgtgccttatgaaatgctgggatctggaaaatccaaccaaccaacccaccggctcctcaccgtctccacctctgcctttgactgacacctcaatctgtcaatcggaaccgcctaccatgcgattggtcggatggcgtttcggggggcggtgcatgcagagaagccaacagagcagtaagcgcagcagccggagtgtggaagatgacaaggagggtcacctggtgtgccggatcggcgattggctccaagagcgatatgagattgtggggaacctgggtgaaggcacctttggcaaggtggtggagtgcttggaccatgccagagggaagtctcaggttgccctgaagatcatccgcaacgtgggcaagtaccgggaggctgcccggctagaaatcaacgtgctcaaaaaaatcaaggagaaggacaaagaaaacaagttcctgtgtgtcttgatgtctgactggttcaacttccacggtcacatgtgcatcgcctttgagctcctgggcaagaacacctttgagttcctgaaggagaataacttccagccttaccccctaccacatgtccggcacatggcctaccagctctgccacgcccttagatttctgcatgagaatcagctgacccatacagacttgaaaccagagaacatcctgtttgtgaattctgagtttgaaaccctctacaatgagcacaagagctgtgaggagaagtcagtgaagaacaccagcatccgagtggctgactttggcagtgccacatttgaccatgagcaccacaccaccattgtggccacccgtcactatcgcccgcctgaggtgatccttgagctgggctgggcacagccctgtgacgtctggagcattggctgcattctctttgagtactaccggggcttcacactcttccagacccacgaaaaccgagagcacctggtgatgatggagaagatcctagggcccatcccatcacacatgatccaccgtaccaggaagcagaaatatttctacaaagggggcctagtttgggatgagaacagctctgacggccggtatgtgaaggagaactgcaaacctctgaagagttacatgctccaagactccctggagcacgtgcagctgtttgacctgatgaggaggatgttagaatttgaccctgcccagcgcatcacactggccgaggccctgctgcaccccttctttgctggcctgacccctgaggagcggtccttccacaccagccgcaacccaagcagatgacaggcacaggccaccgcatgaggagatggagggcgggactgggccgcccagccccttgactccagcctcgaccgccagccccaggccagagccacccaatgaacagtgcaatgtgaaggaaggcaggagcctgcaggggagcagacttggtgcccagctgccagaaagcacagatttgacccaagctatttatatgttataaagttataataaagtgtttcttactgtttgtaacccctggtaccagtgtgtccatctccaggctccttgccttccccttacctgaccttattaataaagtctttcttagc

SEQ ID NO: 349657 - DNA, 3279 bp, Homo sapiens
ttcagttgtatttactgtgtccctgtggctgtcaatatcacataggcgccacgccctgtcgcttcactgcgcgacgctcgcgaggccggggacgccactcccagaccgggcgggacgcgcacgctcacagtgaggtctcaaaagatccccacctcagttttctcatctggaaagtggggcctcgtaatcctgtccgacccggcgcgggacagtaggtgtcagggattttggtgaccccacgctcgaggcctctgcaaaagggggctgtccagtggcccagagacgcagccggcggggcttttgtctagcgggggagtcttaactgagaggccacgcaggccggcaggaagccgctccacaggagggggctcaaggagaggggatctcctccctccagactccggccccgccagagtagctctagggtatcttcccagaaactgccccgcacgcactggcgagctgggagcgccaccacggctttcaaaaaacccgcacacaccaagataataatgtgtcgttcgctcgtttcgcgcaagcggagtcgcgtccgccttcccgagctccggcacacagacctcaggccgctctcgcgctctccggggccccgagaacaatgcccgtcctctccgcgcgcaggagggagttggcggaccacgcggggtcggggcgacggagcgggcccagccccacggccaggtcggggccccacctctcggctctgagagcccagccggcccgggccgcgcacctgtcaggtcgggggacctacgtgcgccgcgacacggcgggaggcgggccgggccaggctcgtcccctcggccctcccggaactagtctcctaggccgcggcgcccgccggagcggagagggctggtgccccggagccttcgagtcgggggctagagcggccaggcctccgagccgggtcgagccgaggctggcgacggctgcgtcacgcgagggggcggggctgccacgggcggaggtcgcagccggaagcggaagaggcgctcggagcggggagtggggcctagctgcagccggagcctgggagacgatgcatcactgtaagcgataccgctcccctgaaccagacccgtacctgagctaccgatggaagaggaggaggtcctacagtcgggaacatgaagggagactgcgatacccgtcccgaagggagcctcccccacgaagatctcggtccagaagccatgaccgcctgccctaccagaggaggtaccgggagcgccgtgacagcgatacataccggtgtgaagagcggagcccatcctttggagaggactactatggaccttcacgttctcgtcatcgtcggcgatcgcgggagagggggccataccggacccgcaagcatgcccaccactgccacaaacgccgcaccaggtcttgtagcagcgcctcctcgtgtgccttatgaaatgctgggatctggaaaatccaaccaaccaacccaccggctcctcaccgtctccacctctgcctttgactgacacctcaatctgtcaatcggaaccgcctaccatgcgattggtcggatggcgtttcggggggcggtgcatgcagagaagccaacagagcagtaagcgcagcagccggagtgtggaagatgacaaggagggtcacctggtgtgccggatcggcgattggctccaagagcgatgtacagccacctttcgtaaaactttacctctctactttctaccccccttgttagacgagacctctcctgcctggaggggcctctagtgcgcgtggtgccttagcggggccaccagtaattgcctgaatgacacagacactagcaacttccatttttaagagtgtagcagtgagagagaaaccttttttgtttttgagaatttgaatgctgtgaacttgcaggagctgccaaccccctgccctccagattctcatgcccaatttcttttctctcctagatgagattgtggggaacctgggtgaaggcacctttggcaaggtggtggagtgcttggaccatgccagagggaagtctcaggttgccctgaagatcatccgcaacgtgggcaagtaccgggaggctgcccggctagaaatcaacgtgctcaaaaaaatcaaggagaaggacaaagaaaacaagttcctgtgtgtcttgatgtctgactggttcaacttccacggtcacatgtgcatcgcctttgagctcctgggcaagaacacctttgagttcctgaaggagaataacttccagccttaccccctaccacatgtccggcacatggcctaccagctctgccacgcccttagatttctgcatgagaatcagctgacccatacagacttgaaaccagagaacatcctgtttgtgaattctgagtttgaaaccctctacaatgagcacaagagctgtgaggagaagtcagtgaagaacaccagcatccgagtggctgactttggcagtgccacatttgaccatgagcaccacaccaccattgtggccacccgtcactatcgcccgcctgaggtgatccttgagctgggctgggcacagccctgtgacgtctggagcattggctgcattctctttgagtactaccggggcttcacactcttccagacccacgaaaaccgagagcacctggtgatgatggagaagatcctagggcccatcccatcacacatgatccaccgtaccaggaagcagaaatatttctacaaagggggcctagtttgggatgagaacagctctgacggccggtatgtgaaggagaactgcaaacctctgaagagttacatgctccaagactccctggagcacgtgcagctgtttgacctgatgaggaggatgttagaatttgaccctgcccagcgcatcacactggccgaggccctgctgcaccccttctttgctggcctgacccctgaggagcggtccttccacaccagccgcaacccaagcagatgacaggcacaggccaccgcatgaggagatggagggcgggactgggccgcccagccccttgactccagcctcgaccgccagccccaggccagagccacccaatgaacagtgcaatgtgaaggaaggcaggagcctgcaggggagcagacttggtgcccagctgccagaaagcacagatttgacccaagctatttatatgttataaagttataataaagtgtttcttactgtttgtaacccctggtaccagtgtgtccatctccaggctccttgccttccccttacctgaccttattaataaagtctttcttagc

SEQ ID NO: 349658 - DNA, 2010 bp, Homo sapiens
cagcagaggcaggtcatcttcctgagcgtttgtggcgctcctcttaaagataatgtccgagttttctttacatacctgtagctgtttttacttttctgtttttgaagtcagtttgtgtcttgacgtgtcccttgcaatatccctatcgttatatatgctgtgtgccttatgaaatgctgggatctggaaaatccaaccaaccaacccaccggctcctcaccgtctccacctctgcctttgactgacacctcaatctgtcaatcggaaccgcctaccatgcgattggtcggatggcgtttcggggggcggtgcatgcagagaagccaacagagcagtaagcgcagcagccggagtgtggaagatgacaaggagggtcacctggtgtgccggatcggcgattggctccaagagcgatgtacagccacctttcgtaaaactttacctctctactttctaccccccttgttagacgagacctctcctgcctggaggggcctctagtgcgcgtggtgccttagcggggccaccagtaattgcctgaatgacacagacactagcaacttccatttttaagagtgtagcagtgagagagaaaccttttttgtttttgagaatttgaatgctgtgaacttgcaggagctgccaaccccctgccctccagattctcatgcccaatttcttttctctcctagatgagattgtggggaacctgggtgaaggcacctttggcaaggtggtggagtgcttggaccatgccagagggaagtctcaggttgccctgaagatcatccgcaacgtgggcaagtaccgggaggctgcccggctagaaatcaacgtgctcaaaaaaatcaaggagaaggacaaagaaaacaagttcctgtgtgtcttgatgtctgactggttcaacttccacggtcacatgtgcatcgcctttgagctcctgggcaagaacacctttgagttcctgaaggagaataacttccagccttaccccctaccacatgtccggcacatggcctaccagctctgccacgcccttagatttctgcatgagaatcagctgacccatacagacttgaaaccagagaacatcctgtttgtgaattctgagtttgaaaccctctacaatgagcacaagagctgtgaggagaagtcagtgaagaacaccagcatccgagtggctgactttggcagtgccacatttgaccatgagcaccacaccaccattgtggccacccgtcactatcgcccgcctgaggtgatccttgagctgggctgggcacagccctgtgacgtctggagcattggctgcattctctttgagtactaccggggcttcacactcttccagacccacgaaaaccgagagcacctggtgatgatggagaagatcctagggcccatcccatcacacatgatccaccgtaccaggaagcagaaatatttctacaaagggggcctagtttgggatgagaacagctctgacggccggtatgtgaaggagaactgcaaacctctgaagagttacatgctccaagactccctggagcacgtgcagctgtttgacctgatgaggaggatgttagaatttgaccctgcccagcgcatcacactggccgaggccctgctgcaccccttctttgctggcctgacccctgaggagcggtccttccacaccagccgcaacccaagcagatgacaggcacaggccaccgcatgaggagatggagggcgggactgggccgcccagccccttgactccagcctcgaccgccagccccaggccagagccacccaatgaacagtgcaatgtgaaggaaggcaggagcctgcaggggagcagacttggtgcccagctgccagaaagcacagatttgacccaagctatttatatgttataaagttataataaagtgtttcttactgtttgtaacccctggtaccagtgtgtccatctccaggctccttgccttccccttacctgaccttattaataaagtctttcttagc

SEQ ID NO: 349659 - DNA, 1707 bp, Homo sapiens
aaggctggtaccggtctgggatgttaaggcataagaggcgctcggagcggggagtggggcctagctgcagccggagcctgggagacgatgcatcactgtaagcgataccgctcccctgaaccagacccgtacctgagctaccgatggaagaggaggaggtcctacagtcgggaacatgaagggagactgcgatacccgtcccgaagggagcctcccccacgaagatctcggtccagaagccatgaccgcctgccctaccagaggaggtaccgggagcgccgtgacagcgatacataccggtgtgaagagcggagcccatcctttggagaggactactatggaccttcacgttctcgtcatcgtcggcgatcgcgggagagggggccataccggacccgcaagcatgcccaccactgccacaaacgccgcaccaggtcttgtagcagcgcctcctcgagggaagtctcaggttgccctgaagatcatccgcaacgtgggcaagtaccgggaggctgcccggctagaaatcaacgtgctcaaaaaaatcaaggagaaggacaaagaaaacaagttcctgtgtgtcttgatgtctgactggttcaacttccacggtcacatgtgcatcgcctttgagctcctgggcaagaacacctttgagttcctgaaggagaataacttccagccttaccccctaccacatgtccggcacatggcctaccagctctgccacgcccttagatttctgcatgagaatcagctgacccatacagacttgaaaccagagaacatcctgtttgtgaattctgagtttgaaaccctctacaatgagcacaagagctgtgaggagaagtcagtgaagaacaccagcatccgagtggctgactttggcagtgccacatttgaccatgagcaccacaccaccattgtggccacccgtcactatcgcccgcctgaggtgatccttgagctgggctgggcacagccctgtgacgtctggagcattggctgcattctctttgagtactaccggggcttcacactcttccagacccacgaaaaccgagagcacctggtgatgatggagaagatcctagggcccatcccatcacacatgatccaccgtaccaggaagcagaaatatttctacaaagggggcctagtttgggatgagaacagctctgacggccggtatgtgaaggagaactgcaaacctctgaagagttacatgctccaagactccctggagcacgtgcagctgtttgacctgatgaggaggatgttagaatttgaccctgcccagcgcatcacactggccgaggccctgctgcaccccttctttgctggcctgacccctgaggagcggtccttccacaccagccgcaacccaagcagatgacaggcacaggccaccgcatgaggagatggagggcgggactgggccgcccagccccttgactccagcctcgaccgccagccccaggccagagccacccaatgaacagtgcaatgtgaaggaaggcaggagcctgcaggggagcagacttggtgcccagctgccagaaagcacagatttgacccaagctatttatatgttataaagttataataaagtgtttcttactgtttgtaacccctggtaccagtgtgtccatctccaggctccttgccttccccttacctgaccttattaataaagtctttcttagc

SEQ ID NO: 349660 - DNA, 2844 bp, Homo sapiens
ttcagttgtatttactgtgtccctgtggctgtcaatatcacataggcgccacgccctgtcgcttcactgcgcgacgctcgcgaggccggggacgccactcccagaccgggcgggacgcgcacgctcacagtgaggtctcaaaagatccccacctcagttttctcatctggaaagtggggcctcgtaatcctgtccgacccggcgcgggacagtaggtgtcagggattttggtgaccccacgctcgaggcctctgcaaaagggggctgtccagtggcccagagacgcagccggcggggcttttgtctagcgggggagtcttaactgagaggccacgcaggccggcaggaagccgctccacaggagggggctcaaggagaggggatctcctccctccagactccggccccgccagagtagctctagggtatcttcccagaaactgccccgcacgcactggcgagctgggagcgccaccacggctttcaaaaaacccgcacacaccaagataataatgtgtcgttcgctcgtttcgcgcaagcggagtcgcgtccgccttcccgagctccggcacacagacctcaggccgctctcgcgctctccggggccccgagaacaatgcccgtcctctccgcgcgcaggagggagttggcggaccacgcggggtcggggcgacggagcgggcccagccccacggccaggtcggggccccacctctcggctctgagagcccagccggcccgggccgcgcacctgtcaggtcgggggacctacgtgcgccgcgacacggcgggaggcgggccgggccaggctcgtcccctcggccctcccggaactagtctcctaggccgcggcgcccgccggagcggagagggctggtgccccggagccttcgagtcgggggctagagcggccaggcctccgagccgggtcgagccgaggctggcgacggctgcgtcacgcgagggggcggggctgccacgggcggaggtcgcagccggaagcggaagaggcgctcggagcggggagtggggcctagctgcagccggagcctgggagacgatgcatcactgtaagcgataccgctcccctgaaccagacccgtacctgagctaccgatggaagaggaggaggtcctacagtcgggaacatgaagggagactgcgatacccgtcccgaagggagcctcccccacgaagatctcggtccagaagccatgaccgcctgccctaccagaggaggtaccgggagcgccgtgacagcgatacataccggtgtgaagagcggagcccatcctttggagaggactactatggaccttcacgttctcgtcatcgtcggcgatcgcgggagagggggccataccggacccgcaagcatgcccaccactgccacaaacgccgcaccaggtcttgtagcagcgcctcctcgagaagccaacagagcagtaagcgcagcagccggagtgtggaagatgacaaggagggtcacctggtgtgccggatcggcgattggctccaagagcgatatgagattgtggggaacctgggtgaaggcacctttggcaaggtggtggagtgcttggaccatgccagagggaagtctcaggttgccctgaagatcatccgcaacgtgggcaagtaccgggaggctgcccggctagaaatcaacgtgctcaaaaaaatcaaggagaaggacaaagaaaacaagttcctgtgtgtcttgatgtctgactggttcaacttccacggtcacatgtgcatcgcctttgagctcctgggcaagaacacctttgagttcctgaaggagaataacttccagccttaccccctaccacatgtccggcacatggcctaccagctctgccacgcccttagatttctgcatgagaatcagctgacccatacagacttgaaaccagagaacatcctgtttgtgaattctgagtttgaaaccctctacaatgagcacaagagctgtgaggagaagtcagtgaagaacaccagcatccgagtggctgactttggcagtgccacatttgaccatgagcaccacaccaccattgtggccacccgtcactatcgcccgcctgaggtgatccttgagctgggctgggcacagccctgtgacgtctggagcattggctgcattctctttgagtactaccggggcttcacactcttccagacccacgaaaaccgagagcacctggtgatgatggagaagatcctagggcccatcccatcacacatgatccaccgtaccaggaagcagaaatatttctacaaagggggcctagtttgggatgagaacagctctgacggccggtatgtgaaggagaactgcaaacctctgaagagttacatgctccaagactccctggagcacgtgcagctgtttgacctgatgaggaggatgttagaatttgaccctgcccagcgcatcacactggccgaggccctgctgcaccccttctttgctggcctgacccctgaggagcggtccttccacaccagccgcaacccaagcagatgacaggcacaggccaccgcatgaggagatggagggcgggactgggccgcccagccccttgactccagcctcgaccgccagccccaggccagagccacccaatgaacagtgcaatgtgaaggaaggcaggagcctgcaggggagcagacttggtgcccagctgccagaaagcacagatttgacccaagctatttatatgttataaagttataataaagtgtttcttactgtttgtaacccctggtaccagtgtgtccatctccaggctccttgccttccccttacctgaccttattaataaagtctttcttagc

SEQ ID NO: 349661 - DNA, 2085 bp, Homo sapiens
cagaccctccctcacaggcctcaggaggaaccaaccctgccgacaccctgacctgaacttcagccttcagaaccaagagacaatgaatgcctgccattgaagctaccgtcttcagcactttgttatcacagccctagcaaactcacagaggggcaactgccagccggtgccagcgtgccttccaatattcagccatctcctcatgaagcctgggatgtgattcttgtgcctctagctctttcctgaggggcactggtacctccaggacctggagtgtactggaagaaatggtgcagtccagatgcatcactgtaagcgataccgctcccctgaaccagacccgtacctgagctaccgatggaagaggaggaggtcctacagtcgggaacatgaagggagactgcgatacccgtcccgaagggagcctcccccacgaagatctcggtccagaagccatgaccgcctgccctaccagaggaggtaccgggagcgccgtgacagcgatacataccggtgtgaagagcggagcccatcctttggagaggactactatggaccttcacgttctcgtcatcgtcggcgatcgcgggagagggggccataccggacccgcaagcatgcccaccactgccacaaacgccgcaccaggtcttgtagcagcgcctcctcgagaagccaacagagcagtaagcgcagcagccggagtgtggaagatgacaaggagggtcacctggtgtgccggatcggcgattggctccaagagcgatatgagattgtggggaacctgggtgaaggcacctttggcaaggtggtggagtgcttggaccatgccagagggaagtctcaggttgccctgaagatcatccgcaacgtgggcaagtaccgggaggctgcccggctagaaatcaacgtgctcaaaaaaatcaaggagaaggacaaagaaaacaagttcctgtgtgtcttgatgtctgactggttcaacttccacggtcacatgtgcatcgcctttgagctcctgggcaagaacacctttgagttcctgaaggagaataacttccagccttaccccctaccacatgtccggcacatggcctaccagctctgccacgcccttagatttctgcatgagaatcagctgacccatacagacttgaaaccagagaacatcctgtttgtgaattctgagtttgaaaccctctacaatgagcacaagagctgtgaggagaagtcagtgaagaacaccagcatccgagtggctgactttggcagtgccacatttgaccatgagcaccacaccaccattgtggccacccgtcactatcgcccgcctgaggtgatccttgagctgggctgggcacagccctgtgacgtctggagcattggctgcattctctttgagtactaccggggcttcacactcttccagacccacgaaaaccgagagcacctggtgatgatggagaagatcctagggcccatcccatcacacatgatccaccgtaccaggaagcagaaatatttctacaaagggggcctagtttgggatgagaacagctctgacggccggtatgtgaaggagaactgcaaacctctgaagagttacatgctccaagactccctggagcacgtgcagctgtttgacctgatgaggaggatgttagaatttgaccctgcccagcgcatcacactggccgaggccctgctgcaccccttctttgctggcctgacccctgaggagcggtccttccacaccagccgcaacccaagcagatgacaggcacaggccaccgcatgaggagatggagggcgggactgggccgcccagccccttgactccagcctcgaccgccagccccaggccagagccacccaatgaacagtgcaatgtgaaggaaggcaggagcctgcaggggagcagacttggtgcccagctgccagaaagcacagatttgacccaagctatttatatgttataaagttataataaagtgtttcttactgtttgtaacccctggtaccagtgtgtccatctccaggctccttgccttccccttacctgaccttattaataaagtctttcttagc

SEQ ID NO: 349662 - DNA, 1872 bp, Homo sapiens
tcaggagcaaccgggaagccccagcagccccatggctggaggtggctggctgtgtgtttagcagggctctctgttcctcgtggcctagatgcatcactgtaagcgataccgctcccctgaaccagacccgtacctgagctaccgatggaagaggaggaggtcctacagtcgggaacatgaagggagactgcgatacccgtcccgaagggagcctcccccacgaagatctcggtccagaagccatgaccgcctgccctaccagaggaggtaccgggagcgccgtgacagcgatacataccggtgtgaagagcggagcccatcctttggagaggactactatggaccttcacgttctcgtcatcgtcggcgatcgcgggagagggggccataccggacccgcaagcatgcccaccactgccacaaacgccgcaccaggtcttgtagcagcgcctcctcgagaagccaacagagcagtaagcgcagcagccggagtgtggaagatgacaaggagggtcacctggtgtgccggatcggcgattggctccaagagcgatatgagattgtggggaacctgggtgaaggcacctttggcaaggtggtggagtgcttggaccatgccagagggaagtctcaggttgccctgaagatcatccgcaacgtgggcaagtaccgggaggctgcccggctagaaatcaacgtgctcaaaaaaatcaaggagaaggacaaagaaaacaagttcctgtgtgtcttgatgtctgactggttcaacttccacggtcacatgtgcatcgcctttgagctcctgggcaagaacacctttgagttcctgaaggagaataacttccagccttaccccctaccacatgtccggcacatggcctaccagctctgccacgcccttagatttctgcatgagaatcagctgacccatacagacttgaaaccagagaacatcctgtttgtgaattctgagtttgaaaccctctacaatgagcacaagagctgtgaggagaagtcagtgaagaacaccagcatccgagtggctgactttggcagtgccacatttgaccatgagcaccacaccaccattgtggccacccgtcactatcgcccgcctgaggtgatccttgagctgggctgggcacagccctgtgacgtctggagcattggctgcattctctttgagtactaccggggcttcacactcttccagacccacgaaaaccgagagcacctggtgatgatggagaagatcctagggcccatcccatcacacatgatccaccgtaccaggaagcagaaatatttctacaaagggggcctagtttgggatgagaacagctctgacggccggtatgtgaaggagaactgcaaacctctgaagagttacatgctccaagactccctggagcacgtgcagctgtttgacctgatgaggaggatgttagaatttgaccctgcccagcgcatcacactggccgaggccctgctgcaccccttctttgctggcctgacccctgaggagcggtccttccacaccagccgcaacccaagcagatgacaggcacaggccaccgcatgaggagatggagggcgggactgggccgcccagccccttgactccagcctcgaccgccagccccaggccagagccacccaatgaacagtgcaatgtgaaggaaggcaggagcctgcaggggagcagacttggtgcccagctgccagaaagcacagatttgacccaagctatttatatgttataaagttataataaagtgtttcttactgtttgtaacccctggtaccagtgtgtccatctccaggctccttgccttccccttacctgaccttattaataaagtctttcttagc

SEQ ID NO: 349663 - DNA, 2886 bp, Homo sapiens
ttcagttgtatttactgtgtccctgtggctgtcaatatcacataggcgccacgccctgtcgcttcactgcgcgacgctcgcgaggccggggacgccactcccagaccgggcgggacgcgcacgctcacagtgaggtctcaaaagatccccacctcagttttctcatctggaaagtggggcctcgtaatcctgtccgacccggcgcgggacagtaggtgtcagggattttggtgaccccacgctcgaggcctctgcaaaagggggctgtccagtggcccagagacgcagccggcggggcttttgtctagcgggggagtcttaactgagaggccacgcaggccggcaggaagccgctccacaggagggggctcaaggagaggggatctcctccctccagactccggccccgccagagtagctctagggtatcttcccagaaactgccccgcacgcactggcgagctgggagcgccaccacggctttcaaaaaacccgcacacaccaagataataatgtgtcgttcgctcgtttcgcgcaagcggagtcgcgtccgccttcccgagctccggcacacagacctcaggccgctctcgcgctctccggggccccgagaacaatgcccgtcctctccgcgcgcaggagggagttggcggaccacgcggggtcggggcgacggagcgggcccagccccacggccaggtcggggccccacctctcggctctgagagcccagccggcccgggccgcgcacctgtcaggtcgggggacctacgtgcgccgcgacacggcgggaggcgggccgggccaggctcgtcccctcggccctcccggaactagtctcctaggccgcggcgcccgccggagcggagagggctggtgccccggagccttcgagtcgggggctagagcggccaggcctccgagccgggtcgagccgaggctggcgacggctgcgtcacgcgagggggcggggctgccacgggcggaggtcgcagccggaagcggaagaggcgctcggagcggggagtggggcctagctgcagccggagcctgggagacgatgcatcactgtaagcgataccgctcccctgaaccagacccgtacctgagctaccgatggaagaggaggaggtcctacagtcgggaacatgaagggagactgcgatacccgtcccgaagggagcctcccccacgaagatctcggtccagaagcaaggacccagctgaccagcgtccccatcccccttttggcagccatgaccgcctgccctaccagaggaggtaccgggagcgccgtgacagcgatacataccggtgtgaagagcggagcccatcctttggagaggactactatggaccttcacgttctcgtcatcgtcggcgatcgcgggagagggggccataccggacccgcaagcatgcccaccactgccacaaacgccgcaccaggtcttgtagcagcgcctcctcgagaagccaacagagcagtaagcgcagcagccggagtgtggaagatgacaaggagggtcacctggtgtgccggatcggcgattggctccaagagcgatatgagattgtggggaacctgggtgaaggcacctttggcaaggtggtggagtgcttggaccatgccagagggaagtctcaggttgccctgaagatcatccgcaacgtgggcaagtaccgggaggctgcccggctagaaatcaacgtgctcaaaaaaatcaaggagaaggacaaagaaaacaagttcctgtgtgtcttgatgtctgactggttcaacttccacggtcacatgtgcatcgcctttgagctcctgggcaagaacacctttgagttcctgaaggagaataacttccagccttaccccctaccacatgtccggcacatggcctaccagctctgccacgcccttagatttctgcatgagaatcagctgacccatacagacttgaaaccagagaacatcctgtttgtgaattctgagtttgaaaccctctacaatgagcacaagagctgtgaggagaagtcagtgaagaacaccagcatccgagtggctgactttggcagtgccacatttgaccatgagcaccacaccaccattgtggccacccgtcactatcgcccgcctgaggtgatccttgagctgggctgggcacagccctgtgacgtctggagcattggctgcattctctttgagtactaccggggcttcacactcttccagacccacgaaaaccgagagcacctggtgatgatggagaagatcctagggcccatcccatcacacatgatccaccgtaccaggaagcagaaatatttctacaaagggggcctagtttgggatgagaacagctctgacggccggtatgtgaaggagaactgcaaacctctgaagagttacatgctccaagactccctggagcacgtgcagctgtttgacctgatgaggaggatgttagaatttgaccctgcccagcgcatcacactggccgaggccctgctgcaccccttctttgctggcctgacccctgaggagcggtccttccacaccagccgcaacccaagcagatgacaggcacaggccaccgcatgaggagatggagggcgggactgggccgcccagccccttgactccagcctcgaccgccagccccaggccagagccacccaatgaacagtgcaatgtgaaggaaggcaggagcctgcaggggagcagacttggtgcccagctgccagaaagcacagatttgacccaagctatttatatgttataaagttataataaagtgtttcttactgtttgtaacccctggtaccagtgtgtccatctccaggctccttgccttccccttacctgaccttattaataaagtctttcttagc

SEQ ID NO: 349664 - DNA, 2747 bp, Homo sapiens
ttcagttgtatttactgtgtccctgtggctgtcaatatcacataggcgccacgccctgtcgcttcactgcgcgacgctcgcgaggccggggacgccactcccagaccgggcgggacgcgcacgctcacagtgaggtctcaaaagatccccacctcagttttctcatctggaaagtggggcctcgtaatcctgtccgacccggcgcgggacagtaggtgtcagggattttggtgaccccacgctcgaggcctctgcaaaagggggctgtccagtggcccagagacgcagccggcggggcttttgtctagcgggggagtcttaactgagaggccacgcaggccggcaggaagccgctccacaggagggggctcaaggagaggggatctcctccctccagactccggccccgccagagtagctctagggtatcttcccagaaactgccccgcacgcactggcgagctgggagcgccaccacggctttcaaaaaacccgcacacaccaagataataatgtgtcgttcgctcgtttcgcgcaagcggagtcgcgtccgccttcccgagctccggcacacagacctcaggccgctctcgcgctctccggggccccgagaacaatgcccgtcctctccgcgcgcaggagggagttggcggaccacgcggggtcggggcgacggagcgggcccagccccacggccaggtcggggccccacctctcggctctgagagcccagccggcccgggccgcgcacctgtcaggtcgggggacctacgtgcgccgcgacacggcgggaggcgggccgggccaggctcgtcccctcggccctcccggaactagtctcctaggccgcggcgcccgccggagcggagagggctggtgccccggagccttcgagtcgggggctagagcggccaggcctccgagccgggtcgagccgaggctggcgacggctgcgtcacgcgagggggcggggctgccacgggcggaggtcgcagccggaagcggaagaggcgctcggagcggggagtggggcctagctgcagccggagcctgggagacgatgcatcactgtaagcgataccgctcccctgaaccagacccgtacctgagctaccgatggaagaggaggaggtcctacagtcgggaacatgaagggagactgcgatacccgtcccgaagggagcctcccccacgaagatctcggtccagaagccatgaccgcctgccctaccagaggaggtaccgggagcgccgtgacagcgatacataccggtgtgaagagcggagcccatcctttggagaggactactatggaccttcacgttctcgtcatcgtcggcgatcgcgggagagggggccataccggacccgcaagcatgcccaccactgccacaaacgccgcaccaggtcttgtagcagcgcctcctcgatgagattgtggggaacctgggtgaaggcacctttggcaaggtggtggagtgcttggaccatgccagagggaagtctcaggttgccctgaagatcatccgcaacgtgggcaagtaccgggaggctgcccggctagaaatcaacgtgctcaaaaaaatcaaggagaaggacaaagaaaacaagttcctgtgtgtcttgatgtctgactggttcaacttccacggtcacatgtgcatcgcctttgagctcctgggcaagaacacctttgagttcctgaaggagaataacttccagccttaccccctaccacatgtccggcacatggcctaccagctctgccacgcccttagatttctgcatgagaatcagctgacccatacagacttgaaaccagagaacatcctgtttgtgaattctgagtttgaaaccctctacaatgagcacaagagctgtgaggagaagtcagtgaagaacaccagcatccgagtggctgactttggcagtgccacatttgaccatgagcaccacaccaccattgtggccacccgtcactatcgcccgcctgaggtgatccttgagctgggctgggcacagccctgtgacgtctggagcattggctgcattctctttgagtactaccggggcttcacactcttccagacccacgaaaaccgagagcacctggtgatgatggagaagatcctagggcccatcccatcacacatgatccaccgtaccaggaagcagaaatatttctacaaagggggcctagtttgggatgagaacagctctgacggccggtatgtgaaggagaactgcaaacctctgaagagttacatgctccaagactccctggagcacgtgcagctgtttgacctgatgaggaggatgttagaatttgaccctgcccagcgcatcacactggccgaggccctgctgcaccccttctttgctggcctgacccctgaggagcggtccttccacaccagccgcaacccaagcagatgacaggcacaggccaccgcatgaggagatggagggcgggactgggccgcccagccccttgactccagcctcgaccgccagccccaggccagagccacccaatgaacagtgcaatgtgaaggaaggcaggagcctgcaggggagcagacttggtgcccagctgccagaaagcacagatttgacccaagctatttatatgttataaagttataataaagtgtttcttactgtttgtaacccctggtaccagtgtgtccatctccaggctccttgccttccccttacctgaccttattaataaagtctttcttagc

SEQ ID NO: 349665 - DNA, 2680 bp, Homo sapiens
ttcagttgtatttactgtgtccctgtggctgtcaatatcacataggcgccacgccctgtcgcttcactgcgcgacgctcgcgaggccggggacgccactcccagaccgggcgggacgcgcacgctcacagtgaggtctcaaaagatccccacctcagttttctcatctggaaagtggggcctcgtaatcctgtccgacccggcgcgggacagtaggtgtcagggattttggtgaccccacgctcgaggcctctgcaaaagggggctgtccagtggcccagagacgcagccggcggggcttttgtctagcgggggagtcttaactgagaggccacgcaggccggcaggaagccgctccacaggagggggctcaaggagaggggatctcctccctccagactccggccccgccagagtagctctagggtatcttcccagaaactgccccgcacgcactggcgagctgggagcgccaccacggctttcaaaaaacccgcacacaccaagataataatgtgtcgttcgctcgtttcgcgcaagcggagtcgcgtccgccttcccgagctccggcacacagacctcaggccgctctcgcgctctccggggccccgagaacaatgcccgtcctctccgcgcgcaggagggagttggcggaccacgcggggtcggggcgacggagcgggcccagccccacggccaggtcggggccccacctctcggctctgagagcccagccggcccgggccgcgcacctgtcaggtcgggggacctacgtgcgccgcgacacggcgggaggcgggccgggccaggctcgtcccctcggccctcccggaactagtctcctaggccgcggcgcccgccggagcggagagggctggtgccccggagccttcgagtcgggggctagagcggccaggcctccgagccgggtcgagccgaggctggcgacggctgcgtcacgcgagggggcggggctgccacgggcggaggtcgcagccggaagcggaagaggcgctcggagcggggagtggggcctagctgcagccggagcctgggagacgatgcatcactgtaagcgataccgctcccctgaaccagacccgtacctgagctaccgatggaagaggaggaggtcctacagtcgggaacatgaagggagactgcgatacccgtcccgaagggagcctcccccacgaagatctcggtccagaagccatgaccgcctgccctaccagaggaggtaccgggagcgccgtgacagcgatacataccggtgtgaagagcggagcccatcctttggagaggactactatggaccttcacgttctcgtcatcgtcggcgatcgcgggagagggggccataccggacccgcaagcatgcccaccactgccacaaacgccgcaccaggtcttgtagcagcgcctcctcgagggaagtctcaggttgccctgaagatcatccgcaacgtgggcaagtaccgggaggctgcccggctagaaatcaacgtgctcaaaaaaatcaaggagaaggacaaagaaaacaagttcctgtgtgtcttgatgtctgactggttcaacttccacggtcacatgtgcatcgcctttgagctcctgggcaagaacacctttgagttcctgaaggagaataacttccagccttaccccctaccacatgtccggcacatggcctaccagctctgccacgcccttagatttctgcatgagaatcagctgacccatacagacttgaaaccagagaacatcctgtttgtgaattctgagtttgaaaccctctacaatgagcacaagagctgtgaggagaagtcagtgaagaacaccagcatccgagtggctgactttggcagtgccacatttgaccatgagcaccacaccaccattgtggccacccgtcactatcgcccgcctgaggtgatccttgagctgggctgggcacagccctgtgacgtctggagcattggctgcattctctttgagtactaccggggcttcacactcttccagacccacgaaaaccgagagcacctggtgatgatggagaagatcctagggcccatcccatcacacatgatccaccgtaccaggaagcagaaatatttctacaaagggggcctagtttgggatgagaacagctctgacggccggtatgtgaaggagaactgcaaacctctgaagagttacatgctccaagactccctggagcacgtgcagctgtttgacctgatgaggaggatgttagaatttgaccctgcccagcgcatcacactggccgaggccctgctgcaccccttctttgctggcctgacccctgaggagcggtccttccacaccagccgcaacccaagcagatgacaggcacaggccaccgcatgaggagatggagggcgggactgggccgcccagccccttgactccagcctcgaccgccagccccaggccagagccacccaatgaacagtgcaatgtgaaggaaggcaggagcctgcaggggagcagacttggtgcccagctgccagaaagcacagatttgacccaagctatttatatgttataaagttataataaagtgtttcttactgtttgtaacccctggtaccagtgtgtccatctccaggctccttgccttccccttacctgaccttattaataaagtctttcttagc

SEQ ID NO: 349666 - DNA, 2595 bp, Homo sapiens
ttcagttgtatttactgtgtccctgtggctgtcaatatcacataggcgccacgccctgtcgcttcactgcgcgacgctcgcgaggccggggacgccactcccagaccgggcgggacgcgcacgctcacagtgaggtctcaaaagatccccacctcagttttctcatctggaaagtggggcctcgtaatcctgtccgacccggcgcgggacagtaggtgtcagggattttggtgaccccacgctcgaggcctctgcaaaagggggctgtccagtggcccagagacgcagccggcggggcttttgtctagcgggggagtcttaactgagaggccacgcaggccggcaggaagccgctccacaggagggggctcaaggagaggggatctcctccctccagactccggccccgccagagtagctctagggtatcttcccagaaactgccccgcacgcactggcgagctgggagcgccaccacggctttcaaaaaacccgcacacaccaagataataatgtgtcgttcgctcgtttcgcgcaagcggagtcgcgtccgccttcccgagctccggcacacagacctcaggccgctctcgcgctctccggggccccgagaacaatgcccgtcctctccgcgcgcaggagggagttggcggaccacgcggggtcggggcgacggagcgggcccagccccacggccaggtcggggccccacctctcggctctgagagcccagccggcccgggccgcgcacctgtcaggtcgggggacctacgtgcgccgcgacacggcgggaggcgggccgggccaggctcgtcccctcggccctcccggaactagtctcctaggccgcggcgcccgccggagcggagagggctggtgccccggagccttcgagtcgggggctagagcggccaggcctccgagccgggtcgagccgaggctggcgacggctgcgtcacgcgagggggcggggctgccacgggcggaggtcgcagccggaagcggaagaggcgctcggagcggggagtggggcctagctgcagccggagcctgggagacgccatgaccgcctgccctaccagaggaggtaccgggagcgccgtgacagcgatacataccggtgtgaagagcggagcccatcctttggagaggactactatggaccttcacgttctcgtcatcgtcggcgatcgcgggagagggggccataccggacccgcaagcatgcccaccactgccacaaacgccgcaccaggtcttgtagcagcgcctcctcgatgagattgtggggaacctgggtgaaggcacctttggcaaggtggtggagtgcttggaccatgccagagggaagtctcaggttgccctgaagatcatccgcaacgtgggcaagtaccgggaggctgcccggctagaaatcaacgtgctcaaaaaaatcaaggagaaggacaaagaaaacaagttcctgtgtgtcttgatgtctgactggttcaacttccacggtcacatgtgcatcgcctttgagctcctgggcaagaacacctttgagttcctgaaggagaataacttccagccttaccccctaccacatgtccggcacatggcctaccagctctgccacgcccttagatttctgcatgagaatcagctgacccatacagacttgaaaccagagaacatcctgtttgtgaattctgagtttgaaaccctctacaatgagcacaagagctgtgaggagaagtcagtgaagaacaccagcatccgagtggctgactttggcagtgccacatttgaccatgagcaccacaccaccattgtggccacccgtcactatcgcccgcctgaggtgatccttgagctgggctgggcacagccctgtgacgtctggagcattggctgcattctctttgagtactaccggggcttcacactcttccagacccacgaaaaccgagagcacctggtgatgatggagaagatcctagggcccatcccatcacacatgatccaccgtaccaggaagcagaaatatttctacaaagggggcctagtttgggatgagaacagctctgacggccggtatgtgaaggagaactgcaaacctctgaagagttacatgctccaagactccctggagcacgtgcagctgtttgacctgatgaggaggatgttagaatttgaccctgcccagcgcatcacactggccgaggccctgctgcaccccttctttgctggcctgacccctgaggagcggtccttccacaccagccgcaacccaagcagatgacaggcacaggccaccgcatgaggagatggagggcgggactgggccgcccagccccttgactccagcctcgaccgccagccccaggccagagccacccaatgaacagtgcaatgtgaaggaaggcaggagcctgcaggggagcagacttggtgcccagctgccagaaagcacagatttgacccaagctatttatatgttataaagttataataaagtgtttcttactgtttgtaacccctggtaccagtgtgtccatctccaggctccttgccttccccttacctgaccttattaataaagtctttcttagc

SEQ ID NO: 349667 - DNA, 1432 bp, Homo sapiens
gtgatatagaggatccctatgaaaggcgatctagagagggggccataccggacccgcaagcatgcccaccactgccacaaacgccgcaccaggtcttgtagcagcgcctcctcgatgagattgtggggaacctgggtgaaggcacctttggcaaggtggtggagtgcttggaccatgccagagggaagtctcaggttgccctgaagatcatccgcaacgtgggcaagtaccgggaggctgcccggctagaaatcaacgtgctcaaaaaaatcaaggagaaggacaaagaaaacaagttcctgtgtgtcttgatgtctgactggttcaacttccacggtcacatgtgcatcgcctttgagctcctgggcaagaacacctttgagttcctgaaggagaataacttccagccttaccccctaccacatgtccggcacatggcctaccagctctgccacgcccttagatttctgcatgagaatcagctgacccatacagacttgaaaccagagaacatcctgtttgtgaattctgagtttgaaaccctctacaatgagcacaagagctgtgaggagaagtcagtgaagaacaccagcatccgagtggctgactttggcagtgccacatttgaccatgagcaccacaccaccattgtggccacccgtcactatcgcccgcctgaggtgatccttgagctgggctgggcacagccctgtgacgtctggagcattggctgcattctctttgagtactaccggggcttcacactcttccagacccacgaaaaccgagagcacctggtgatgatggagaagatcctagggcccatcccatcacacatgatccaccgtaccaggaagcagaaatatttctacaaagggggcctagtttgggatgagaacagctctgacggccggtatgtgaaggagaactgcaaacctctgaagagttacatgctccaagactccctggagcacgtgcagctgtttgacctgatgaggaggatgttagaatttgaccctgcccagcgcatcacactggccgaggccctgctgcaccccttctttgctggcctgacccctgaggagcggtccttccacaccagccgcaacccaagcagatgacaggcacaggccaccgcatgaggagatggagggcgggactgggccgcccagccccttgactccagcctcgaccgccagccccaggccagagccacccaatgaacagtgcaatgtgaaggaaggcaggagcctgcaggggagcagacttggtgcccagctgccagaaagcacagatttgacccaagctatttatatgttataaagttataataaagtgtttcttactgtttgtaacccctggtaccagtgtgtccatctccaggctccttgccttccccttacctgaccttattaataaagtctttcttagc

SEQ ID NO: 349668 - DNA, 1549 bp, Homo sapiens
agccgaatagagccggagagacccgagtatgaccggagaagcccaggccggccggaagaggagccgagcgcggccggaaggaaccgagcccgtccgaagggagcggagcgcagcctggcctggggcccggtcgagcccgcgccatggcggccgaggcgacagctgtggccggaagcggggctgttggcggctgcctggccaaagacggcttgcagcagtctaagtgcccggacactaccccaaaacggcggcgcgcctcgtcgctgtcgcgtgacgccgagcgccgagcctaccaatggtgccgggagtacttgggcggggcctggcgccgagtgcagcccgaggagctgagggtttaccccgtgagcggaggcctcagcaacctgctcttccgctgctcgctcccggaccacctgcccagcgttggcgaggagccccgggaggtgcttctgcggctgtacggagccatcttgcagggcgtggactccctggtgctagaaagcgtgatgttcgccatacttgcggagcggtcgctggggccccagctgtacggagtcttcccagagggccggctggaacagtacatcccaagtcggccattgaaaactcaagagcttcgagagccagtgttgtcagcagccattgccacgaagatggcgcaatttcatggcatggagatgcctttcaccaaggagccccactggctgtttgggaccatggagcggtacctaaaacagatccaggacctgcccccaactggcctccctgagatgaacctgctggagatgtacagcctgaaggatgagatgggcaacctcaggaagttactagagtctaccccatcgccagtcgtcttctgccacaatgacatccaggaagggaacatcttgctgctctcagagccagaaaatgctgacagcctcatgctggtggacttcgagtacagcagttataactataggggctttgacattgggaaccatttttgtgagtgggtttatgattatactcacgaggaatggcctttctacaaagcaaggcccacagactaccccactcaagaacagcagttgcattttattcgtcattacctggcagaggcaaagaaaggtgagaccctctcccaagaggagcagagaaaactggaagaagatttgctggtagaagtcagtcggtatgctctggcatcccatttcttctggggtctgtggtccatcctccaggcatccatgtccaccatagaatttggttacttggactatgcccagtctcggttccagttctacttccagcagaaggggcagctgaccagtgtccactcctcatcctgactccaccctcccactccttggatttctcctggagcctccagggcaggaccttggagggaggaacaacgagcagaaggccctggcgactgggctgagcccccaagtgaaactgaggttcaggagaccggcctgttcctgagtttgagtaggtccccatggctggcaggccagagccccgtgctgtgtatgtaacacaataaacaagcttcttcttccca

SEQ ID NO: 349669 - DNA, 318 bp, Homo sapiens
cctggcttgctcaggtctcggtgagacctggagtcagtgttactaccccaggatcccgtgaacccagctgagcgtgcctggcctggcttgctcaggcctcccactccttggatttctcctggagcctccagggcaggaccttggagggaggaacaacgagcagaaggccctggcgactgggctgagcccccaagtgaaactgaggttcaggagaccggcctgttcctgagtttgactctaaagccaccatcctcacgagactctggggccccccaggctcccagacctttgagcaaccttcaccgcacagaaacccag

SEQ ID NO: 349670 - DNA, 1635 bp, Homo sapiens
agccgaatagagccggagagacccgagtatgaccggagaagcccaggccggccggaagaggagccgagcgcggccggaaggaaccgagcccgtccgaagggagcggagcgcagcctggcctggggcccggtcgagcccgcgccatggcggccgaggcgacagctgtggccggaagcggggctgttggcggctgcctggccaaagacggcttgcagcagtctaagtgcccggacactaccccaaaacggcggcgcgcctcgtcgctgtcgcgtgacgccgagcgccgagcctaccaatggtgccgggagtacttgggcggggcctggcgccgagtgcagcccgaggagctgagggtttaccccgtgagcggaggcctcagcaacctgctcttccgctgctcgctcccggaccacctgcccagcgttggcgaggagccccgggaggtgcttctgcggctgtacggagccatcttgcagggcgtggactccctggtgctagaaagcgtgatgttcgccatacttgcggagcggtcgctggggccccagctgtacggagtcttcccagagggccggctggaacagtacatcccaagtcggccattgaaaactcaagagcttcgagagccagtgttgtcagcagccattgccacgaagatggcgcaatttcatggcatggagatgcctttcaccaaggagccccactggctgtttgggaccatggagcggtacctaaaacagatccaggacctgcccccaactggcctccctgagatgaacctgctggagatgtacagcctgaaggatgagatgggcaacctcaggaagttactagagtctaccccatcgccagtcgtcttctgccacaatgacatccaggaaggtaggagaaggcatctgagtctcctaacccaagatggaagagccagagggctctggagtgagcagaacctcaccccattcccccagggaacatcttgctgctctcagagccagaaaatgctgacagcctcatgctggtggacttcgagtacagcagttataactataggggctttgacattgggaaccatttttgtgagtgggtttatgattatactcacgaggaatggcctttctacaaagcaaggcccacagactaccccactcaagaacagcagttgcattttattcgtcattacctggcagaggcaaagaaaggtgagaccctctcccaagaggagcagagaaaactggaagaagatttgctggtagaagtcagtcggtatgctctggcatcccatttcttctggggtctgtggtccatcctccaggcatccatgtccaccatagaatttggttacttggactatgcccagtctcggttccagttctacttccagcagaaggggcagctgaccagtgtccactcctcatcctgactccaccctcccactccttggatttctcctggagcctccagggcaggaccttggagggaggaacaacgagcagaaggccctggcgactgggctgagcccccaagtgaaactgaggttcaggagaccggcctgttcctgagtttgagtaggtccccatggctggcaggccagagccccgtgctgtgtatgtaacacaataaacaagcttcttcttccca

SEQ ID NO: 349671 - DNA, 1521 bp, Homo sapiens
agccgaatagagccggagagacccgagtatgaccggagaagcccaggccggccggaagaggagccgagcgcggccggaaggaaccgagcccgtccgaagggagcggagcgcagcctggcctggggcccggtcgagcccgcgccatggcggccgaggcgacagctgtggccggaagcggggctgttggcggctgcctggccaaagacggcttgcagcagtctaagtgcccggacactaccccaaaacggcggcgcgcctcgtcgctgtcgcgtgacgccgagcgccgagcctaccaatggtgccgggagtacttgggcggggcctggcgccgagtgcagcccgaggagctgagggtttaccccgtgagcggaggcctcagcaacctgctcttccgctgctcgctcccggaccacctgcccagcgttggcgaggagccccgggaggtgcttctgcggctgtacggagccatcttgcagggcgtggactccctggtgctagaaagcgtgatgttcgccatacttgcggagcggtcgctggggccccagctgtacggagtcttcccagagggccggctggaacagtacatcccaagtcggccattgaaaactcaagagcttcgagagccagtgttgtcagcagccattgccacgaagatggcgcaatttcatggcatggagatgcctttcaccaaggagccccactggctgtttgggaccatggagcggtacctaaaacagatccaggacctgcccccaactggcctccctgagatgaacctgctggagatgtacagcctgaaggatgagatgggcaacctcaggaagttactagagtctaccccatcgccagtcgtcttctgccacaatgacatccaggaagggaacatcttgctgctctcagagccagaaaatgctgacagcctcatgctggtggacttcgagtacagcagttataactataggggctttgacattgggaaccatttttgtgagtgggtttatgattatactcacgaggaatggcctttctacaaagcaaggcccacagactaccccactcaagaacagcagaggcaaagaaaggtgagaccctctcccaagaggagcagagaaaactggaagaagatttgctggtagaagtcagtcggtatgctctggcatcccatttcttctggggtctgtggtccatcctccaggcatccatgtccaccatagaatttggttacttggactatgcccagtctcggttccagttctacttccagcagaaggggcagctgaccagtgtccactcctcatcctgactccaccctcccactccttggatttctcctggagcctccagggcaggaccttggagggaggaacaacgagcagaaggccctggcgactgggctgagcccccaagtgaaactgaggttcaggagaccggcctgttcctgagtttgagtaggtccccatggctggcaggccagagccccgtgctgtgtatgtaacacaataaacaagcttcttcttccca

SEQ ID NO: 349672 - DNA, 1559 bp, Homo sapiens
agccgaatagagccggagagacccgagtatgaccggagaagcccaggccggccggaagaggagccgagcgcggccggaaggaaccgagcccgtccgaagggagcggagcgcagcctggcctggggcccggtcgagcccgcgccatggcggccgaggcgacagctgtggccggaagcggggctgttggcggctgcctggccaaagacggcttgcagcagtctaagtgcccggacactaccccaaaacggcggcgcgcctcgtcgctgtcgcgtgacgccgagcgccgagcctaccaatggtgccgggagtacttgggcggggcctggcgccgagtgcagcccgaggagctgagggtttaccccgtgagcggaggcctcagcaacctgctcttccgctgctcgctcccggaccacctgcccagcgttggcgaggagccccgggaggtgcttctgcggctgtacggagccatcttgcagggcgtggactccctggtgctagaaagcgtgatgttcgccatacttgcggagcggtcgctggggccccagctgtacggagtcttcccagagggccggctggaacagtacatcccaagtcggccattgaaaactcaagagcttcgagagccagtgttgtcagcagccattgccacgaagatggcgcaatttcatggcatggagatgcctttcaccaaggagccccactggctgtttgggaccatggagcggtacctaaaacagatccaggacctgcccccaactggcctccctgagatgaacctgctggagatgtacagcctgaaggatgagatgggcaacctcaggaagttactagagtctaccccatcgccagtcgtcttctgccacaatgacatccaggaagggaacatcttgctgctctcagagccagaaaatgctgacagcctcatgctggtggacttcgagtacagcagttataactataggggctttgacattgggaaccatttttgtgagtgggtttatgattatactcacgaggaatggcctttctacaaagcaaggcccacagactaccccactcaagaacagcagttgcattttattcgtcattacctggcagaggcaaagaaaggtgagaccctctcccaagaggagcagagaaaactggaagaagatttgctggtagaagtcagtcggtatgctctggcatcccatttcttctggggtctgtggtccatcctccaggcatccatgtccaccatagaatttggttacttggactatgcccagtctcggttccagttctacttccagcagaaggggcagctgaccagtgtccactcctcatcctgactccaccctcccactccttggatttctcctggagcctccagggcaggaccttggagggaggaacaacgagcagaaggccctggcgactgggctgagcccccaagtgaaactgaggttcaggagaccggcctgttcctgagtttgactctaaagccaccatcctcacgagactctggggccccccaggctcccagacctttgagcaaccttcaccgcacagaaacccag

SEQ ID NO: 349673 - DNA, 1397 bp, Homo sapiens
agccgaatagagccggagagacccgagtatgaccggagaagcccaggccggccggaagaggagccgagcgcggccggaaggaaccgagcccgtccgaagggagcggagcgcagcctggcctggggcccggtcgagcccgcgccatggcggccgaggcgacagctgtggccggaagcggggctgttggcggctgcctggccaaagacggcttgcagcagtctaagtgcccggacactaccccaaaacggcggcgcgcctcgtcgctgtcgcgtgacgccgagcgccgagcctaccaatggtgccgggagtacttgggcggggcctggcgccgagtgcagcccgaggagctgagggtttaccccgtgagcggaggcctcagcaacctgctcttccgctgctcgctcccggaccacctgcccagcgttggcgaggagccccgggaggtgcttctgcggctgtacggagccatcttgcagggcgtggactccctggtgctagaaagcgtgatgttcgccatacttgcggagcggtcgctggggccccagctgtacggagtcttcccagagggccggctggaacagtacatcccaagtcggccattgaaaactcaagagcttcgagagccagtgttgtcagcagccattgccacgaagatggcgcaatttcatggcatggagatgcctttcaccaaggagccccactggctgtttgggaccatggagcggtacctaaaacagatccaggacctgcccccaactggcctccctgagatgaacctgctggagatgtacagcctgaaggatgagatgggcaacctcaggaagttactagagtctaccccatcgccagtcgtcttctgccacaatgacatccaggaagggaacatcttgctgctctcagagccagaaaatgctgacagcctcatgctggtggacttcgagtacagcagttataactataggggctttgacattgggaaccatttttgtgagtgggtttatgattatactcacgaggaatggcctttctacaaagcaaggcccacagactaccccactcaagaacagcagttgcattttattcgtcattacctggcagaggcaaagaaaggtgagaccctctcccaagaggagcagagaaaactggaagaagatttgctggtagaagtcagtcggtatgctctggcatcccatttcttctggggtctgtggtccatcctccaggcatccatgtccaccatagaatttggttacttggactatgcccagtctcggttccagttctactccctgagggcccaggtggtggaggtggggttggagcaggaagggaattttgatttttttttttcttgatagatactaataaaaataaggctgtgtaattttctctcagcc

SEQ ID NO: 349674 - DNA, 595 bp, Homo sapiens
  misc_feature (209)..(211): n is a, c, g, or t
  misc_feature (215)..(215): n is a, c, g, or t
  misc_feature (219)..(219): n is a, c, g, or t
aacaaaccatggatttctcttccccgaggaaagggtatccgcctcaccattgctgaagagagagacaaaagactggcggccaaacagagcagtgggtgaaatgggtccctgggtgacatgtcagatctttgtacgtaattaaaaatattgtggcaggattaatagcaaaaaaaaaaaaaaaaaaaaaaaactcctcgtgccgaattcgnnnagangtcnggtatgctctggcatcccatttcttctggggtctgtggtccatcctccaggcatccatgtccaccatagaatttggttacttggactatgcccagtctcggttccagttctacttccagcagaaggggcagctgaccagtgtccactcctcatcctgactccaccctcccactccttggatttctcctggagcctccagggcaggaccttggagggaggaacaacgagcagaaggccctggcgactgggctgagcccccaagtgaaactgaggttcaggagaccggcctgttcctgagtttgagtaggtccccatggctggcaggccagagccccgtgctgtgtatgtaacacaataaacaagcttcttcttccca

SEQ ID NO: 349675 - DNA, 1957 bp, Homo sapiens
agccgaatagagccggagagacccgagtatgaccggagaagcccaggccggccggaagaggagccgagcgcggccggaaggaaccgagcccgtccgaagggagcggagcgcagcctggcctggggcccggtcgagcccgcgccatggcggccgaggcgacagctgtggccggaagcggggctgttggcggctgcctggccaaagacggcttgcagcagtctaagtgcccggacactaccccaaaacggcggcgcgcctcgtcgctgtcgcgtgacgccgagcgccgagcctaccaatggtgccgggagtacttgggcggggcctggcgccgagtgcagcccgaggagctgagggtttaccccgtgagcggaggcctcagcaacctgctcttccgctgctcgctcccggaccacctgcccagcgttggcgaggagccccgggaggtgcttctgcggctgtacggagccatcttgcagggcgtggactccctggtgctagaaagcgtgatgttcgccatacttgcggagcggtcgctggggccccagctgtacggagtcttcccagagggccggctggaacagtacatcccaagtcggccattgaaaactcaagagcttcgagagccagtgttgtcagcagccattgccacgaagatggcgcaatttcatggcatggagatgcctttcaccaaggagccccactggctgtttgggaccatggagcggtacctaaaacagatccaggacctgcccccaactggcctccctgagatgaacctgctggagatgtacagcctgaaggatgagatgggcaacctcaggaagttactagagtctaccccatcgccagtcgtcttctgccacaatgacatccaggaagggaacatcttgctgctctcagagccagaaaatgctgacagcctcatgctggtggacttcgagtacagcagttataactataggggctttgacattgggaaccatttttgtgagtgggtttatgattatactcacgaggaatggcctttctacaaagcaaggcccacagactaccccactcaagaacagcagttgcattttattcgtcattacctggcagaggcaaagaaaggtgagaccctctcccaagaggagcagagaaaactggaagaagatttgctggtagaagtcagtcggtatgctctggcatcccatttcttctggggtctgtggtccatcctccaggcatccatgtccaccatagaatttggttacttggactatgcccagtctcggttccagttctacttccagcagaaggggcagctgaccagtgtccactcctcatcctgactccaccctcccactccttggatttctcctggagcctccagggcaggaccttggagggaggaacaacgagcagaaggccctggcgactgggctgagcccccaagtgaaactgaggttcaggagaccggcctgttcctgagtttgagtaggtccccatggctggcaggccagagccccgtgctgtgtatgtaacacaataaacaagcttcttcttcccaaaaaaaaaaaaaagaacaaaaagaaacagaaaaaaaaaaaaaaaaaaaacacaacaaaaaaaaaaagaaacacaacaagccaacacaagaaaataagaaacaaagcgcaacaacaagaggggcgcgccgcgccgcgcctcgacacacacctgcccgctcgggcgcggagcgccaccgacctccccacgccacccaccattgcttctgcaaatagggggctccccccacacagcgggcggaccacgccagcactacgaaagcgaggcgcggaggcagccgggaaaagacgacacaaccggccctccgcgcgggagggctccaccccgccagctgccgggaccccgactggcggacccccgcccaactacgctcgcgcgcccaccacaattgaggcctcaccccacccgt

SEQ ID NO: 349676 - DNA, 1632 bp, Homo sapiens
agccgaatagagccggagagacccgagtatgaccggagaagcccaggccggccggaagaggagccgagcgcggccggaaggaaccgagcccgtccgaagggagcggagcgcagcctggcctggggcccggtcgagcccgcgccatggcggccgaggcgacagctgtggccggaagcggggctgttggcggctgcctggccaaagacggcttgcagcagtctaagtgcccggacactaccccaaaacggcggcgcgcctcgtcgctgtcgcgtgacgccgagcgccgagcctaccaatggtgccgggagtacttgggcggggcctggcgccgagtgcagcccgaggagctgagggtttaccccgtgagcggaggcctcagcaacctgctcttccgctgctcgctcccggaccacctgcccagcgttggcgaggagccccgggaggtgcttctgcggctgtacggagccatcttgcagggcgtggactccctggtgctagaaagcgtgatgttcgccatacttgcggagcggtcgctggggccccagctgtacggagtcttcccagagggccggctggaacagtacatcccaagtcggccattgaaaactcaagagcttcgagagccagtgttgtcagcagccattgccacgaagatggcgcaatttcatggcatggagatgcctttcaccaaggagccccactggctgtttgggaccatggagcggtacctaaaacagatccaggacctgcccccaactggcctccctgagatgaacctgctggagatgtacagcctgaaggatgagatgggcaacctcaggaagttactagagtctaccccatcgccagtcgtcttctgccacaatgacatccaggaagggaacatcttgctgctctcagagccagaaaatgctgacagcctcatgctggtggacttcgagtacagcagttataactataggggctttgacattgggaaccatttttgtgagtgggtttatgattatactcacgaggaatggcctttctacaaagcaaggcccacagactaccccactcaagaacagcagttgcattttattcgtcattacctggcagaggcaaagaaaggtgagaccctctcccaagaggagcagagaaaactggaagaagatttgctggtagaagtcagtcggtatgctctggcatcccatttcttctggggtctgtggtccatcctccaggcatccatgtccaccatagaatttggttacttggactatgcccagtctcggttccagttctacttccagcagaaggggcagctgaccagtgtccactcctcatcctgactccaccctcccactccttggatttctcctggagcctccagggcaggaccttggagggaggaacaacgagcagaaggccctggcgactgggctgagcccccaagtgaaactgaggttcaggagaccggcctgttcctgagtttgagtaggtccccatggctggcaggccagagccccgtgctgtgtatgtaacacaataaacaagcttcttcttcccactctaaagccaccatcctcacgagactctggggccccccaggctcccagacctttgagcaaccttcaccgcacagaaacccag

SEQ ID NO: 349677 - DNA, 1487 bp, Homo sapiens
agccgaatagagccggagagacccgagtatgaccggagaagcccaggccggccggaagaggagccgagcgcggccggaaggaaccgagcccgtccgaagggagcggagcgcagcctggcctggggcccggtcgagcccgcgccatggcggccgaggcgacagctgtggccggaagcggggctgttggcggctgcctggccaaagacggcttgcagcagtctaagtgcccggacactaccccaaaacggcggcgcgcctcgtcgctgtcgcgtgacgccgagcgccgagcctaccaatggtgccgggagtacttgggcggggcctggcgccgagtgcagcccgaggagctgagggtttaccccgtgagcggaggcctcagcaacctgctcttccgctgctcgctcccggaccacctgcccagcgttggcgaggagccccgggaggtgcttctgcggctgtacggagccatcttgcagggcgtggactccctggtgctagaaagcgtgatgttcgccatacttgcggagcggtcgctggggccccagctgtacggagtcttcccagagggccggctggaacagtacatcccaagtcggccattgaaaactcaagagcttcgagagccagtgttgtcagcagccattgccacgaagatggcgcaatttcatggcatggagatgcctttcaccaaggagccccactggctgtttgggaccatggagcggtacctaaaacagatccaggacctgcccccaactggcctccctgagatgaacctgctggagatgtacagcctgaaggatgagatgggcaacctcaggaagttactagagtctaccccatcgccagtcgtcttctgccacaatgacatccaggaagggaacatcttgctgctctcagagccagaaaatgctgacagcctcatgctggtggacttcgagtacagcagttataactataggggctttgacattgggaaccatttttgtgagtgggtttatgattatactcacgaggaatggcctttctacaaagcaaggcccacagactaccccactcaagaacagcagttgcattttattcgtcattacctggcagaggcaaagaaaggtgagaccctctcccaagaggagcagagaaaactggaagaagatttgctggtagaagtcagtcggtatgctctggcatcccatttcttctggggtctgtggtccatcctccaggcatccatgtccaccatagaatttggttacttggactatgcccagtctcggttccagttctacttccagcagaaggggcagctgaccagtgtccactcctcatcctgactccaccctcccactccttggatttctcctggagccttttagacaaggacaacagcgagggcatcgaggactcaagaatagccctggcactgggctgacgccctcagagtgaaaactgaaggtgtgaaggagacctggcactgttcggtagacgtg

SEQ ID NO: 349678 - DNA, 596 bp, Homo sapiens
ggtactgtggctactgctggagtgtggtacctgctggagggcgaggagtacagaatgtctggagaatgccagagtgccgtgagcatctctgtggtcagcggtagcaccagcactggaggcatcagcggaggattaggaagtggctccgggtttggcctgagtagtggctttggctccggctctggaagtggctttgggtttggtggcagtgtctctggcagttccagcagcaagatcatctctaccaccaccctgaacaagagacgatagaggagacgaggtccctgcagctcactgtgtccagctgggcccagcactggtgtctctgtgcttccttcacttcacctccatcctctgtctctggggctcatcttactagtatcccctccactatcccatgggctctctctgccccaggatgatcttctgtgctgggacagggactctgcctcttggagtttggtagctacttcttgatttgggcctggtgacccacctggaatgggaaggatgtcagctgacctctcacctcccatgggcagagaagaaaatgaccaggagtgtcatctcaagcacgtagctaacaagaccgacct

SEQ ID NO: 349679 - DNA, 377 bp, Homo sapiens
agcggccgcctactactactaaattcgcggccgcgtcgacgggaggtgagaggtcagctgacatccttcccattccaggtgggtcaccaggcccaaatcaagaagtagctaccaaactccaagaggcagagtcgaaaatgaccaggagtgtcatctccagaattattggggtcacatatgtcccttcccagtccaatgccatctcccactagatcctgtattatccatctacatcagaaccaaactacttctccaacacccggcagcacttggccctgcaagcttaggatgagaaccacttagtgtcccattctactcctctcattccctcttatccatctgcaggtgaatcttcaataaaatgcttttgtcattca

SEQ ID NO: 349680 - DNA, 400 bp, Homo sapiens
agcggccgcctactactactaaattcgcggccgcgtcgacgggaggtgagaggtcagctgacatccttcccattccaggtgggtcaccaggcccaaatcaagaagtagctaccaaactccaagaggcagagtcgaaaatgaccaggagtgtcatctccagaattattggggtcacatatgtcccttcccagtccaatgccatctcccactagatcctgtattatccatctacatcagaaccaaactacttctccaacacccggcagcacttggccctgcaagcttaggatgagaaccacttagtgtcccattctactcctctcattccctcttatccatctgcaggtgaatcttcaataaaatgcttttgtcattcaaaaaaaaaagtcgacgcggccgc

SEQ ID NO: 349681 - DNA, 274 bp, Homo sapiens
agcggccgcctactactactaaattcgcggccgcgtcgacgggagggacatatgtgaccccaataattctggagatgacactcctgggtccaatgccatctcccactagatcctgtattatccatctacatcagaaccaaactacttctccaacacccggcagcacttggccctgcaagcttaggatgagaaccacttagtgtcccattctactcctctcattccctcttatccatctgcaggtgaatcttcaataaaatgcttttgtcattca

SEQ ID NO: 349682 - DNA, 213 bp, Homo sapiens
ctggactgggaagggacatatgagacgtccaatgccatctcccactagatcctgtattatccatctacatcagaaccaaactacttctccaacacccggcagcacttggccctgcaagcttaggatgagaaccacttagtgtcccattctactcctctcattccctcttatccatctgcaggtgaatcttcaataaaatgcttttgtcattca

SEQ ID NO: 349683 - DNA, 139 bp, Homo sapiens
  misc_feature (123)..(123): n is a, c, g, or t
tgatctagaggatcttagttactggatgtcagctgacctctcacctcccatgggcagagaagaaaatgaccaggagtgtcatctccagaattattggggtcacatatgtcccttcccaccccnaaaaaaaaaagggggg

SEQ ID NO: 349684 - DNA, 1902 bp, Homo sapiens
gctagtagagccgtgtgttgaatcggccgagggtggttggtgcggcggttcggagctttggcactggtggctttggtggtggatttgggggctccttcagtggtaagggtggccctggcttccccgtctgccccgctgggggaattcaggaggtcaccatcaaccagagcttgctcacccccctccacgtggagattgaccctgagatccagaaagtccggacggaagagcgcgaacagatcaagctcctcaacaacaagtttgcctccttcatcgacaaggtgcagttcttagagcaacagaataaggtcctggagaccaaatggaacctgctccagcagcagacgaccaccacctccagcaaaaaccttgagcccctctttgagacctacctcagtgtcctgaggaagcagctagataccttgggcaatgacaaagggcgcctgcagtctgagctgaagaccatgcaggacagcgtggaggacttcaagactaagtatgaagaggagatcaacaaacgcacagcagccgagaatgactttgtggtcctaaagaaggacgtggatgctgcctacctgaacaaggtggagttggaggccaaggtggacagtcttaatgacgagatcaacttcctgaaggtcctctatgatgcggagctgtcccagatgcagacccatgtcagcgacacgtccgtggtcctttccatggacaacaaccgcaacctggacctggacagcattattgccgaggtccgtgcccagtacgaggagattgcccagaggagcaaggctgaggctgaagccctgtaccagaccaaggtccagcagctccagatctcggttgaccaacatggtgacaacctgaagaacaccaagagtgaaattgcagagctcaacaggatgatccagaggctgcgggcagagatcgagaacatcaagaagcagtgccagactcttcaggtatccgtggctgatgcagagcagcgaggtgagaatgcccttaaagatgcccacagcaagcgcgtagagctggaggctgccctgcagcaggccaaggaggagctggcacgaatgctgcgtgagtaccaggagctcatgagtgtgaagctggccttggacatcgagatcgccacctaccgcaaactgctggagggcgaggagtacagaatgtctggagaatgccagagtgccgtgagcatctctgtggtcagcggtagcaccagcactggaggcatcagcggaggattaggaagtggctccgggtttggcctgagtagtggctttggctccggctctggaagtggctttgggtttggtggcagtgtctctggcagttccagcagcaagatcatctctaccaccaccctgaacaagagacgatagaggagacgaggtccctgcagctcactgtgtccagctgggcccagcactggtgtctctgtgcttccttcacttcacctccatcctctgtctctggggctcatcttactagtatcccctccactatcccatgggctctctctgccccaggatgatcttctgtgctgggacagggactctgcctcttggagtttggtagctacttcttgatttgggcctggtgacccacctggaatgggaaggatgtcagctgacctctcacctcccatgggcagagaagaaaatgaccaggagtgtcatctccagaattattggggtcacatatgtcccttcccagtccaatgccatctcccactagatcctgtattatccatctacatcagaaccaaactacttctccaacacccggcagcacttggccctgcaagcttaggatgagaaccacttagtgtcccattctactcctctcattccctcttatccatctgcaggtgaatcttcaataaaatgcttttgtcattca

SEQ ID NO: 349685 - DNA, 1540 bp, Homo sapiens
tcccacaaatgagcatgagtgcgtgctcgatgtttaaatcggccgaagcagctagataccttgggcaatgacaaagggcgcctgcagtctgagctgaagaccatgcaggacagcgtggaggacttcaagactaagtatgaagaggagatcaacaaacgcacagcagccgagaatgactttgtggtcctaaagaaggacgtggatgctgcctacctgaacaaggtggagttggaggccaaggtggacagtcttaatgacgagatcaacttcctgaaggtcctctatgatgcggagctgtcccagatgcagacccatgtcagcgacacgtccgtggtcctttccatggacaacaaccgcaacctggacctggacagcattattgccgaggtccgtgcccagtacgaggagattgcccagaggagcaaggctgaggctgaagccctgtaccagaccaaggtccagcagctccagatctcggttgaccaacatggtgacaacctgaagaacaccaagagtgaaattgcagagctcaacaggatgatccagaggctgcgggcagagatcgagaacatcaagaagcagtgccagactcttcaggtatccgtggctgatgcagagcagcgaggtgagaatgcccttaaagatgcccacagcaagcgcgtagagctggaggctgccctgcagcaggccaaggaggagctggcacgaatgctgcgtgagtaccaggagctcatgagtgtgaagctggccttggacatcgagatcgccacctaccgcaaactgctggagggcgaggagtacagaatgtctggagaatgccagagtgccgtgagcatctctgtggtcagcggtagcaccagcactggaggcatcagcggaggattaggaagtggctccgggtttggcctgagtagtggctttggctccggctctggaagtggctttgggtttggtggcagtgtctctggcagttccagcagcaagatcatctctaccaccaccctgaacaagagacgatagaggagacgaggtccctgcagctcactgtgtccagctgggcccagcactggtgtctctgtgcttccttcacttcacctccatcctctgtctctggggctcatcttactagtatcccctccactatcccatgggctctctctgccccaggatgatcttctgtgctgggacagggactctgcctcttggagtttggtagctacttcttgatttgggcctggtgacccacctggaatgggaaggatgtcagctgacctctcacctcccatgggcagagaagaaaatgaccaggagtgtcatctccagaattattggggtcacatatgtcccttcccagtccaatgccatctcccactagatcctgtattatccatctacatcagaaccaaactacttctccaacacccggcagcacttggccctgcaagcttaggatgagaaccacttagtgtcccattctactcctctcattccctcttatccatctgcaggtgaatcttcaataaaatgcttttgtcattca

SEQ ID NO: 349686 - DNA, 1950 bp, Homo sapiens
gctagtagagccgtgtgttgaatcggccgagggtggttggtgcggcggttcggagctttggcactggtggctttggtggtggatttgggggctccttcagtggtaagggtggccctggcttccccgtctgccccgctgggggaattcaggaggtcaccatcaaccagagcttgctcacccccctccacgtggagattgaccctgagatccagaaagtccggacggaagagcgcgaacagatcaagctcctcaacaacaagtttgcctccttcatcgacaaggtgcagttcttagagcaacagaataaggtcctggagaccaaatggaacctgctccagcagcagacgaccaccacctccagcaaaaaccttgagcccctctttgagacctacctcagtgtcctgaggaagcagctagataccttgggcaatgacaaagggcgcctgcagtctgagctgaagaccatgcaggacagcgtggaggacttcaagactaagtatgaagaggagatcaacaaacgcacagcagccgagaatgactttgtggtcctaaagaaggacgtggatgctgcctacctgaacaaggtggagttggaggccaaggtggacagtcttaatgacgagatcaacttcctgaaggtcctctatgatgcggagctgtcccagatgcagacccatgtcagcgacacgtccgtggtcctttccatggacaacaaccgcaacctggacctggacagcattattgccgaggtccgtgcccagtacgaggagattgcccagaggagcaaggctgaggctgaagccctgtaccagaccaaggtccagcagctccagatctcggttgaccaacatggtgacaacctgaagaacaccaagagtgaaattgcagagctcaacaggatgatccagaggctgcgggcagagatcgagaacatcaagaagcagtgccagactcttcaggtatccgtggctgatgcagagcagcgaggtgagaatgcccttaaagatgcccacagcaagcgcgtagagctggaggctgccctgcagcaggccaaggaggagctggcacgaatgctgcgtgagtaccaggagctcatgagtgtgaagctggccttggacatcgagatcgccacctaccgcaaactgctggagggcgaggagtacagaatgtctggagaatgccagagtgccgtgagcatctctgtggtcagcggtagcaccagcactggaggcatcagcggaggattaggaagtggctccgggtttggcctgagtagtggctttggctccggctctggaagtggctttgggtttggtggcagtgtctctggcagttccagcagcaagatcatctctaccaccaccctgaacaagagacgatagaggagacgaggtccctgcagctcactgtgtccagctgggcccagcactggtgtctctgtgcttccttcacttcacctccatcctctgtctctggggctcatcttactagtatcccctccactatcccatgggctctctctgccccaggatgatcttctgtgctgggacagggactctgcctcttggagtttggtagctacttcttgatttgggcctggtgacccacctggaatgggaaggatgtcagctgacctctcacctcccatgggcagagaagaaaatgaccaggagtgtcatctccagaattattggggtcacatatgtcccttcccagtccaatgccatctcccactagatcctgtattatccatctacatcagaaccaaactacttctccaacacccggcagcacttggccctgcaagcttaggatgagaaccacttagtgtcccattctactcctctcattccctcttatccatctgcaggtgaatcttcaataaaatgcttttgtcattcaaaaaaaaaaaagtcgacgcggccgcgaatttagtagtagtagtcgacc

SEQ ID NO: 349687 - DNA, 2092 bp, Homo sapiens
gctagtagagccgtgtgttgaatcggccgagggtggttggtgcggcggttcggagctttggcactggtggctttggtggtggatttgggggctccttcagtggtaagggtggccctggcttccccgtctgccccgctgggggaattcaggaggtcaccatcaaccagagcttgctcacccccctccacgtggagattgaccctgagatccagaaagtccggacggaagagcgcgaacagatcaagctcctcaacaacaagtttgcctccttcatcgacaaggtgcagttcttagagcaacagaataaggtcctggagaccaaatggaacctgctccagcagcagacgaccaccacctccagcaaaaaccttgagcccctctttgagacctacctcagtgtcctgaggaagcagctagataccttgggcaatgacaaagggcgcctgcagtctgagctgaagaccatgcaggacagcgtggaggacttcaagactaagtatgaagaggagatcaacaaacgcacagcagccgagaatgactttgtggtcctaaagaaggacgtggatgctgcctacctgaacaaggtggagttggaggccaaggtggacagtcttaatgacgagatcaacttcctgaaggtcctctatgatgcggagctgtcccagatgcagacccatgtcagcgacacgtccgtggtcctttccatggacaacaaccgcaacctggacctggacagcattattgccgaggtccgtgcccagtacgaggagattgcccagaggagcaaggctgaggctgaagccctgtaccagaccaaggtccagcagctccagatctcggttgaccaacatggtgacaacctgaagaacaccaagagtgaaattgcagagctcaacaggatgatccagaggctgcgggcagagatcgagaacatcaagaagcagtgccagactcttcaggtatccgtggctgatgcagagcagcgaggtgagaatgcccttaaagatgcccacagcaagcgcgtagagctggaggctgccctgcagcaggccaaggaggagctggcacgaatgctgcgtgagtaccaggagctcatgagtgtgaagctggccttggacatcgagatcgccacctaccgcaaactgctggagggcgaggagtacagaatgtctggagaatgccagagtgccgtgagcatctctgtggtcagcggtagcaccagcactggaggcatcagcggaggattaggaagtggctccgggtttggcctgagtagtggctttggctccggctctggaagtggctttgggtttggtggcagtgtctctggcagttccagcagcaagatcatctctaccaccaccctgaacaagagacgatagaggagacgaggtccctgcagctcactgtgtccagctgggcccagcactggtgtctctgtgcttccttcacttcacctccatcctctgtctctggggctcatcttactagtatcccctccactatcccatgggctctctctgccccaggatgatcttctgtgctgggacagggactctgcctcttggagtttggtagctacttcttgatttgggcctggtgacccacctggaatgggaaggatgtcagctgacctctcacctcccatgggcagagaagaaaatgaccaggagtgtcatctccagaattattggggtcacatatgtcccttcccagtccaatgccatctcccactagatcctgtattatccatctacatcagaaccaaactacttctccaacacccggcagcacttggccctgcaagcttaggatgagaaccacttagtgtcccattctactcctctcattccctcttatccatctgcaggtgaatcttcaataaaatgcttttgtcattcaaaaaaaaaaaaaaaaaaaaaaaaaaaaaaaaaaaaaaaaaaaaaaaaaaaaaaaaaaaggggggggcgcgcaaaataccccccggcggagggggcccacattactgcgcgccccccacgttcttttgtcgcaacaaggggcgccccccaataagaaggacgagcccataatataacacccagagacgccg

SEQ ID NO: 349688 - DNA, 1981 bp, Homo sapiens
gccctctcatcctgccctccggcccctctgcagctatgaggtcctccgtctctcggcaaacatactccacaaaagggggcttcagctccaactctgccagcggagggagtgggtcccaggcccgcaccagcttcagctcagtgacggtgtctcggagcagtggcagtggtggcggggcccactgtggccccggcacaggtggctttggcagccgaagcctctataacttggggggccacaagagtatctctgtcagtgtggccggaggggccttgtcggggcgggctctggggggctttggctttggcagcagggcatttatgggacagggggctggcaggcagacgtttgggcctgcttgtcctcctggggggatccaggaggtcactgtcaaccagagcctgctgacccccctccatgtggagattgaccccgagatccagcgagtgcgcactcaggagcgggagcagatcaagaccctcaacaacaagttcgcctccttcatcgacaaggtgcggttcctggagcaacagaataaggtgctggagaccaagtgggcactgctgcaggagcagggccagaacttgggtgtcaccaggaacaacctggagcccctctttgaggcctacctgggtagcatgcggagcacgctggacagacttcagagcgagcgggggaggctggactcagagctcaggaacgtgcaggaccttgtggaggacttcaagaacaagtacgaggatgaaatcaacaagcacactgctgcagagaacgagtttgtggtgctcaagaaggatgtggatgcagcatacatgggccggatggatctgcatggcaaagtgggcaccttgacccaggagattgacttcctgcagcaactctatgaaatggagctgagccaagtgcagacccacgtgtctaacaccaatgtggtgctgtccatggacaacaaccgcaacctggacctggacagcatcatcgccgaggtcaaggcccagtatgagctgattgcccagaggagccgggctgaggccgaggcctggtaccagaccaagtatgaggagctgcaggtgactgctgggaagcatggggacaacctgcgggacaccaagaacgagattgctgagctcacccgcactatccagaggcttcagggggaggctgatgcagccaagaagcagtgtcagcagctgcagacggccattgcggaagcggagcagcgtggggagctggcactcaaggatgctcagaagaagcttggggatctggatgtggccctgcaccaggccaaggaggacctgacacggctgctgcgtgactaccaggagctgatgaatgtcaagctggccctggacgtggagattgccacctaccgcaagcttctggagagcgaggagagcaggatgtctggagaatgtcccagtgcagtcagcatttctgtgactggcaactccaccactgtgtgcggaggtggcgcagccagctttggaggtggcatctccctgggtgggagtgggggggccaccaagggtggattcagcacaaatgtgggctatagcaccgtcaagggagggccagtctctgcgggcacctccatcctgcggaagaccactacggtcaagacgtccagccagaggtattagctgctgagccctgcaagggcccctgcaatcctgtccctgccctcctcaccccacctctgctgtcctttccagtcacttctcaggagcaggaacagccaggggacctcagacccagggtattttcataccagactatttgcatcttgggaagcgctcaaatctactcaggttttctccttggtcctgcagtaggatgggagggaaggttaaagttgccagcttgagtgatgtgcttggggtgacttgggggtgaccttttgaccaccgagaggaggctgaatttctcaagccattaggagagagagaaattgggaagtggtcccaaagacccttcaacc

SEQ ID NO: 349689 - DNA, 791 bp, Homo sapiens
gcgtcgactttttttttttgaatgacaaaagcattttattgaagattcacctgcagatggataagagggaatgagaggagtagaatgggacactaagtggttctcatcctaagcttgcagggccaagtgctgccgggtgttggagaagtagtttggcctgagtagtggctttggctccggctctggaagtggctttgggtttggtggcagtgtctctggcagttccagcagcaagatcatctctaccaccaccctgaacaagagacgatagaggagacgaggtccctgcagctcactgtgtccagctgggcccagcactggtgtctctgtgcttccttcacttcacctccatcctctgtctctggggctcatcttactagtatcccctccactatcccatgggctctctctgccccaggatgatcttctgtgctgggacagggactctgcctcttggagtttggtagctacttcttgatttgggcctggtgacccacctggaatgggaaggatgtcagctgacctctcacctcccatgggcagagaagaaaatgaccaggagtgtcatctccagaattattggggtcacatatgtcccttcccagtccaatgccatctcccactagatcctgtattatccatctacatcagaaccaaactacttctccaacacccggcagcacttggccctgcaagcttaggatgagaaccacttagtgtcccattctactcctctcattccctcttatccatctgcaggtgaatcttcaataaaatgcttttgtcattca

SEQ ID NO: 349690 - DNA, 529 bp, Homo sapiens
gcgtcgaccaccagtgctgggcccagctggacacagtgagctgcagggacctcgtctggtgtctctgtgcttccttcacttcacctccatcctctgtctctggggctcatcttactagtatcccctccactatcccatgggctctctctgccccaggatgatcttctgtgctgggacagggactctgcctcttggagtttggtagctacttcttgatttgggcctggtgacccacctggaatgggaaggatgtcagctgacctctcacctcccatgggcagagaagaaaatgaccaggagtgtcatctccagaattattggggtcacatatgtcccttcccagtccaatgccatctcccactagatcctgtattatccatctacatcagaaccaaactacttctccaacacccggcagcacttggccctgcaagcttaggatgagaaccacttagtgtcccattctactcctctcattccctcttatccatctgcaggtgaatcttcaataaaatgcttttgtcattca

SEQ ID NO: 349691 - DNA, 2248 bp, Homo sapiens
gccctctcatcctgccctccggcccctctgcagctatgaggtcctccgtctctcggcaaacatactccacaaaagggggcttcagctccaactctgccagcggagggagtgggtcccaggcccgcaccagcttcagctcagtgacggtgtctcggagcagtggcagtggtggcggggcccactgtggccccggcacaggtggctttggcagccgaagcctctataacttggggggccacaagagtatctctgtcagtgtggccggaggggccttgtcggggcgggctctggggggctttggctttggcagcagggcatttatgggacagggggctggcaggcagacgtttgggcctgcttgtcctcctggggggatccaggaggtcactgtcaaccagagcctgctgacccccctccatgtggagattgaccccgagatccagcgagtgcgcactcaggagcgggagcagatcaagaccctcaacaacaagttcgcctccttcatcgacaaggtgcggttcctggagcaacagaataaggtgctggagaccaagtgggcactgctgcaggagcagggccagaacttgggtgtcaccaggaacaacctggagcccctctttgaggcctacctgggtagcatgcggagcacgctggacagacttcagagcgagcgggggaggctggactcagagctcaggaacgtgcaggaccttgtggaggacttcaagaacaagtacgaggatgaaatcaacaagcacactgctgcagagaacgagtttgtggtgctcaagaaggatgtggatgcagcatacatgggccggatggatctgcatggcaaagtgggcaccttgacccaggagattgacttcctgcagcaactctatgaaatggagctgagccaagtgcagacccacgtgtctaacaccaatgtggtgctgtccatggacaacaaccgcaacctggacctggacagcatcatcgccgaggtcaaggcccagtatgagctgattgcccagaggagccgggctgaggccgaggcctggtaccagaccaagtatgaggagctgcaggtgactgctgggaagcatggggacaacctgcgggacaccaagaacgagattgctgagctcacccgcactatccagaggcttcagggggaggctgatgcagccaagaagcagtgtcagcagctgcagacggccattgcggaagcggagcagcgtggggagctggcactcaaggatgctcagaagaagcttggggatctggatgtggccctgcaccaggccaaggaggacctgacacggctgctgcgtgactaccaggagctgatgaatgtcaagctggccctggacgtggagattgccacctaccgcaagcttctggagagcgaggagagcaggatgtctggagaatgtcccagtgcagtcagcatttgtgagtatttactccccacttcctgctccacccctggccaggccccagaactctgctcagtttatgcaacctgtacctgtcctaaagcatgctctcctccattcgagcccctggagacaggttcagagggtcctagttctgggcttctctatccatttcccatagctctgctgcttgattttgttctgattccccactgatttctgggtctcccccagccctctctggcatggccgccctgactaatccagaccctttgctttgcagctgtgactggcaactccaccactgtgtgcggaggtggcgcagccagctttggaggtggcatctccctgggtgggagtgggggggccaccaagggtggattcagcacaaatgtgggctatagcaccgtcaagggagggccagtctctgcgggcacctccatcctgcggaagaccactacggtcaagacgtccagccagaggtattagctgctgagccctgcaagggcccctgcaatcctgtccctgccctcctcaccccacctctgctgtcctttccagtcacttctcaggagcaggaacagccaggggacctcagacccagggtattttcataccagactatttgcatcttgggaagcgctcaaatctactcaggttttctccttggtcctgcagtaggatgggagggaaggttaaagttgccagcttgagtgatgtgcttggggtgacttgggggtgaccttttgaccaccgagaggaggctgaatttctcaagccattaggagagagagaaattgggaagtggtcccaaagacccttcaacc

SEQ ID NO: 349692 - DNA, 1589 bp, Homo sapiens
gggataactgactgctctcccggcctttctgtgtcccctaggatgtctggagaatgtcccagtgcagtcagcatttgtatgaagaggagatcaacaaacgcacagcagccgagaatgactttgtggtcctaaagaaggacgtggatgctgcctacctgaacaaggtggagttggaggccaaggtggacagtcttaatgacgagatcaacttcctgaaggtcctctatgatgcggagctgagccaagtgcagacccacgtgtctaacaccaatgtggtgctgtccatggacaacaaccgcaacctggacctggacagcatcatcgccgaggtcaaggcccagtatgagctgattgcccagaggagccgggctgaggccgaggcctggtaccagaccaagccagcagctccagatctcggttgaccaacatggtgacaacctgaagaacaccaagagtgaaattgcagagctcaacaggatgatccagaggctgcgggcagagatcgagaacatcaagaagcagtgccagactcttcaggtatccgtggctgatgcggagcagcgtggggagctggcactcaaggatgctcagaagaagcttggggatctggatgtggccctgcaccaggccaaggaggacctgacacggctgctgcgtgactaccaggagctgatgaatgtcaagctggccctggacgtggagattgccacctaccgcaagcttctggagagcgaggagagcaggatgtctggagaatgtcccagtgcagtcagcatttgtgagtatttactccccacttcctgctccacccctggccaggccccagaactctgctcagtttatgcaacctgtacctgtcctaaagcatgctctcctccattcgagcccctggagacaggttcagagggtcctagttctgggcttctctatccatttcccatagctctgctgcttgattttgttctgattccccactgatttctgggtctcccccagccctctctggcatggccgccctgactaatccagaccctttgctttgcagctgtgactggcaactccaccactgtgtgcggaggtggcgcagccagctttggaggtggcatctccctgggtgggagtgggggggccaccaagggtggattcagcacaaatgtgggctatagcaccgtcaagggagggccagtctctgcgggcacctccatcctgcggaagaccactacggtcaagacgtccagccagaggtattagctgctgagccctgcaagggcccctgcaatcctgtccctgccctcctcaccccacctctgctgtcctttccagtcacttctcaggagcaggaacagccaggggacctcagacccagggtattttcataccagactatttgcatcttgggaagcgctcaaatctactcaggttttctccttggtcctgcagtaggatgggagggaaggttaaagttgccagcttgagtgatgtgcttggggtgacttgggggtgaccttttgaccaccgagaggaggctgaatttctcaagccattaggagagagagaaattgggaagtggtcccaaagacccttcaacc

SEQ ID NO: 349693 - DNA, 312 bp, Homo sapiens
tgcccagaggagcaaggctgaggctgaagccctgtaccagaccaaggtgggtggtatggatctctcaggagatggggctggctctggggctctgcttttgatgtctgtgaacaggtgatcattagctcaagcccaatagaagtcagatatgaacagactctcccaggcatcgttggtcctggtctgatttgaaactacttgacatttggtgctattcttgccacctgtggcaattctcactgagttcacttgagaatggaccctacccaaatgcccctaacacctggttctctgtgtcttcttgagtcttag

SEQ ID NO: 349694 - DNA, 2186 bp, Homo sapiens
agcactcaccggcctgggccctgtcacttctctgatagctcccagctcgctctctgcagccatgattgccagacagcagtgtgtccgaggcgggccccggggcttcagctgtggctcggccattgtaggcggtggcaagagaggtgccttcagctcagtctccatgtctggaggtgctggccgatgctcttctgggggatttggcagcagaagcctctacaacctcagggggaacaaaagcatctccatgagtgtggctgggtcacgacaaggtgcctgctttgggggtgctggaggctggcactggtggctttggtgccggcggcttcggagctggtttcttggcactggtggctttggtggtggatttgggggctccttcagtggtaagggtggccctggcttccccgtctgccccgctgggggaattcaggaggtcaccatcaaccagagcttgctcacccccctccacgtggagattgaccctgagatccagaaagtccggacggaagagcgcgaacagatcaagctcctcaacaacaagtttgcctccttcatcgacaaggtgcagttcttagagcaacagaataaggtcctggagaccaaatggaacctgctccagcagcagacgaccaccacctccagcaaaaaccttgagcccctctttgagacctacctcagtgtcctgaggaagcagctagataccttgggcaatgacaaagggcgcctgcagtctgagctgaagaccatgcaggacagcgtggaggacttcaagactaagtatgaagaggagatcaacaaacgcacagcagccgagaatgactttgtggtcctaaagaaggacgtggatgctgcctacctgaacaaggtggagttggaggccaaggtggacagtcttaatgacgagatcaacttcctgaaggtcctctatgatgcggagctgtcccagatgcagacccatgtcagcgacacgtccgtggtcctttccatggacaacaaccgcaacctggacctggacagcattattgccgaggtccgtgcccagtacgaggagattgcccagaggagcaaggctgaggctgaagccctgtaccagaccaaggtccagcagctccagatctcggttgaccaacatggtgacaacctgaagaacaccaagagtgaaattgcagagctcaacaggatgatccagaggctgcgggcagagatcgagaacatcaagaagcagtgccagactcttcaggtatccgtggctgatgcagagcagcgaggtgagaatgcccttaaagatgcccacagcaagcgcgtagagctggaggctgccctgcagcaggccaaggaggagctggcacgaatgctgcgtgagtaccaggagctcatgagtgtgaagctggccttggacatcgagatcgccacctaccgcaaactgctggagggcgaggagtacagaatgtctggagaatgccagagtgccgtgagcatctctgtggtcagcggtagcaccagcactggaggcatcagcggaggattaggaagtggctccgggtttggcctgagtagtggctttggctccggctctggaagtggctttgggtttggtggcagtgtctctggcagttccagcagcaagatcatctctaccaccaccctgaacaagagacgatagaggagacgaggtccctgcagctcactgtgtccagctgggcccagcactggtgtctctgtgcttccttcacttcacctccatcctctgtctctggggctcatcttactagtatcccctccactatcccatgggctctctctgccccaggatgatcttctgtgctgggacagggactctgcctcttggagtttggtagctacttcttgatttgggcctggtgacccacctggaatgggaaggatgtcagctgacctctcacctcccatgggcagagaagaaaatgaccaggagtgtcatctccagaattattggggtcacatatgtcccttcccagtccaatgccatctcccactagatcctgtattatccatctacatcagaaccaaactacttctccaacacccggcagcacttggccctgcaagcttaggatgagaaccacttagtgtcccattctactcctctcattccctcttatccatctgcaggtgaatcttcaataaaatgcttttgtcattca

SEQ ID NO: 349695 - DNA, 417 bp, Homo sapiens
agcggccgcctactactactaaattcgcggccgcgtcgacgggagctacttcttgatttgggcctggtgacccacctggaatgggaaggatgtcagctgacctctcacctcccatgggcagagaagaaaatgaccaggagtgtcatctccagaattattggggtcacatatgtcccttcccagtccaatgccatctcccactagatcctgtattatccatctacatcagaaccaaactacttctccaacacccggcagcacttggccctgcaagcttaggatgagaaccacttagtgtcccattctactcctctcattccctcttatccatctgcaggtgaatcttcaataaaatgcttttgtcattcaaaaaaaaaaaagtcgacgcggccgcgaatttagtagtagtagtcgacc

SEQ ID NO: 349696 - DNA, 2144 bp, Homo sapiens
agcactcaccggcctgggccctgtcacttctctgatagctcccagctcgctctctgcagccatgattgccagacagcagtgtgtccgaggcgggccccggggcttcagctgtggctcggccattgtaggcggtggcaagagaggtgccttcagctcagtctccatgtctggaggtgctggccgatgctcttctgggggatttggcagcagaagcctctacaacctcagggggaacaaaagcatctccatgagtgtggctgggtcacgacaaggtgcctgctttgggggtgctggaggctttggcactggtggctttggtggtggatttgggggctccttcagtggtaagggtggccctggcttccccgtctgccccgctgggggaattcaggaggtcaccatcaaccagagcttgctcacccccctccacgtggagattgaccctgagatccagaaagtccggacggaagagcgcgaacagatcaagctcctcaacaacaagtttgcctccttcatcgacaaggtgcagttcttagagcaacagaataaggtcctggagaccaaatggaacctgctccagcagcagacgaccaccacctccagcaaaaaccttgagcccctctttgagacctacctcagtgtcctgaggaagcagctagataccttgggcaatgacaaagggcgcctgcagtctgagctgaagaccatgcaggacagcgtggaggacttcaagactaagtatgaagaggagatcaacaaacgcacagcagccgagaatgactttgtggtcctaaagaaggacgtggatgctgcctacctgaacaaggtggagttggaggccaaggtggacagtcttaatgacgagatcaacttcctgaaggtcctctatgatgcggagctgtcccagatgcagacccatgtcagcgacacgtccgtggtcctttccatggacaacaaccgcaacctggacctggacagcattattgccgaggtccgtgcccagtacgaggagattgcccagaggagcaaggctgaggctgaagccctgtaccagaccaaggtccagcagctccagatctcggttgaccaacatggtgacaacctgaagaacaccaagagtgaaattgcagagctcaacaggatgatccagaggctgcgggcagagatcgagaacatcaagaagcagtgccagactcttcaggtatccgtggctgatgcagagcagcgaggtgagaatgcccttaaagatgcccacagcaagcgcgtagagctggaggctgccctgcagcaggccaaggaggagctggcacgaatgctgcgtgagtaccaggagctcatgagtgtgaagctggccttggacatcgagatcgccacctaccgcaaactgctggagggcgaggagtacagaatgtctggagaatgccagagtgccgtgagcatctctgtggtcagcggtagcaccagcactggaggcatcagcggaggattaggaagtggctccgggtttggcctgagtagtggctttggctccggctctggaagtggctttgggtttggtggcagtgtctctggcagttccagcagcaagatcatctctaccaccaccctgaacaagagacgatagaggagacgaggtccctgcagctcactgtgtccagctgggcccagcactggtgtctctgtgcttccttcacttcacctccatcctctgtctctggggctcatcttactagtatcccctccactatcccatgggctctctctgccccaggatgatcttctgtgctgggacagggactctgcctcttggagtttggtagctacttcttgatttgggcctggtgacccacctggaatgggaaggatgtcagctgacctctcacctcccatgggcagagaagaaaatgaccaggagtgtcatctccagaattattggggtcacatatgtcccttcccagtccaatgccatctcccactagatcctgtattatccatctacatcagaaccaaactacttctccaacacccggcagcacttggccctgcaagcttaggatgagaaccacttagtgtcccattctactcctctcattccctcttatccatctgcaggtgaatcttcaataaaatgcttttgtcattca

SEQ ID NO: 349697 - DNA, 908 bp, Homo sapiens
tgctagagaggccgtgttaaatcggacgaggccatgaggagctgccctgcagcaggccaaggaggagctggcacgaatgctgcgtgagtaccaggagctcatgagtgtgaagctggccttggacatcgagatcgccacctaccgcaaactgctggagggcgaggagtacagaatgtctggagaatgccagagtgccgtgagcatctctgtggtcagcggtagcaccagcactggaggcatcagcggaggattaggaagtggctccgggtttggcctgagtagtggctttggctccggctctggaagtggctttgggtttggtggcagtgtctctggcagttccagcagcaagatcatctctaccaccaccctgaacaagagacgatagaggagacgaggtccctgcagctcactgtgtccagctgggcccagcactggtgtctctgtgcttccttcacttcacctccatcctctgtctctggggctcatcttactagtatcccctccactatcccatgggctctctctgccccaggatgatcttctgtgctgggacagggactctgcctcttggagtttggtagctacttcttgatttgggcctggtgacccacctggaatgggaaggatgtcagctgacctctcacctcccatgggcagagaagaaaatgaccaggagtgtcatctccagaattattggggtcacatatgtcccttcccagtccaatgccatctcccactagatcctgtattatccatctacatcagaaccaaactacttctccaacacccggcagcacttggccctgcaagcttaggatgagaaccacttagtgtcccattctactcctctcattccctcttatccatctgcaggtgaatcttcaataaaatgcttttgtcattca

SEQ ID NO: 349698 - DNA, 790 bp, Homo sapiens
ggtactgtggctactgctggagtgtggtacctgctggagggcgaggagtacagaatgtctggagaatgccagagtgccgtgagcatctctgtggtcagcggtagcaccagcactggaggcatcagcggaggattaggaagtggctccgggtttggcctgagtagtggctttggctccggctctggaagtggctttgggtttggtggcagtgtctctggcagttccagcagcaagatcatctctaccaccaccctgaacaagagacgatagaggagacgaggtccctgcagctcactgtgtccagctgggcccagcactggtgtctctgtgcttccttcacttcacctccatcctctgtctctggggctcatcttactagtatcccctccactatcccatgggctctctctgccccaggatgatcttctgtgctgggacagggactctgcctcttggagtttggtagctacttcttgatttgggcctggtgacccacctggaatgggaaggatgtcagctgacctctcacctcccatgggcagagaagaaaatgaccaggagtgtcatctccagaattattggggtcacatatgtcccttcccagtccaatgccatctcccactagatcctgtattatccatctacatcagaaccaaactacttctccaacacccggcagcacttggccctgcaagcttaggatgagaaccacttagtgtcccattctactcctctcattccctcttatccatctgcaggtgaatcttcaataaaatgcttttgtcattca

SEQ ID NO: 349699 - DNA, 603 bp, Homo sapiens
tctcataggttcgcaggactacctgggatcgaggttccagcagcaagatcatctctaccaccaccctgaacaagagacgatagaggagacgaggtccctgcagctcactgtgtccagctgggcccagcactggtgtctctgtgcttccttcacttcacctccatcctctgtctctggggctcatcttactagtatcccctccactatcccatgggctctctctgccccaggatgatcttctgtgctgggacagggactctgcctcttggagtttggtagctacttcttgatttgggcctggtgacccacctggaatgggaaggatgtcagctgacctctcacctcccatgggcagagaagaaaatgaccaggagtgtcatctccagaattattggggtcacatatgtcccttcccagtccaatgccatctcccactagatcctgtattatccatctacatcagaaccaaactacttctccaacacccggcagcacttggccctgcaagcttaggatgagaaccacttagtgtcccattctactcctctcattccctcttatccatctgcaggtgaatcttcaataaaatgcttttgtcattca

SEQ ID NO: 349700 - DNA, 887 bp, Homo sapiens
ggaacttcctcttccaccagcagatttcaccagcagtggaagctttggaaaaaaaaatccaccatctctgtccttaggaaaagcatgaaatagaaagtgggcagaaactaggcagctctgtctggtcgtgggcttgtttccattggggcagggatgctgtccgtagcccacatgggcagagaggaaagaaaaggggaggatgggagttggcacagcctactggtggctctgcactttctgcagcactggcttttggacctgggcacagccctatacacatacttctcatgtttcctggtcttgtcatcaggattcactgagtggatccaatgtaaaggcagagggaaggagagggttttcatgtgggcaccagggataactgactgctctcccggcctttctgtgtcccctaggatgtctggagaatgtcccagtgcagtcagcatttgtgagtatttactccccacttcctgctccacccctggccaggccccagaactctgctcagtttatgcaacctgtacctgtcctaaagcatgctctcctccattcgagcccctggagacaggttcagagggtcctagttctgggcttctctatccatttcccatagctctgctgcttgattttgttctgattccccactgatttctgggtctcccccagccctctctggcatggccgccctgactaatccagaccctttgctttgcagctgtgactggcaactccaccactgtgtgcggaggtggcgcagccagctttggaggtggcatctccctgggtgggagtgggggggccaccaagggtggattcagcacaaatgtgggctatagcaccgtcaagggagggccagtctctgcgggcacctccatcctgcggaagac

SEQ ID NO: 349701 - DNA, 1912 bp, Homo sapiens
  misc_feature (1905)..(1905): n is a, c, g, or t
  misc_feature (1907)..(1912): n is a, c, g, or t
tggcgggagtcttgaccgccgccgggctcttggtacctcagcgcgagcgccaggcgtccggccgccgtggctatgttcgtgtccgatttccgcaaagagttctacgaggtggtccagagccagagggtccttctcttcgtggcctcggacgtggatgctctgtgtgcgtgcaagatccttcaggccttgttccagtgtgaccacgtgcaatatacgctggttccagtttctgggtggcaagaacttgaaactgcatttcttgagcataaagaacagtttcattattttattctcataaactgtggagctaatgtagacctattggatattcttcaacctgatgaagacactatattctttgtgtgtgacacccataggccagtcaatgtcgtcaatgtatacaacgatacccagatcaaattactcattaaacaagatgatgaccttgaagttcccgcctatgaagacatcttcagggatgaagaggaggatgaagagcattcaggaaatgacagtgatgggtcagagccttctgagaagcgcacacggttagaagaggagatagtggagcaaaccatgcggaggaggcagcggcgagagtgggaggcccggagaagagacatcctctttgactacgagcagtatgaatatcatgggacatcgtcagccatggtgatgtttgagctggcttggatgctgtccaaggacctgaatgacatgctgtggtgggccatcgttggactaacagaccagtgggtgcaagacaagatcactcaaatgaaatacgtgactgatgttggtgtcctgcagcgccacgtttcccgccacaaccaccggaacgaggatgaggagaacacactctccgtggactgcacacggatctcctttgagtatgacctccgcctggtgctctaccagcactggtccctccatgacagcctgtgcaacaccagctataccgcagccaggttcaagctgtggtctgtgcatggacagaagcggctccaggagttccttgcagacatgggtcttcccctgaagcaggtgaagcagaagttccaggccatggacatctccttgaaggagaatttgcgggaaatgattgaagagtctgcaaataaatttgggatgaaggacatgcgcgtgcagactttcagcattcattttgggttcaagcacaagtttctggccagcgacgtggtctttgccaccatgtctttgatggagagccccgagaaggatggctcagggacagatcacttcatccaggctctggacagcctctccaggagtaacctggacaagctgtaccatggcctggaactcgccaagaagcagctgcgagccacccagcagaccattgccagctgcctttgcaccaacctcgtcatctcccaggggcctttcctgtactgctctctcatggagggcactccagatgtcatgctgttctctaggccggcatccctaagcctgctcagcaaacacctgctcaagtcctttgtgtgttcgacaaagaaccggcgctgcaaactgctgcccctggtgatggctgcccccctgagcatggagcatggcacagtgaccgtggtgggcatccccccagagaccgacagctcggacaggaagaacttttttgggagggcgtttgagaaggcagcggaaagcaccagctcccggatgctgcacaaccattttgacctctcagtaattgagctgaaagctgaggatcggagcaagtttctggacgcacttatttccctcctgtcctaggaatttgattcttccagaatgaccttcttatttatgtaactggctttcatttagattgtaagttatggacatgatttgagatgtagaagccattttttattaaataaaatgcttattttaggctccgtcaanannnnnn

SEQ ID NO: 349702 - DNA, 203 bp, Homo sapiens
actcattaaacaagatgatgaccttgaagttcccgcctatgaagacatcttcagggatgaagaggaggatgaagagcattcaggaaatgacagtgatgggtcagagccttctgagaagcgcacacggttagaagaggtgagtttgggtctctcacagctatcccagaggaacttgcactcccagaggtcggaggtcatcctga

SEQ ID NO: 349703 - DNA, 935 bp, Homo sapiens
tggcgggagtcttgaccgccgccgggctcttggtacctcagcgcgagcgccaggcgtccggccgccgtggctatgttcgtgtccgatttccgcaaagagttctacgaggtggtccagagccagagggtccttctcttcgtggcctcggacgtggatgctctgtgtgcgtgcaagatccttcaggccttgttccagtgtgaccacgtgcaatatacgctggttccagtttctgggtggcaagaacttgaaactgcatttcttgagcataaagaacagtttcattattttattctcataaactgtggagctaatgtagacctattggatattcttcaacctgatgaagacactatattctttgtgtgtgacacccataggccagtcaatgtcgtcaatgtatacaacgatacccagatcaaattactcattaaacaagatgatgaccttgaagttcccgcctatgaagacatcttcagggatgaagaggaggatgaagagcattcaggaaatgacagtgatgggtcagagccttctgagaagcgcacacggttagaagaggagatagtggagcaaaccatgcggaggaggcagcggcgagagtgggaggcccggagtggctctgggagtgaacctgtggccgctgcattggagaagagctccaggttgttcgccggtcccatgagtgacaggacagccccaaggtctcccaggtacatgccatccattagagaccatggccctggctctttatttttatcaagtttttccaatgtagatactttgatttacaaattatttataagaagtgctctaaaatgaaaatattggaaaggttattctagcttgaagtgagcatgcagcagcgcccttgaggtgggtcccgggggaagcccttgctggatctctcatggaaggtctcccaggccatccagctg

SEQ ID NO: 349704 - DNA, 468 bp, Homo sapiens
atcctttcattagtagcaacatggataaaattggaagtcattatgttaagtgaaataaaccatgaacagaaatacaaatatatcatgttctcactggtatgcaggagctaaaaaaagtggatcttatgaaggtcaagggtagtgggcatctccaatacgccaaatgtggcctgttccaccacttctctcttcccacatccaggtctggtagagagaagtggtggaacaacaggccacatttggcgcattggagatgaaattcttggttgaaaattcttttctttaagaatgttgaatattggcccccactctcttctggcttgtagggtttctgcagagagatatgctgttagtctgatgggcttccctttataggtaacctgacccttctctctggctgcccttaactttttttccttcatttcaagcttggagaatctgacaattacgtttcttggggttgctttt

SEQ ID NO: 349705 - DNA, 544 bp, Homo sapiens
tatgcttttataaaattgagcttagactctatttttattttacaaatattccacttaatagtgcatgaacttaactgcagacaaagagacagaaacagaaatgaaggaattcctgaactccctagcacagttagaaagacatttgtctaaacgactcctctaagggcaaacatacattaaattaaggagaagacattaagatttggagtggttttcttattcctttttacaaccaagttaaggtgtgagttgcctatggtacaatgcatccatttcaagtttgatgactattactctaaaaggtcctcttgtgccctttgcagtcagtcccgccctccccctggccccagcaattaatgatgtattttctgtcactatacaggttagttttacctgttctagaaattcaccttgatggcgccacacaggatgccctcttttcatcactcggcatgatgtttttgaggtaatccatgctatctcatgtttctgtaatgtgtcccattttattgctgggtagttggggtagatcgccgacacattc

SEQ ID NO: 349706 - DNA, 1102 bp, Homo sapiens
tatgcttttataaaattgagcttagactctatttttattttacaaatattccacttaatagtgcatgaacttaactgcagacaaagagacagaaacagaaatgaaggaattcctgaactccctagcacagttagaaagacatttgtctaaacgactcctctaagggcaaacatacattaaattaaggagaagacattaagatttggagtggttttcttattcctttttacaaccaagttaaggtgtgagttgcctatggtacaatgcatccatttcaagtttgatgactattactctaaaaggtcctcttgtgccctttgcagtcagtcccgccctccccctggccccagcaattaatgatgtattttctgtcactatacaggttagttttacctgttctagaaattcaccttgatggcgccacacaggatgccctcttttcatcactcggcatgatgtttttgagccaaatttctcccatttgggttaatcgcaggatcagcacgtccacagtgcaatggaaaagcaacgccctgggaaaacaaccttcataacgtcctctgcgatgccaggtttgatcggccagtggcagtatctttggaaactttcatatttaccaggcatgaagaatctttctcatttcaattggacctttatcaccagcccaagggagaggaaagtcctaacgcatatcaagttctgagctggccaggacttagtcagtatctactgaaaccttgaatatcttggctgtgttaactgttttgacccaacatggagcgaaaatgttggttgtaccttgagattctgacatctggttgaagtccaggttcactggcccaggacaggtcattcagctgtttgaaaaaaaacagaagagagaccaggccatccactgaggtaatctccatgcagcatgaaccactggttccaatgaacccaccatcaccatacttctcaggaatcgctggtcactagactgagagttctgtgaaagctgagatcatatcttactaatctctgtgttcatggttcccagctcagggtctagcactgagggagttctcaggagagtgttcatcaattattgaataaaaagcga

SEQ ID NO: 349707 - DNA, 1593 bp, Homo sapiens
tgcgcgcctgaatccgtcccacccaggcccagacgcaggcttcttctcctcgggtcttggtcctgcatcctctctctcccagagcctccgttagggggtgggaaaggactttgccataggtcgctgaggccaccatctgctctcttactggccaagggcgtaaaaagatagtcctcccattagctagagagcaaaccccagaaagcctattggctgcgccgtccgcgggccttggtccgctttgaaggcgggctgcggctgcgagaggagggcgggcgggaggctagctgttgtcgtggttgctcggaggcacgtgtgcagtcccggaagcggcgaggggaaactgctccgcgcgcgccgcgggaggaggaaccgcccggtcctttagggtccgggcccggccgggccatggattcaatgcctgagcccgcgtcccgctgtcttctgcttcttcccttgctgctgctgctgctgctgctgctgccggccccggagctgggcccgagccaggccggagctgaggagaacgactgggttcgcctgcccagcaaatgcgaagggacttgcggttaatcgaagtcactgagaccatttgcaagaggctcctggattatagcctgcacaaggagaggaccggcagcaatcgatttgccaagggcatgtcagagacctttgagacattacacaacctggtacacaaaggggtcaaggtggtgatggacatcccctatgagctgtggaacgagacttctgcagaggtggctgacctcaagaagcagtgtgatgtgctggtggaagagtttgaggaggtgatcgaggactggtacaggaaccaccaggaggaagacctgactgaattcctctgcgccaaccacgtgctgaagggaaaagacaccagttgcctggcagagcagtggtccggcaagaagggagacacagctgccctgggagggaagaagtccaagaagaagagcagcagggccaaggcagcaggcggcaggagtagcagcagcaaacaaaggaaggagctgggtggccttgagggagaccccagccccgaggaggatgagggcatccagaaggcatcccctctcacacacagcccccctgatgagctctgagcccacccagcatcctctgtcctgagacccctgattttgaagctgaggagtcaggggcatggctctggcaggccgggatggccccgcagccttcagcccctccttgccttggctgtgccctcttctgccaaggaaagacacaagccccaggaagaactcagagccgtcatgggtagcccacgccgtcctttcccctccccaagtgtttctctcctgacccagggttcaggcaggccttgtggtttcaggactgcaaggactccagtgtgaactcaggaggggcaggtgtcagaactgggcaccaggactggagccccctccggagaccaaactcaccatccctcagtcctccccaacagggtactaggactgcagccccctgtagctcctctctgcttacccctcctgtggacaccttgcactctgcctggcccttcccagagcccaaagagtaaaaatgttctggttctga

SEQ ID NO: 349708 - DNA, 908 bp, Homo sapiens
  misc_feature (17)..(17): n is a, c, g, or t
tcggcttggtacgcctncgggtatgggatggaaaagacaccagttgcctggcagagcagtggtccggcaagaagggagacacagctgccctgggagggaagaagtccaagaagaagagcagcagggccaaggcagcaggcggcaggagtagcagcagcaaacaaaggaaggagctgggtggccttgagggagaccccagccccgaggaggatgagggcatccagaaggcatcccctctcacacacagcccccctgatgagctctgagcccacccagcatcctctgtcctgagacccctgattttgaagctgaggagtcaggggcatggctctggcaggccgggatggccccgcagccttcagcccctccttgccttggctgtgccctcttctgccaaggaaagacacaagccccaggaagaactcagagccgtcatgggtagcccacgccgtcctttcccctccccaagtgtttctctcctgacccagggttcaggcaggccttgtggtttcaggactgcaaggactccagtgtgaactcaggaggggcaggtgtcagaactgggcaccaggactggagccccctccggagaccaaactcaccatccctcagtcctccccaacagggtactaggactgcagccccctgtagctcctctctgcttacccctcctgtggacaccttgcactctgcctggcccttcccagagcccaaagagtaaaaatgttctggttctgaaaccacgaaagagaacacacacaaagaaagcttgacggggggattatggccatgaatacgccgggatgtgacacacaacccagacatacgttttgtctcataagcccataaagagttttcctataaccggacagttggaacccgaaaaattgggcgctcctaaattgacg

SEQ ID NO: 349709 - DNA, 520 bp, Homo sapiens
tgagacggagtttcgctctttgttgcccaggctggagtgcaatggtgcaatctcagctcactgcaacctctgcctcgcaggttcaagccattctcctgcctcagcctcccaagtagctgggattacaggcatgtaccaccacgcccagctaattttgtatttttggtagagacgtggtttctccatgttggccaggctggtctcgaactcccgacctcaggtgatccacgccgtcctttcccctccccaagtgtttctctcctgacccagggttcaggcaggccttgtggtttcaggactgcaaggactccagtgtgaactcaggaggggcaggtgtcagaactgggcaccaggactggagccccctccggagaccaaactcaccatccctcagtcctccccaacagggtactaggactgcagccccctgtagctcctctctgcttacccctcctgtggacaccttgcactctgcctggcccttcccagagcccaaagagtaaaaatgttctggttctga

SEQ ID NO: 349710 - DNA, 988 bp, Homo sapiens
agcccgtggggctgaggaggggaaggctaaaacccacccactctcgggagcagcaagtgctgggaaggcccagggttgtcttggggtgaggggaggcatgggcataggatgaggcccagggcagtgcactgaccttacgctgctccctcgtgtcctggacacctggctgccgttccctccctccctctctcctgctgctcctcttcccaaggcctcccatttgttgtgtaaaatgcagtgtttacctggccagctcccgcccctgttcctacttccacctggccttgactgttggtcctgaaccttgttttctgatgaccacacttgatcactctgaggttcctagctgttgtacctggagtgcagttgggaggacacccggttcccaacaccatctggtcacaccatgttcctcagggccaagggaggagcagagaggctggcctctagggagaaggggtggggaagctcaggcacctcccagtttgtcctgaaggcagggatcggggcaattggtacagtagtgatgacaattgtatgtattcaaattgtatgctttaacttttactattaccacactcttgtgaggtgtgctgttaacctcattgtgtagaggagaaaacaggctagagtcaagtgatatgcttggagtcaggtgaccttggagtcaaggtcctgctgttaaggagtggtatagctgggacgcagacactggcgttcagattacaaatccatggtacttccactctccacagctgccagggcctcttcccccaacccctggcactgacagtgtgagttgtatcgaactggtttagtttcttggccttaacctgtcaccaccaccaagattctttttgttttgttttgttttgtttttttggggcggaattgcactccagcctgagtaacagactgagaccctgtctcaaaaaacaaaatgagacaaaaaacctgctcgtaataaagtgtgaaattataaaaagaa

SEQ ID NO: 349711 - DNA, 1887 bp, Homo sapiens
tgcgcgcctgaatccgtcccacccaggcccagacgcaggcttcttctcctcgggtcttggtcctgcatcctctctctcccagagcctccgttagggggtgggaaaggactttgccataggtcgctgaggccaccatctgctctcttactggccaagggcgtaaaaagatagtcctcccattagctagagagcaaaccccagaaagcctattggctgcgccgtccgcgggccttggtccgctttgaaggcgggctgcggctgcgagaggagggcgggcgggaggctagctgttgtcgtggttgctcggaggcacgtgtgcagtcccggaagcggcgaggggaaactgctccgcgcgcgccgcgggaggaggaaccgcccggtcctttagggtccgggcccggccgggccatggattcaatgcctgagcccgcgtcccgctgtcttctgcttcttcccttgctgctgctgctgctgctgctgctgccggccccggagctgggcccgagccaggccggagctgaggagaacgactgggttcgcctgcccagcaaatgcgaagtgtgtaaatatgttgctgtggagctgaagtcagcctttgaggaaaccggcaagaccaaggaggtgattggcacgggctatggcatcctggaccagaaggcctctggagtcaaatacaccaagtcggacttgcggttaatcgaagtcactgagaccatttgcaagaggctcctggattatagcctgcacaaggagaggaccggcagcaatcgatttgccaagggcatgtcagagacctttgagacattacacaacctggtacacaaaggggtcaaggtggtgatggacatcccctatgagctgtggaacgagacttctgcagaggtggctgacctcaagaagcagtgtgatgtgctggtggaagagtttgaggaggtgatcgaggactggtacaggaaccaccaggaggaagacctgactgaattcctctgcgccaaccacgtgctgaagggaaaagacaccagttgcctggcagagcagtggtccggcaagaagggagacacagctgccctgggagggaagaagtccaagaagaagagcagcagggccaaggcagcaggcggcaggagtagcagcagcaaacaaaggaaggagctgggtggccttgagggagaccccagccccgaggaggatgagggcatccagaaggcatcccctctcacacacagcccccctgatgagctctgagcccacccagcatcctctgtcctgagacccctgattttgaagctgaggagtcaggggcatggctctggcaggccgggatggccccgcagccttcagcccctccttgccttggctgtgccctcttctgccaaggaaagacacaagccccaggaagaactcagagccgtcatgggtagcccacgccgtcctttcccctccccaagtgtttctctcctgacccagggttcaggcaggccttgtggtttcaggactgcaaggactccagtgtgaactcaggaggggcaggtgtcagaactgggcaccaggactggagccccctccggagaccaaactcaccatccctcagtcctccccaacagggtactaggactgcagccccctgtagctcctctctgcttacccctcctgtggacaccttgcactctgcctggcccttcccagagcccaaagagtaaaaatgttctggttctgaaaccacgaaagagaacacacacaaagaaagcttgacggggggattatggccatgaatacgccgggatgtgacacacaacccagacatacgttttgtctcataagcccataaagagttttcctataaccggacagttggaacccgaaaaattgggcgctcctaaattgacg

SEQ ID NO: 349712 - DNA, 1753 bp, Homo sapiens
tgcgcgcctgaatccgtcccacccaggcccagacgcaggcttcttctcctcgggtcttggtcctgcatcctctctctcccagagcctccgttagggggtgggaaaggactttgccataggtcgctgaggccaccatctgctctcttactggccaagggcgtaaaaagatagtcctcccattagctagagagcaaaccccagaaagcctattggctgcgccgtccgcgggccttggtccgctttgaaggcgggctgcggctgcgagaggagggcgggcgggaggctagctgttgtcgtggttgctcggaggcacgtgtgcagtcccggaagcggcgaggggaaactgctccgcgcgcgccgcgggaggaggaaccgcccggtcctttagggtccgggcccggccgggccatggattcaatgcctgagcccgcgtcccgctgtcttctgcttcttcccttgctgctgctgctgctgctgctgctgccggccccggagctgggcccgagccaggccggagctgaggagaacgactgggttcgcctgcccagcaaatgcgaagtgtgtaaatatgttgctgtggagctgaagtcagcctttgaggaaaccggcaagaccaaggaggtgattggcacgggctatggcatcctggaccagaaggcctctggagtcaaatacaccaagtcggacttgcggttaatcgaagtcactgagaccatttgcaagaggctcctggattatagcctgcacaaggagaggaccggcagcaatcgatttgccaagggcatgtcagagacctttgagacattacacaacctggtacacaaaggggtcaaggtggtgatggacatcccctatgagctgtggaacgagacttctgcagaggtggctgacctcaagaagcagtgtgatgtgctggtggaagagtttgaggaggtgatcgaggactggtacaggaaccaccaggaggaagacctgactgaattcctctgcgccaaccacgtgctgaagggaaaagacaccagttgcctggcagagcagtggtccggcaagaagggagacacagctgccctgggagggaagaagtccaagaagaagagcagcagggccaaggcagcaggcggcaggagtagcagcagcaaacaaaggaaggagctgggtggccttgagggagaccccagccccgaggaggatgagggcatccagaaggcatcccctctcacacacagcccccctgatgagctctgagcccacccagcatcctctgtcctgagacccctgattttgaagctgaggagtcaggggcatggctctggcaggccgggatggccccgcagccttcagcccctccttgccttggctgtgccctcttctgccaaggaaagacacaagccccaggaagaactcagagccgtcatgggtagcccacgccgtcctttcccctccccaagtgtttctctcctgacccagggttcaggcaggccttgtggtttcaggactgcaaggactccagtgtgaactcaggaggggcaggtgtcagaactgggcaccaggactggagccccctccggagaccaaactcaccatccctcagtcctccccaacagggtactaggactgcagccccctgtagctcctctctgcttacccctcctgtggacaccttgcactctgcctggcccttcccagagcccaaagagtaaaaatgttctggttctgagatttctgagtcctctgcagccctcagaggtgccct

SEQ ID NO: 349713 - DNA, 1473 bp, Homo sapiens
tgcgcgcctgaatccgtcccacccaggcccagacgcaggcttcttctcctcgggtcttggtcctgcatcctctctctcccagagcctccgttagggggtgggaaaggactttgccataggtcgctgaggccaccatctgctctcttactggccaagggcgtaaaaagatagtcctcccattagctagagagcaaaccccagaaagcctattggctgcgccgtccgcgggccttggtccgctttgaaggcgggctgcggctgcgagaggagggcgggcgggaggctagctgttgtcgtggttgctcggaggcacgtgtgcagtcccggaagcggcgaggggaaactgctccgcgcgcgccgcgggaggaggaaccgcccggtcctttagggtccgggcccggccgggccatggattcaatgcctgagcccgcgtcccgctgtcttctgcttcttcccttgctgctgctgctgctgctgctgctgccggccccggagctgggcccgagccaggccggagctgaggagaacgactgggttcgcctgcccagcaaatgcgaagtgtgtaaatatgttgctgtggagctgaagtcagcctttgaggaaaccggcaagaccaaggaggtgattggcacgggctatggcatcctggaccagaaggcctctggagtcaaatacaccaagtcggacttgcggttaatcgaagtcactgagaccatttgcaagaggctcctggattatagcctgcacaaggagaggaccggcagcaatcgatttgccaagggcatgtcagagacctttgagacattacacaacctggtacacaaaggggtcaaggtggtgatggacatcccctatgagctgtggaacgagacttctgcagaggtggctgacctcaagaagcagtgtgatgtgctggtggaagagtttgaggaggtgatcgaggactggtacaggaaccaccaggaggaagacctgactgaattcctctgcgccaaccacgtgctgaagggaaaagacaccagttgcctggcagagcagtggtccggcaagaagggagacacagctgccctgggagggaagaagtccaagaagaagagcagcagggccaaggcagcaggcggcaggagtagcagcagcaaacaaaggaaggagctgggtggccttgagggagaccccagccccgaggaggatgagggcatccagaaggcatcccctctcacacacagcccccctgatgagctctgagcccacccagcatcctctgtctgagaccctcatctctaaaaagcgaataaaaacagaaaaaacaccaaaacaaccaggatgtctcccatttgcactccacttaagtgtggagacttaggctgatcacatcactgcactccagcctgagtaacagactgagaccctgtctcaaaaaacaaaatgagacaaaaaacctgctcgtaataaagtgtgaaattataaaaagaa

SEQ ID NO: 349714 - DNA, 1779 bp, Homo sapiens
tgcgcgcctgaatccgtcccacccaggcccagacgcaggcttcttctcctcgggtcttggtcctgcatcctctctctcccagagcctccgttagggggtgggaaaggactttgccataggtcgctgaggccaccatctgctctcttactggccaagggcgtaaaaagatagtcctcccattagctagagagcaaaccccagaaagcctattggctgcgccgtccgcgggccttggtccgctttgaaggcgggctgcggctgcgagaggagggcgggcgggaggctagctgttgtcgtggttgctcggaggcacgtgtgcagtcccggaagcggcgaggggaaactgctccgcgcgcgccgcgggaggaggaaccgcccggtcctttagggtccgggcccggccgggccatggattcaatgcctgagcccgcgtcccgctgtcttctgcttcttcccttgctgctgctgctgctgctgctgctgccggccccggagctgggcccgagccaggccggagctgaggagaacgactgggttcgcctgcccagcaaatgcgaagtgtgtaaatatgttgctgtggagctgaagtcagcctttgaggaaaccggcaagaccaaggaggtgattggcacgggctatggcatcctggaccagaaggcctctggagtcaaatacaccaagtccatttcagatcccccagaccagatgacctatcttccttccagctctgagtcacttcccattgggacttgcggttaatcgaagtcactgagaccatttgcaagaggctcctggattatagcctgcacaaggagaggaccggcagcaatcgatttgccaagggcatgtcagagacctttgagacattacacaacctggtacacaaaggggtcaaggtggtgatggacatcccctatgagctgtggaacgagacttctgcagaggtggctgacctcaagaagcagtgtgatgtgctggtggaagagtttgaggaggtgatcgaggactggtacaggaaccaccaggaggaagacctgactgaattcctctgcgccaaccacgtgctgaagggaaaagacaccagttgcctggcagagcagtggtccggcaagaagggagacacagctgccctgggagggaagaagtccaagaagaagagcagcagggccaaggcagcaggcggcaggagtagcagcagcaaacaaaggaaggagctgggtggccttgagggagaccccagccccgaggaggatgagggcatccagaaggcatcccctctcacacacagcccccctgatgagctctgagcccacccagcatcctctgtcctgagacccctgattttgaagctgaggagtcaggggcatggctctggcaggccgggatggccccgcagccttcagcccctccttgccttggctgtgccctcttctgccaaggaaagacacaagccccaggaagaactcagagccgtcatgggtagcccacgccgtcctttcccctccccaagtgtttctctcctgacccagggttcaggcaggccttgtggtttcaggactgcaaggactccagtgtgaactcaggaggggcaggtgtcagaactgggcaccaggactggagccccctccggagaccaaactcaccatccctcagtcctccccaacagggtactaggactgcagccccctgtagctcctctctgcttacccctcctgtggacaccttgcactctgcctggcccttcccagagcccaaagagtaaaaatgttctggttctga

SEQ ID NO: 349715 - DNA, 1336 bp, Homo sapiens
tgcgcgcctgaatccgtcccacccaggcccagacgcaggcttcttctcctcgggtcttggtcctgcatcctctctctcccagagcctccgttagggggtgggaaaggactttgccataggtcgctgaggccaccatctgctctcttactggccaagggcgtaaaaagatagtcctcccattagctagagagcaaaccccagaaagcctattggctgcgccgtccgcgggccttggtccgctttgaaggcgggctgcggctgcgagaggagggcgggcgggaggctagctgttgtcgtggttgctcggaggcacgtgtgcagtcccggaagcggcgaggggaaactgctccgcgcgcgccgcgggaggaggaaccgcccggtcctttagggtccgggcccggccgggccatggattcaatgcctgagcccgcgtcccgctgtcttctgcttcttcccttgctgctgctgctgctgctgctgctgccggccccggagctgggcccgagccaggccggagctgaggagaacgactgggttcgcctgcccagcaaatgcgaagtgtgtaaatatgttgctgtggagctgaagtcagcctttgaggaaaccggcaagaccaaggaggtgattggcacgggctatggcatcctggaccagaaggcctctggagtcaaatacaccaagtcggacttgcggttaatcgaagtcactgagaccatttgcaagaggctcctggattatagcctgcacaaggagaggaccggcagcaatcgatttgccaagggcatgtcagagacctttgagacattacacaacctggtacacaaaggggtcaaggtggtgatggacatcccctatgagctgtggaacgagacttctgcagaggtggctgacctcaagaagcagtgtgatgtgctggtggaagagtttgaggaggtgatcgaggactggtacaggaaccaccaggaggaagacctgactgaattcctctgcgccaaccacgtgctgaagggaaaagacaccagttgcctggcagagcagtggtccggcaagaagggagacacagctgccctgggagggaagaagtccaagaagaagagcagcagggccaaggcagcaggcggcaggagtagcagcagcaaacaaaggaaggagctgggtggccttgagggagaccccaccccctccggagaccaaactcaccatccctcagtcctccccaacagggtactaggactgcagccccctgtagctcctctctgcttacccctcctgtggacaccttgcactctgcctggcccttcccagagcccaaagagtaaaaatgttctggttctga

SEQ ID NO: 349716 - DNA, 1528 bp, Homo sapiens
tgcgcgcctgaatccgtcccacccaggcccagacgcaggcttcttctcctcgggtcttggtcctgcatcctctctctcccagagcctccgttagggggtgggaaaggactttgccataggtcgctgaggccaccatctgctctcttactggccaagggcgtaaaaagatagtcctcccattagctagagagcaaaccccagaaagcctattggctgcgccgtccgcgggccttggtccgctttgaaggcgggctgcggctgcgagaggagggcgggcgggaggctagctgttgtcgtggttgctcggaggcacgtgtgcagtcccggaagcggcgaggggaaactgctccgcgcgcgccgcgggaggaggaaccgcccggtcctttagggtccgggcccggccgggccatggattcaatgcctgagcccgcgtcccgctgtcttctgcttcttcccttgctgctgctgctgctgctgctgctgccggccccggagctgggcccgagccaggccggagctgaggagaacgactgggttcgcctgcccagcaaatgcgaagtgtgtaaatatgttgctgtggagctgaagtcagcctttgaggaaaccggcaagaccaaggaggtgattggcacgggctatggcatcctggaccagaaggcctctggagtcaaatacaccaagtcggacttgcggttaatcgaagtcactgagaccatttgcaagaggctcctggattatagcctgcacaaggagaggaccggcagcaatcgatttgccaagggcatgtcagagacctttgagacattacacaacctggtacacaaaggggtcaaggtggtgatggacatcccctatgagctgtggaacgagacttctgcagaggtggctgacctcaagaagcagtgtgatgtgctggtggaagagtttgaggagaggagtagcagcagcaaacaaaggaaggagctgggtggccttgagggagaccccagccccgaggaggatgagggcatccagaaggcatcccctctcacacacagcccccctgatgagctctgagcccacccagcatcctctgtcctgagacccctgattttgaagctgaggagtcaggggcatggctctggcaggccgggatggccccgcagccttcagcccctccttgccttggctgtgccctcttctgccaaggaaagacacaagccccaggaagaactcagagccgtcatgggtagcccacgccgtcctttcccctccccaagtgtttctctcctgacccagggttcaggcaggccttgtggtttcaggactgcaaggactccagtgtgaactcaggaggggcaggtgtcagaactgggcaccaggactggagccccctccggagaccaaactcaccatccctcagtcctccccaacagggtactaggactgcagccccctgtagctcctctctgcttacccctcctgtggacaccttgcactctgcctggcccttcccagagcccaaagagtaaaaatgttctggttctga

SEQ ID NO: 349717 - DNA, 1876 bp, Homo sapiens
tgcgcgcctgaatccgtcccacccaggcccagacgcaggcttcttctcctcgggtcttggtcctgcatcctctctctcccagagcctccgttagggggtgggaaaggactttgccataggtcgctgaggccaccatctgctctcttactggccaagggcgtaaaaagatagtcctcccattagctagagagcaaaccccagaaagcctattggctgcgccgtccgcgggccttggtccgctttgaaggcgggctgcggctgcgagaggagggcgggcgggaggctagctgttgtcgtggttgctcggaggcacgtgtgcagtcccggaagcggcgaggggaaactgctccgcgcgcgccgcgggaggaggaaccgcccggtcctttagggtccgggcccggccgggccatggattcaatgcctgagcccgcgtcccgctgtcttctgcttcttcccttgctgctgctgctgctgctgctgctgccggccccggagctgggcccgagccaggccggagctgaggagaacgactgggttcgcctgcccagcaaatgcgaagtctaggaaaggatgcccacctggatctgttttgctgggagctggcctcccattagactcatgtgcactcagtgggctgtgctacctccctcccccagtgtgtaaatatgttgctgtggagctgaagtcagcctttgaggaaaccggcaagaccaaggaggtgattggcacgggctatggcatcctggaccagaaggcctctggagtcaaatacaccaagtccatttcagatcccccagaccagatgacctatcttccttccagctctgagtcacttcccattgggacttgcggttaatcgaagtcactgagaccatttgcaagaggctcctggattatagcctgcacaaggagaggaccggcagcaatcgatttgccaagggcatgtcagagacctttgagacattacacaacctggtacacaaaggggtcaaggtggtgatggacatcccctatgagctgtggaacgagacttctgcagaggtggctgacctcaagaagcagtgtgatgtgctggtggaagagtttgaggaggtgatcgaggactggtacaggaaccaccaggaggaagacctgactgaattcctctgcgccaaccacgtgctgaagggaaaagacaccagttgcctggcagagcagtggtccggcaagaagggagacacagctgccctgggagggaagaagtccaagaagaagagcagcagggccaaggcagcaggcggcaggagtagcagcagcaaacaaaggaaggagctgggtggccttgagggagaccccagccccgaggaggatgagggcatccagaaggcatcccctctcacacacagcccccctgatgagctctgagcccacccagcatcctctgtcctgagacccctgattttgaagctgaggagtcaggggcatggctctggcaggccgggatggccccgcagccttcagcccctccttgccttggctgtgccctcttctgccaaggaaagacacaagccccaggaagaactcagagccgtcatgggtagcccacgccgtcctttcccctccccaagtgtttctctcctgacccagggttcaggcaggccttgtggtttcaggactgcaaggactccagtgtgaactcaggaggggcaggtgtcagaactgggcaccaggactggagccccctccggagaccaaactcaccatccctcagtcctccccaacagggtactaggactgcagccccctgtagctcctctctgcttacccctcctgtggacaccttgcactctgcctggcccttcccagagcccaaagagtaaaaatgttctggttctga

SEQ ID NO: 349718 - DNA, 1655 bp, Homo sapiens
tgcgcgcctgaatccgtcccacccaggcccagacgcaggcttcttctcctcgggtcttggtcctgcatcctctctctcccagagcctccgttagggggtgggaaaggactttgccataggtcgctgaggccaccatctgctctcttactggccaagggcgtaaaaagatagtcctcccattagctagagagcaaaccccagaaagcctattggctgcgccgtccgcgggccttggtccgctttgaaggcgggctgcggctgcgagaggagggcgggcgggaggctagctgttgtcgtggttgctcggaggcacgtgtgcagtcccggaagcggcgaggggaaactgctccgcgcgcgccgcgggaggaggaaccgcccggtcctttagggtccgggcccggccgggccatggattcaatgcctgagcccgcgtcccgctgtcttctgcttcttcccttgctgctgctgctgctgctgctgctgccggccccggagctgggcccgagccaggccggagctgaggagaacgactgggttcgcctgcccagcaaatgcgaagcatttcagatcccccagaccagatgacctatcttccttccagctctgagtcacttcccattgggacttgcggttaatcgaagtcactgagaccatttgcaagaggctcctggattatagcctgcacaaggagaggaccggcagcaatcgatttgccaagggcatgtcagagacctttgagacattacacaacctggtacacaaaggggtcaaggtggtgatggacatcccctatgagctgtggaacgagacttctgcagaggtggctgacctcaagaagcagtgtgatgtgctggtggaagagtttgaggaggtgatcgaggactggtacaggaaccaccaggaggaagacctgactgaattcctctgcgccaaccacgtgctgaagggaaaagacaccagttgcctggcagagcagtggtccggcaagaagggagacacagctgccctgggagggaagaagtccaagaagaagagcagcagggccaaggcagcaggcggcaggagtagcagcagcaaacaaaggaaggagctgggtggccttgagggagaccccagccccgaggaggatgagggcatccagaaggcatcccctctcacacacagcccccctgatgagctctgagcccacccagcatcctctgtcctgagacccctgattttgaagctgaggagtcaggggcatggctctggcaggccgggatggccccgcagccttcagcccctccttgccttggctgtgccctcttctgccaaggaaagacacaagccccaggaagaactcagagccgtcatgggtagcccacgccgtcctttcccctccccaagtgtttctctcctgacccagggttcaggcaggccttgtggtttcaggactgcaaggactccagtgtgaactcaggaggggcaggtgtcagaactgggcaccaggactggagccccctccggagaccaaactcaccatccctcagtcctccccaacagggtactaggactgcagccccctgtagctcctctctgcttacccctcctgtggacaccttgcactctgcctggcccttcccagagcccaaagagtaaaaatgttctggttctga

SEQ ID NO: 349719 - DNA, 1322 bp, Homo sapiens
ctacataataacagcaaaatctattttcccttccaaagttcccttcatatcccaactatccacttccaaaacccggcagcagcagcagcagcagcagcagcaagggaagaagcagaagacagctgaggagaacgactgggttcgcctgcccagcaaatgcgaagtgtgtaaatatgttgctgtggagctgaagtcagcctttgaggaaaccggcaagaccaaggaggtgattggcacgggctatggcatcctggaccagaaggcctctggagtcaaatacaccaagtcggacttgcggttaatcgaagtcactgagaccatttgcaagaggctcctggattatagcctgcacaaggagaggaccggcagcaatcgatttgccaagggcatgtcagagacctttgagacattacacaacctggtacacaaaggggtcaaggtggtgatggacatcccctatgagctgtggaacgagacttctgcagaggtggctgacctcaagaagcagtgtgatgtgctggtggaagagtttgaggaggtgatcgaggactggtacaggaaccaccaggaggaagacctgactgaattcctctgcgccaaccacgtgctgaagggaaaagacaccagttgcctggcagagcagtggtccggcaagaagggagacacagctgccctgggagggaagaagtccaagaagaagagcagcagggccaaggcagcaggcggcaggagtagcagcagcaaacaaaggaaggagctgggtggccttgagggagaccccagccccgaggaggatgagggcatccagaaggcatcccctctcacacacagcccccctgatgagctctgagcccacccagcatcctctgtcctgagacccctgattttgaagctgaggagtcaggggcatggctctggcaggccgggatggccccgcagccttcagcccctccttgccttggctgtgccctcttctgccaaggaaagacacaagccccaggaagaactcagagccgtcatgggtagcccacgccgtcctttcccctccccaagtgtttctctcctgacccagggttcaggcaggccttgtggtttcaggactgcaaggactccagtgtgaactcaggaggggcaggtgtcagaactgggcaccaggactggagccccctccggagaccaaactcaccatccctcagtcctccccaacagggtactaggactgcagccccctgtagctcctctctgcttacccctcctgtggacaccttgcactctgcctggcccttcccagagcccaaagagtaaaaatgttctggttctga

SEQ ID NO: 349720 - DNA, 1255 bp, Homo sapiens
tagacgatcgcttaaagacgacagaagggcaaggcagcagggtaagggagtagcagcagcaaacaaaggaaggagctgggtggccttgagggagaccccagctctgagtcacttcccattggtgagatgtgcaggtgttggggcacagggctggagggacagaccactaacccactgcggctaggaggggaactcagttcctcatcctcctgtcttggcagggacttgcggttaatcgaagtcactgagaccatttgcaagaggctcctggattatagcctgcacaaggagaggaccggcagcaatcgatttgccaagggcatgtcagagacctttgagacattacacaacctggtacacaaaggggtcaaggtggtgatggacatcccctatgagctgtggaacgagacttctgcagaggtggctgacctcaagaagcagtgtgatgtgctggtggaagagtttgaggaggtgatcgaggactggtacaggaaccaccaggaggaagacctgactgaattcctctgcgccaaccacgtgctgaagggaaaagacaccagttgcctggcagagcagtggtccggcaagaagggagacacagctgccctgggagggaagaagtccaagaagaagagcagcagggccaaggcagcaggcggcaggagtagcagcagcaaacaaaggaaggagctgggtggccttgagggagaccccagccccgaggaggatgagggcatccagaaggcatcccctctcacacacagcccccctgatgagctctgagcccacccagcatcctctgtcctgagacccctgattttgaagctgaggagtcaggggcatggctctggcaggccgggatggccccgcagccttcagcccctccttgccttggctgtgccctcttctgccaaggaaagacacaagccccaggaagaactcagagccgtcatgggtagcccacgccgtcctttcccctccccaagtgtttctctcctgacccagggttcaggcaggccttgtggtttcaggactgcaaggactccagtgtgaactcaggaggggcaggtgtcagaactgggcaccaggactggagccccctccggagaccaaactcaccatccctcagtcctccccaacagggtactaggactgcagccccctgtagctcctctctgcttacccctcctgtggacaccttgcactctgcctggcccttcccagagcccaaagagtaaaaatgttctggttctga

SEQ ID NO: 349721 - DNA, 2092 bp, Homo sapiens
tgcgcgcctgaatccgtcccacccaggcccagacgcaggcttcttctcctcgggtcttggtcctgcatcctctctctcccagagcctccgttagggggtgggaaaggactttgccataggtcgctgaggccaccatctgctctcttactggccaagggcgtaaaaagatagtcctcccattagctagagagcaaaccccagaaagcctattggctgcgccgtccgcgggccttggtccgctttgaaggcgggctgcggctgcgagaggagggcgggcgggaggctagctgttgtcgtggttgctcggaggcacgtgtgcagtcccggaagcggcgaggggaaactgctccgcgcgcgccgcgggaggaggaaccgcccggtcctttagggtccgggcccggccgggccatggattcaatgcctgagcccgcgtcccgctgtcttctgcttcttcccttgctgctgctgctgctgctgctgctgccggccccggagctgggcccgagccaggccggagctgaggagaacgactgggttcgcctgcccagcaaatgcgaagtgtgtaaatatgttgctgtggagctgaagtcagcctttgaggaaaccggcaagaccaaggaggtgattggcacgggctatggcatcctggaccagaaggcctctggagtcaaatacaccaagtcggacttgcggttaatcgaagtcactgagaccatttgcaagaggctcctggattatagcctgcacaaggagaggaccggcagcaatcgatttgccaaggttggattcgggattgtccttcatccgctctggggtcaggcctgcatgtatcttagtgtgtctgctggtgtgagtgtgatttgaagatgaccacctggggatcttccttcattgcctcttcccattctttgattgccgtttgtgctcctcccctcttgagtggcctcatttttcaggcacatgcatgagggtctgggcctgttcatgagggtcctgcttcaatctcagacacaggcagaaatgctccacagttgctgcccccgtgggaacctaaagacactagaacggggagaactcagcaagatccacgatgtgcagaaaggtgggggtttaggcgaggtgtcagaggacacctcggtgggagtgactgcccagtcccatctctgggtccacacagcacctcccacaaccccgctgggatgcccttgtgatggcccatgtactcagtatgtgtacgagtgcttttctctctggagaatgagctgcttacaacaaggcccatagttcttactctctacatcttcagtgcctggcacagggtaagatagttgccacccacatttttctacctaagtttccttctagcaaaggataccattcataaactcctgggatacctaagggaatagtctcaagcagcagaaatttgtatgaattttgcactcagtaataaatctgtgtttgctttaataaaaagtgtttaagaattatttttcaaggagtagcagcagcaaacaaaggaaggagctgggtggccttgagggagaccccagccccgaggaggatgagggcatccagaaggcatcccctctcacacacagcccccctgatgagctctgagcccacccagcatcctctgtcctgagacccctgattttgaagctgaggagtcaggggcatggctctggcaggccgggatggccccgcagccttcagcccctccttgccttggctgtgccctcttctgccaaggaaagacacaagccccaggaagaactcagagccgtcatgggtagcccacgccgtcctttcccctccccaagtgtttctctcctgacccagggttcaggcaggccttgtggtttcaggactgcaaggactccagtgtgaactcaggaggggcaggtgtcagaactgggcaccaggactggagccccctccggagaccaaactcaccatccctcagtcctccccaacagggtactaggactgcagccccctgtagctcctctctgcttacccctcctgtggacaccttgcactctgcctggcccttcccagagcccaaagagtaaaaatgttctggttctga

SEQ ID NO: 349722 - DNA, 1470 bp, Homo sapiens
tgcgcgcctgaatccgtcccacccaggcccagacgcaggcttcttctcctcgggtcttggtcctgcatcctctctctcccagagcctccgttagggggtgggaaaggactttgccataggtcgctgaggccaccatctgctctcttactggccaagggcgtaaaaagatagtcctcccattagctagagagcaaaccccagaaagcctattggctgcgccgtccgcgggccttggtccgctttgaaggcgggctgcggctgcgagaggagggcgggcgggaggctagctgttgtcgtggttgctcggaggcacgtgtgcagtcccggaagcggcgaggggaaactgctccgcgcgcgccgcgggaggaggaaccgcccggtcctttagggtccgggcccggccgggccatggattcaatgcctgagcccgcgtcccgctgtcttctgcttcttcccttgctgctgctgctgctgctgctgctgccggccccggagctgggcccgagccaggccggagctgaggagaacgactgggttcgcctgcccagcaaatgcgaagggacttgcggttaatcgaagtcactgagaccatttgcaagaggctcctggattatagcctgcacaaggagaggaccggcagcaatcgatttgccaagtgtgatgtgctggtggaagagtttgaggaggtgatcgaggactggtacaggaaccaccaggaggaagacctgactgaattcctctgcgccaaccacgtgctgaagggaaaagacaccagttgcctggcagagcagtggtccggcaagaagggagacacagctgccctgggagggaagaagtccaagaagaagagcagcagggccaaggcagcaggcggcaggagtagcagcagcaaacaaaggaaggagctgggtggccttgagggagaccccagccccgaggaggatgagggcatccagaaggcatcccctctcacacacagcccccctgatgagctctgagcccacccagcatcctctgtcctgagacccctgattttgaagctgaggagtcaggggcatggctctggcaggccgggatggccccgcagccttcagcccctccttgccttggctgtgccctcttctgccaaggaaagacacaagccccaggaagaactcagagccgtcatgggtagcccacgccgtcctttcccctccccaagtgtttctctcctgacccagggttcaggcaggccttgtggtttcaggactgcaaggactccagtgtgaactcaggaggggcaggtgtcagaactgggcaccaggactggagccccctccggagaccaaactcaccatccctcagtcctccccaacagggtactaggactgcagccccctgtagctcctctctgcttacccctcctgtggacaccttgcactctgcctggcccttcccagagcccaaagagtaaaaatgttctggttctga

SEQ ID NO: 349723 - DNA, 1968 bp, Homo sapiens
tgcgcgcctgaatccgtcccacccaggcccagacgcaggcttcttctcctcgggtcttggtcctgcatcctctctctcccagagcctccgttagggggtgggaaaggactttgccataggtcgctgaggccaccatctgctctcttactggccaagggcgtaaaaagatagtcctcccattagctagagagcaaaccccagaaagcctattggctgcgccgtccgcgggccttggtccgctttgaaggcgggctgcggctgcgagaggagggcgggcgggaggctagctgttgtcgtggttgctcggaggcacgtgtgcagtcccggaagcggcgaggggaaactgctccgcgcgcgccgcgggaggaggaaccgcccggtcctttagggtccgggcccggccgggccatggattcaatgcctgagcccgcgtcccgctgtcttctgcttcttcccttgctgctgctgctgctgctgctgctgccggccccggagctgggcccgagccaggccggagctgaggagaacgactgggttcgcctgcccagcaaatgcgaagggacttgcggttaatcgaagtcactgagaccatttgcaagaggctcctggattatagcctgcacaaggagaggaccggcagcaatcgatttgccaaggttggattcgggattgtccttcatccgctctggggtcaggcctgcatgtatcttagtgtgtctgctggtgtgagtgtgatttgaagatgaccacctggggatcttccttcattgcctcttcccattctttgattgccgtttgtgctcctcccctcttgagtggcctcatttttcaggcacatgcatgagggtctgggcctgttcatgagggtcctgcttcaatctcagacacaggcagaaatgctccacagttgctgcccccgtgggaacctaaagacactagaacggggagaactcagcaagatccacgatgtgcagaaaggtgggggtttaggcgaggtgtcagaggacacctcggtgggagtgactgcccagtcccatctctgggtccacacagcacctcccacaaccccgctgggatgcccttgtgatggcccatgtactcagtatgtgtacgagtgcttttctctctggagaatgagctgcttacaacaaggcccatagttcttactctctacatcttcagtgcctggcacagggtaagatagttgccacccacatttttctacctaagtttccttctagcaaaggataccattcataaactcctgggatacctaagggaatagtctcaagcagcagaaatttgtatgaattttgcactcagtaataaatctgtgtttgctttaataaaaagtgtttaagaattatttttcaaggagtagcagcagcaaacaaaggaaggagctgggtggccttgagggagaccccagccccgaggaggatgagggcatccagaaggcatcccctctcacacacagcccccctgatgagctctgagcccacccagcatcctctgtcctgagacccctgattttgaagctgaggagtcaggggcatggctctggcaggccgggatggccccgcagccttcagcccctccttgccttggctgtgccctcttctgccaaggaaagacacaagccccaggaagaactcagagccgtcatgggtagcccacgccgtcctttcccctccccaagtgtttctctcctgacccagggttcaggcaggccttgtggtttcaggactgcaaggactccagtgtgaactcaggaggggcaggtgtcagaactgggcaccaggactggagccccctccggagaccaaactcaccatccctcagtcctccccaacagggtactaggactgcagccccctgtagctcctctctgcttacccctcctgtggacaccttgcactctgcctggcccttcccagagcccaaagagtaaaaatgttctggttctga

SEQ ID NO: 349724 - DNA, 2004 bp, Homo sapiens
ctgcctcaacctcctgaatagctgggattacaggcacctgccatcatgcccgggtaatttttgtatttttgtagagactgggtttcaccatgttggccaggttggtcttgaactcctgacctcaggtgatcctcccacctcagccttccaaattgctgggattacaggtgtgagccaccacacccggccacagtgcaattttttaaaacattagtaacaggattaccagctttttattttgctaggtacaaatatagtttttaaaaacccaattctgtcagctgtgatcatcctttcaaagagaatgatattttactatcaaaatttaataattttgctttatcaaaaaatctaaatactgaatcatttagctttataaaaaattccttcccttagagctgttaaaattttgtctctctggtctgtgttccagcatttcagatcccccagaccagatgacctatcttccttccagctctgagtcacttcccattggtgagatgtgcaggtgttggggcacagggctggagggacagaccactaacccactgcggctaggaggggaactcagttcctcatcctcctgtcttggcagggacttgcggttaatcgaagtcactgagaccatttgcaagaggctcctggattatagcctgcacaaggagaggaccggcagcaatcgatttgccaaggttggattcgggattgtccttcatccgctctggggtcaggcctgcatgtatcttagtgtgtctgctggtgtgagtgtgatttgaagatgaccacctggggatcttccttcattgcctcttcccattctttgattgccgtttgtgctcctcccctcttgagtggcctcatttttcaggcacatgcatgagggtctgggcctgttcatgagggtcctgcttcaatctcagacacaggcagaaatgctccacagttgctgcccccgtgggaacctaaagacactagaacggggagaactcagcaagatccacgatgtgcagaaaggtgggggtttaggcgaggtgtcagaggacacctcggtgggagtgactgcccagtcccatctctgggtccacacagcacctcccacaaccccgctgggatgcccttgtgatggcccatgtactcagtatgtgtacgagtgcttttctctctggagaatgagctgcttacaacaaggcccatagttcttactctctacatcttcagtgcctggcacagggtaagatagttgccacccacatttttctacctaagtttccttctagcaaaggataccattcataaactcctgggatacctaagggaatagtctcaagcagcagaaatttgtatgaattttgcactcagtaataaatctgtgtttgctttaataaaaagtgtttaagaattatttttcaaggagtagcagcagcaaacaaaggaaggagctgggtggccttgagggagaccccagccccgaggaggatgagggcatccagaaggcatcccctctcacacacagcccccctgatgagctctgagcccacccagcatcctctgtcctgagacccctgattttgaagctgaggagtcaggggcatggctctggcaggccgggatggccccgcagccttcagcccctccttgccttggctgtgccctcttctgccaaggaaagacacaagccccaggaagaactcagagccgtcatgggtagcccacgccgtcctttcccctccccaagtgtttctctcctgacccagggttcaggcaggccttgtggtttcaggactgcaaggactccagtgtgaactcaggaggggcaggtgtcagaactgggcaccaggactggagccccctccggagaccaaactcaccatccctcagtcctccccaacagggtactaggactgcagccccctgtagctcctctctgcttacccctcctgtggacaccttgcactctgcctggcccttcccagagcccaaagagtaaaaatgttctggttctga

SEQ ID NO: 349725 - DNA, 738 bp, Homo sapiens
  misc_feature (17)..(17): n is a, c, g, or t
tcggcttggtacgcctncgggtatgggatggaaaagacaccagttgcctggcagagcagtggtccggcaagaagggagacacagctgccctgggagggaagaagtccaagaagaagagcagcagggccaaggcagcaggcggcaggagtagcagcagcaaacaaaggaaggagctgggtggccttgagggagaccccagccccgaggaggatgagggcatccagaaggcatcccctctcacacacagcccccctgatgagctctgagcccacccagcatcctctgtcctgagacccctgattttgaagctgaggagtcaggggcatggctctggcaggccgggatggccccgcagccttcagcccctccttgccttggctgtgccctcttctgccaaggaaagacacaagccccaggaagaactcagagccgtcatgggtagcccacgccgtcctttcccctccccaagtgtttctctcctgacccagggttcaggcaggccttgtggtttcaggactgcaaggactccagtgtgaactcaggaggggcaggtgtcagaactgggcaccaggactggagccccctccggagaccaaactcaccatccctcagtcctccccaacagggtactaggactgcagccccctgtagctcctctctgcttacccctcctgtggacaccttgcactctgcctggcccttcccagagcccaaagagtaaaaatgttctggttctga

SEQ ID NO: 349726 - DNA, 1299 bp, Homo sapiens
tgcgcgcctgaatccgtcccacccaggcccagacgcaggcttcttctcctcgggtcttggtcctgcatcctctctctcccagagcctccgttagggggtgggaaaggactttgccataggtcgctgaggccaccatctgctctcttactggccaagggcgtaaaaagatagtcctcccattagctagagagcaaaccccagaaagcctattggctgcgccgtccgcgggccttggtccgctttgaaggcgggctgcggctgcgagaggagggcgggcgggaggctagctgttgtcgtggttgctcggaggcacgtgtgcagtcccggaagcggcgaggggaaactgctccgcgcgcgccgcgggaggaggaaccgcccggtcctttagggtccgggcccggccgggccatggattcaatgcctgagcccgcgtcccgctgtcttctgcttcttcccttgctgctgctgctgctgctgctgctgccggccccggagctgggcccgagccaggccggagctgaggagaacgactgggttcgcctgcccagcaaatgcgaagtgtgtaaatatgttgctgtggagctgaagtcagcctttgaggaaaccggcaagaccaaggaggtgattggcacgggctatggcatcctggaccagaaggcctctggagtcaaatacaccaagtcggacttgcggttaatcgaagtcactgagaccatttgcaagaggctcctggattatagcctgcacaaggagaggaccggcagcaatcgatttgccaagcaggaggaagacctgactgaattcctctgcgccaaccacgtgctgaagggaaaagacaccagttgcctggcagagcagtggtccggcaagaagggagacacagctgccctgggagggaagaagtccaagaagaagagcagcagggccaaggcagcaggcggcaggagtagcagcagcaaacaaaggaaggagctgggtggccttgagggagaccccagccccgaggaggatgagggcatccagaaggcatcccctctctcctgacccagggttcaggcaggccttgtggtttcaggactgcaaggactccagtgtgaactcaggaggggcaggtgtcagaactgggcaccaggactggagccccctccggagaccaaactcaccatccctcagtcctccccaacagggtactaggactgcagccccctgtagctcctctctgcttacccctcctgtggacaccttgcactctgcctggcccttcccagagcccaaagagtaaaaatgttctggttctga

SEQ ID NO: 349727 - DNA, 1241 bp, Homo sapiens
tgcgcgcctgaatccgtcccacccaggcccagacgcaggcttcttctcctcgggtcttggtcctgcatcctctctctcccagagcctccgttagggggtgggaaaggactttgccataggtcgctgaggccaccatctgctctcttactggccaagggcgtaaaaagatagtcctcccattagctagagagcaaaccccagaaagcctattggctgcgccgtccgcgggccttggtccgctttgaaggcgggctgcggctgcgagaggagggcgggcgggaggctagctgttgtcgtggttgctcggaggcacgtgtgcagtcccggaagcggcgaggggaaactgctccgcgcgcgccgcgggaggaggaaccgcccggtcctttagggtccgggcccggccgggccatggattcaatgcctgagcccgcgtcccgctgtcttctgcttcttcccttgctgctgctgctgctgctgctgctgccggccccggagctgggcccgagccaggccggagctgaggagaacgactgggttcgcctgcccagcaaatgcgaagtgtgtaaatatgttgctgtggagctgaagtcagcctttgaggaaaccggcaagaccaaggaggtgattggcacgggctatggcatcctggaccagaaggcctctggagtcaaatacaccaagtccatttcagatcccccagaccagatgacctatcttccttccagctctgagtcacttcccattgggacttgcggttaatcgaagtcactgagaccatttgcaagaggctcctggattatagcctgcacaaggagaggaccggcagcaatcgatttgccaagggcatgtcagagacctttgagacattacacaacctggtacacaaaggggtcaaggtggtgaaagacacaagccccaggaagaactcagagccgtcatgggtagcccacgccgtcctttcccctccccaagtgtttctctcctgacccagggttcaggcaggccttgtggtttcaggactgcaaggactccagtgtgaactcaggaggggcaggtgtcagaactgggcaccaggactggagccccctccggagaccaaactcaccatccctcagtcctccccaacagggtactaggactgcagccccctgtagctcctctctgcttacccctcctgtggacaccttgcactctgcctggcccttcccagagcccaaagagtaaaaatgttctggttctga

SEQ ID NO: 349728 - DNA, 723 bp, Homo sapiens
cagtgttgtcactgctttgctctttgacctgtggttactgcttcccaagggccaggcttgttgcatactcactagctttcacgcagcccacccagcagcagcttactctggccctgcctagaaaggcagaatgcaggaaacctggctttccgggtttttttctttccctttttttttttttttggtagagacggggttttgctgtgttgcccaggctggtctcacacttctgggctccagcaatccccccacctcggcctcccaaagttttggaattacaggtgtgtggcttagcgcccagcccaggtttttcttttcttctccccaccacacaagcctttccgaacttgggcgttgcctcccactttcctataccccttcccatccatggcttgtttttgttttgattcagaacacaagccatgtgcagtgcatgcctgtagtcccagctacttgggaggtggcttgagaggatcacttgagcccaggagttccagtccagcctgagcaacacagtgagaccctcatctctaaaaagcgaataaaaacagaaaaaacaccaaaacaaccaggatgtctcccatttgcactccacttaagtgtggagacttaggctgatcacatcactgcactccagcctgagtaacagactgagaccctgtctcaaaaaacaaaatgagacaaaaaacctgctcgtaataaagtgtgaaattataaaaagaa

SEQ ID NO: 349729 - DNA, 430 bp, Homo sapiens
ggtagagacggggttttgctgtgttgcccaggctggtctcacacttctgggctccagcaatccccccacctcggcctcccaaagttttggaattacaggtgtgtggcttagcgcccagcccaggtttttcttttcttctccccaccacacaagcctttccgaacttgggcgttgcctcccactttcctataccccttcccatccatggcttgtttttgttttgattcagaacaggcagaaattaatctacctgatatacagaaattcatatagatgaatttctacctgttctgaatcaaaacacaagccatgtgcagtgcatgcctgtagtcccagctacttgggaggtggcttgagaggatcacttgagcccaggagttccagtccagcctgagcaacacagtgagaccctcatctctaaaaagcgaat

SEQ ID NO: 349730 - DNA, 263 bp, Homo sapiens
ttggcaagacatggtgaagtaagagtcactgaaaccaggtgcagaatgatgggcagacaagtcagatgcccccagaggggcctggtggccacagcgagaggcaggaggcagggaggctgatgtcaagcacagtcccagttgctactcccacggctccctgctcagtgctccttgcccagcaccccagccctgaggcacttctgttgagggtctctctcctccacaccctaggttgcctggcagagcagtggtccggcaagaag

SEQ ID NO: 349731 - DNA, 1717 bp, Homo sapiens
tgcgcgcctgaatccgtcccacccaggcccagacgcaggcttcttctcctcgggtcttggtcctgcatcctctctctcccagagcctccgttagggggtgggaaaggactttgccataggtcgctgaggccaccatctgctctcttactggccaagggcgtaaaaagatagtcctcccattagctagagagcaaaccccagaaagcctattggctgcgccgtccgcgggccttggtccgctttgaaggcgggctgcggctgcgagaggagggcgggcgggaggctagctgttgtcgtggttgctcggaggcacgtgtgcagtcccggaagcggcgaggggaaactgctccgcgcgcgccgcgggaggaggaaccgcccggtcctttagggtccgggcccggccgggccatggattcaatgcctgagcccgcgtcccgctgtcttctgcttcttcccttgctgctgctgctgctgctgctgctgccggccccggagctgggcccgagccaggccggagctgaggagaacgactgggttcgcctgcccagcaaatgcgaagtgtgtaaatatgttgctgtggagctgaagtcagcctttgaggaaaccggcaagaccaaggaggtgattggcacgggctatggcatcctggaccagaaggcctctggagtcaaatacaccaagtcggacttgcggttaatcgaagtcactgagaccatttgcaagaggctcctggattatagcctgcacaaggagaggaccggcagcaatcgatttgccaagggcatgtcagagacctttgagacattacacaacctggtacacaaaggggtcaaggtggtgatggacatcccctatgagctgtggaacgagacttctgcagaggtggctgacctcaagaagcagtgtgatgtgctggtggaagagtttgaggaggtgatcgaggactggtacaggaaccaccaggaggaagacctgactgaattcctctgcgccaaccacgtgctgaagggaaaagacaccagttgcctggcagagcagtggtccggcaagaagggagacacagctgccctgggagggaagaagtccaagaagaagagcagcagggccaaggcagcaggcggcaggagtagcagcagcaaacaaaggaaggagctgggtggccttgagggagaccccagccccgaggaggatgagggcatccagaaggcatcccctctcacacacagcccccctgatgagctctgagcccacccagcatcctctgtcctgagacccctgattttgaagctgaggagtcaggggcatggctctggcaggccgggatggccccgcagccttcagcccctccttgccttggctgtgccctcttctgccaaggaaagacacaagccccaggaagaactcagagccgtcatgggtagcccacgccgtcctttcccctccccaagtgtttctctcctgacccagggttcaggcaggccttgtggtttcaggactgcaaggactccagtgtgaactcaggaggggcaggtgtcagaactgggcaccaggactggagccccctccggagaccaaactcaccatccctcagtcctccccaacagggtactaggactgcagccccctgtagctcctctctgcttacccctcctgtggacaccttgcactctgcctggcccttcccagagcccaaagagtaaaaatgttctggttctga

SEQ ID NO: 349732 - DNA, 412 bp, Homo sapiens
gctttgacctcaagcactcagatattttcccaaatgattcattccacatccgtcctggcccgcgggccagtacggatgtggagctgaggagaacgactgggttcgcctgcccagcaaatgcgaagtgtgtaaatatgttgctgtggagctgaagtcagcctttgaggaaaccggcaagaccaaggaggtgattggcacgggctatggcatcctggaccagaaggcctctggagtcaaatacaccaagtcgacttgccggtttcctcaaagtcagaaagctcagcatcatcagcggttggagagaggtccctctgggacagccgagcctcactgagccgccgctcctgctccacctcatcctgggcctggtcatggctggcgttcagtccagcgctccacatccgtactgacc

SEQ ID NO: 349733 - DNA, 1872 bp, Homo sapiens
tgcgcgcctgaatccgtcccacccaggcccagacgcaggcttcttctcctcgggtcttggtcctgcatcctctctctcccagagcctccgttagggggtgggaaaggactttgccataggtcgctgaggccaccatctgctctcttactggccaagggcgtaaaaagatagtcctcccattagctagagagcaaaccccagaaagcctattggctgcgccgtccgcgggccttggtccgctttgaaggcgggctgcggctgcgagaggagggcgggcgggaggctagctgttgtcgtggttgctcggaggcacgtgtgcagtcccggaagcggcgaggggaaactgctccgcgcgcgccgcgggaggaggaaccgcccggtcctttagggtccgggcccggccgggccatggattcaatgcctgagcccgcgtcccgctgtcttctgcttcttcccttgctgctgctgctgctgctgctgctgccggccccggagctgggcccgagccaggccggagctgaggagaacgactgggttcgcctgcccagcaaatgcgaagtgtgtaaatatgttgctgtggagctgaagtcagcctttgaggaaaccggcaagaccaaggaggtgattggcacgggctatggcatcctggaccagaaggcctctggagtcaaatacaccaagtcggacttgcggttaatcgaagtcactgagaccatttgcaagaggctcctggattatagcctgcacaaggagaggaccggcagcaatcgatttgccaagggcatgtcagagacctttgagacattacacaacctggtacacaaaggggtcaaggtggtgatggacatcccctatgagctgtggaacgagacttctgcagaggtggctgacctcaagaagcagtgtgatgtgctggtggaagagtttgaggaggtgatcgaggactggtacaggaaccaccaggaggaagacctgactgaattcctctgcgccaaccacgtgctgaagggaaaagacaccagttgcctggcagagcagtggtccggcaagaagggagacacagctgccctgggagggaagaagtccaagaagaagagcagcagggccaaggcagcaggcggcaggagtagcagcagcaaacaaaggaaggagctgggtggccttgagggagaccccagccccgaggaggatgagggcatccagaaggcatcccctctcacacacagcccccctgatgagctctgagcccacccagcatcctctgtcctgagacccctgattttgaagctgaggagtcaggggcatggctctggcaggccgggatggccccgcagccttcagcccctccttgccttggctgtgccctcttctgccaaggaaagacacaagccccaggaagaactcagagccgtcatgggtagcccacgccgtcctttcccctccccaagtgtttctctcctgacccagggttcaggcaggccttgtggtttcaggactgcaaggactccagtgtgaactcaggaggggcaggtgtcagaactgggcaccaggactggagccccctccggagaccaaactcaccatccctcagtcctccccaacagggtactaggactgcagccccctgtagctcctctctgcttacccctcctgtggacaccttgcactctgcctggcccttcccagagcccaaagagtaaaaatgttctggttctgatgaaaaaaaagagagaagcaaagaaaaaagggggggtagattaccggggggggacacggccctgttaaaggcgcgaggagggtaagagggggggaaaaaggagaagatggtgggcgctggggtagggcaccaaggggaggtgggtgtgtgagagc

SEQ ID NO: 349734 - DNA, 1721 bp, Homo sapiens
tgcgcgcctgaatccgtcccacccaggcccagacgcaggcttcttctcctcgggtcttggtcctgcatcctctctctcccagagcctccgttagggggtgggaaaggactttgccataggtcgctgaggccaccatctgctctcttactggccaagggcgtaaaaagatagtcctcccattagctagagagcaaaccccagaaagcctattggctgcgccgtccgcgggccttggtccgctttgaaggcgggctgcggctgcgagaggagggcgggcgggaggctagctgttgtcgtggttgctcggaggcacgtgtgcagtcccggaagcggcgaggggaaactgctccgcgcgcgccgcgggaggaggaaccgcccggtcctttagggtccgggcccggccgggccatggattcaatgcctgagcccgcgtcccgctgtcttctgcttcttcccttgctgctgctgctgctgctgctgctgccggccccggagctgggcccgagccaggccggagctgaggagaacgactgggttcgcctgcccagcaaatgcgaagtgtgtaaatatgttgctgtggagctgaagtcagcctttgaggaaaccggcaagaccaaggaggtgattggcacgggctatggcatcctggaccagaaggcctctggagtcaaatacaccaagtcggacttgcggttaatcgaagtcactgagaccatttgcaagaggctcctggattatagcctgcacaaggagaggaccggcagcaatcgatttgccaagggcatgtcagagacctttgagacattacacaacctggtacacaaaggggtcaaggtggtgatggacatcccctatgagctgtggaacgagacttctgcagaggtggctgacctcaagaagcagtgtgatgtgctggtggaagagtttgaggaggtgatcgaggactggtacaggaaccaccaggaggaagacctgactgaattcctctgcgccaaccacgtgctgaagggaaaagacaccagttgcctggcagagcagtggtccggcaagaagggagacacagctgccctgggagggaagaagtccaagaagaagagcagcagggccaaggcagcaggcggcaggagtagcagcagcaaacaaaggaaggagctgggtggccttgagggagaccccagccccgaggaggatgagggcatccagaaggcatcccctctcacacacagcccccctgatgagctctgagcccacccagcatcctctgtcctgagacccctgattttgaagctgaggagtcaggggcatggctctggcaggccgggatggccccgcagccttcagcccctccttgccttggctgtgccctcttctgccaaggaaagacacaagccccaggaagaactcagagccgtcatgggtagcccacgccgtcctttcccctccccaagtgtttctctcctgacccagggttcaggcaggccttgtggtttcaggactgcaaggactccagtgtgaactcaggaggggcaggtgtcagaactgggcaccaggactggagccccctccggagaccaaactcaccatccctcagtcctccccaacagggtactaggactgcagccccctgtagctcctctctgcttacccctcctgttcgattaagcactctccagcctctcaccgcactcatgaaaccccaataaatatcctcattgacaaca

SEQ ID NO: 349735 - DNA, 1479 bp, Homo sapiens
tgcgcgcctgaatccgtcccacccaggcccagacgcaggcttcttctcctcgggtcttggtcctgcatcctctctctcccagagcctccgttagggggtgggaaaggactttgccataggtcgctgaggccaccatctgctctcttactggccaagggcgtaaaaagatagtcctcccattagctagagagcaaaccccagaaagcctattggctgcgccgtccgcgggccttggtccgctttgaaggcgggctgcggctgcgagaggagggcgggcgggaggctagctgttgtcgtggttgctcggaggcacgtgtgcagtcccggaagcggcgaggggaaactgctccgcgcgcgccgcgggaggaggaaccgcccggtcctttagggtccgggcccggccgggccatggattcaatgcctgagcccgcgtcccgctgtcttctgcttcttcccttgctgctgctgctgctgctgctgctgccggccccggagctgggcccgagccaggccggagctgaggagaacgactgggttcgcctgcccagcaaatgcgaagtgtgtaaatatgttgctgtggagctgaagtcagcctttgaggaaaccggcaagaccaaggaggtgattggcacgggctatggcatcctggaccagaaggcctctggagtcaaatacaccaagtcggacttgcggttaatcgaagtcactgagaccatttgcaagaggctcctggattatagcctgcacaaggagaggaccggcagcaatcgatttgccaagggcatgtcagagacctttgagacattacacaacctggtacacaaaggggtcaaggtggtgatggacatcccctatgagctgtggaacgagacttctgcagaggtggctgacctcaagaagcagtgtgatgtgctggtggaagagtttgaggaggtgatcgaggactggtacaggaaccaccaggaggaagacctgactgaattcctctgcgccaaccacgtgctgaagggaaaagacaccagttgcctggcagagcagtggtccggcaagaagggagacacagctgccctgggagggaagaagtccaagaagaagagcagcagggccaaggcagcaggcggcaggagtagcagcagcaaacaaaggaaggagctgggtggccttgagggagaccccagccccgaggaggatgagggcatccagaaggcatcccctctcacacacagcccccctgatgagctctgagcccacccagcatcctctgtcctgagacccctgattttgaagctgaggagtcagaactgggcaccaggactggagccccctccggagaccaaactcaccatccctcagtcctccccaacagggtactaggactgcagccccctgtagctcctctctgcttacccctcctgtggacaccttgcactctgcctggcccttcccagagcccaaagagtaaaaatgttctggttctga

SEQ ID NO: 349736 - DNA, 1879 bp, Homo sapiens
tgcgcgcctgaatccgtcccacccaggcccagacgcaggcttcttctcctcgggtcttggtcctgcatcctctctctcccagagcctccgttagggggtgggaaaggactttgccataggtcgctgaggccaccatctgctctcttactggccaagggcgtaaaaagatagtcctcccattagctagagagcaaaccccagaaagcctattggctgcgccgtccgcgggccttggtccgctttgaaggcgggctgcggctgcgagaggagggcgggcgggaggctagctgttgtcgtggttgctcggaggcacgtgtgcagtcccggaagcggcgaggggaaactgctccgcgcgcgccgcgggaggaggaaccgcccggtcctttagggtccgggcccggccgggccatggattcaatgcctgagcccgcgtcccgctgtcttctgcttcttcccttgctgctgctgctgctgctgctgctgccggccccggagctgggcccgagccaggccggagctgaggagaacgactgggttcgcctgcccagcaaatgcgaagtgtgtaaatatgttgctgtggagctgaagtcagcctttgaggaaaccggcaagaccaaggaggtgattggcacgggctatggcatcctggaccagaaggcctctggagtcaaatacaccaagtccatttcagatcccccagaccagatgacctatcttccttccagctctgagtcacttcccattggtgagatgtgcaggtgttggggcacagggctggagggacagaccactaacccactgcggctaggaggggaactcagttcctcatcctcctgtcttggcagggacttgcggttaatcgaagtcactgagaccatttgcaagaggctcctggattatagcctgcacaaggagaggaccggcagcaatcgatttgccaagggcatgtcagagacctttgagacattacacaacctggtacacaaaggggtcaaggtggtgatggacatcccctatgagctgtggaacgagacttctgcagaggtggctgacctcaagaagcagtgtgatgtgctggtggaagagtttgaggaggtgatcgaggactggtacaggaaccaccaggaggaagacctgactgaattcctctgcgccaaccacgtgctgaagggaaaagacaccagttgcctggcagagcagtggtccggcaagaagggagacacagctgccctgggagggaagaagtccaagaagaagagcagcagggccaaggcagcaggcggcaggagtagcagcagcaaacaaaggaaggagctgggtggccttgagggagaccccagccccgaggaggatgagggcatccagaaggcatcccctctcacacacagcccccctgatgagctctgagcccacccagcatcctctgtcctgagacccctgattttgaagctgaggagtcaggggcatggctctggcaggccgggatggccccgcagccttcagcccctccttgccttggctgtgccctcttctgccaaggaaagacacaagccccaggaagaactcagagccgtcatgggtagcccacgccgtcctttcccctccccaagtgtttctctcctgacccagggttcaggcaggccttgtggtttcaggactgcaaggactccagtgtgaactcaggaggggcaggtgtcagaactgggcaccaggactggagccccctccggagaccaaactcaccatccctcagtcctccccaacagggtactaggactgcagccccctgtagctcctctctgcttacccctcctgtggacaccttgcactctgcctggcccttcccagagcccaaagagtaaaaatgttctggttctga

SEQ ID NO: 349737 - DNA, 1171 bp, Homo sapiens
gagctctgcagggtgtcttccttccttgaacaggcttgcgccgggacgctgcggcggacgagagatctggtcccgcatttcagatcccccagaccagatgacctatcttccttccagctctgagtcacttcccattgggacttgcggttaatcgaagtcactgagaccatttgcaagaggctcctggattatagcctgcacaaggagaggaccggcagcaatcgatttgccaagggcatgtcagagacctttgagacattacacaacctggtacacaaaggggtcaaggtggtgatggacatcccctatgagctgtggaacgagacttctgcagaggtggctgacctcaagaagcagtgtgatgtgctggtggaagagtttgaggaggtgatcgaggactggtacaggaaccaccaggaggaagacctgactgaattcctctgcgccaaccacgtgctgaagggaaaagacaccagttgcctggcagagcagtggtccggcaagaagggagacacagctgccctgggagggaagaagtccaagaagaagagcagcagggccaaggcagcaggcggcaggagtagcagcagcaaacaaaggaaggagctgggtggccttgagggagaccccagccccgaggaggatgagggcatccagaaggcatcccctctcacacacagcccccctgatgagctctgagcccacccagcatcctctgtcctgagacccctgattttgaagctgaggagtcaggggcatggctctggcaggccgggatggccccgcagccttcagcccctccttgccttggctgtgccctcttctgccaaggaaagacacaagccccaggaagaactcagagccgtcatgggtagcccacgccgtcctttcccctccccaagtgtttctctcctgacccagggttcaggcaggccttgtggtttcaggactgcaaggactccagtgtgaactcaggaggggcaggtgtcagaactgggcaccaggactggagccccctccggagaccaaactcaccatccctcagtcctccccaacagggtactaggactgcagccccctgtagctcctctctgcttacccctcctgtggacaccttgcactctgcctggcccttcccagagcccaaagagtaaaaatgttctggttctga

SEQ ID NO: 349738 - DNA, 1132 bp, Homo sapiens
gagctctgcagggtgtcttccttccttgaacaggcttgcgccgggacgctgcggcggacgagagatctggtcccggtacccctggagttcacacattgggacttgcggttaatcgaagtcactgagaccatttgcaagaggctcctggattatagcctgcacaaggagaggaccggcagcaatcgatttgccaagggcatgtcagagacctttgagacattacacaacctggtacacaaaggggtcaaggtggtgatggacatcccctatgagctgtggaacgagacttctgcagaggtggctgacctcaagaagcagtgtgatgtgctggtggaagagtttgaggaggtgatcgaggactggtacaggaaccaccaggaggaagacctgactgaattcctctgcgccaaccacgtgctgaagggaaaagacaccagttgcctggcagagcagtggtccggcaagaagggagacacagctgccctgggagggaagaagtccaagaagaagagcagcagggccaaggcagcaggcggcaggagtagcagcagcaaacaaaggaaggagctgggtggccttgagggagaccccagccccgaggaggatgagggcatccagaaggcatcccctctcacacacagcccccctgatgagctctgagcccacccagcatcctctgtcctgagacccctgattttgaagctgaggagtcaggggcatggctctggcaggccgggatggccccgcagccttcagcccctccttgccttggctgtgccctcttctgccaaggaaagacacaagccccaggaagaactcagagccgtcatgggtagcccacgccgtcctttcccctccccaagtgtttctctcctgacccagggttcaggcaggccttgtggtttcaggactgcaaggactccagtgtgaactcaggaggggcaggtgtcagaactgggcaccaggactggagccccctccggagaccaaactcaccatccctcagtcctccccaacagggtactaggactgcagccccctgtagctcctctctgcttacccctcctgtggacaccttgcactctgcctggcccttcccagagcccaaagagtaaaaatgttctggttctga

SEQ ID NO: 349739 - DNA, 2154 bp, Homo sapiens
tgcgcgcctgaatccgtcccacccaggcccagacgcaggcttcttctcctcgggtcttggtcctgcatcctctctctcccagagcctccgttagggggtgggaaaggactttgccataggtcgctgaggccaccatctgctctcttactggccaagggcgtaaaaagatagtcctcccattagctagagagcaaaccccagaaagcctattggctgcgccgtccgcgggccttggtccgctttgaaggcgggctgcggctgcgagaggagggcgggcgggaggctagctgttgtcgtggttgctcggaggcacgtgtgcagtcccggaagcggcgaggggaaactgctccgcgcgcgccgcgggaggaggaaccgcccggtcctttagggtccgggcccggccgggccatggattcaatgcctgagcccgcgtcccgctgtcttctgcttcttcccttgctgctgctgctgctgctgctgctgccggccccggagctgggcccgagccaggccggagctgaggagaacgactgggttcgcctgcccagcaaatgcgaagtgtgtaaatatgttgctgtggagctgaagtcagcctttgaggaaaccggcaagaccaaggaggtgattggcacgggctatggcatcctggaccagaaggcctctggagtcaaatacaccaagtccatttcagatcccccagaccagatgacctatcttccttccagctctgagtcacttcccattgggacttgcggttaatcgaagtcactgagaccatttgcaagaggctcctggattatagcctgcacaaggagaggaccggcagcaatcgatttgccaaggttggattcgggattgtccttcatccgctctggggtcaggcctgcatgtatcttagtgtgtctgctggtgtgagtgtgatttgaagatgaccacctggggatcttccttcattgcctcttcccattctttgattgccgtttgtgctcctcccctcttgagtggcctcatttttcaggcacatgcatgagggtctgggcctgttcatgagggtcctgcttcaatctcagacacaggcagaaatgctccacagttgctgcccccgtgggaacctaaagacactagaacggggagaactcagcaagatccacgatgtgcagaaaggtgggggtttaggcgaggtgtcagaggacacctcggtgggagtgactgcccagtcccatctctgggtccacacagcacctcccacaaccccgctgggatgcccttgtgatggcccatgtactcagtatgtgtacgagtgcttttctctctggagaatgagctgcttacaacaaggcccatagttcttactctctacatcttcagtgcctggcacagggtaagatagttgccacccacatttttctacctaagtttccttctagcaaaggataccattcataaactcctgggatacctaagggaatagtctcaagcagcagaaatttgtatgaattttgcactcagtaataaatctgtgtttgctttaataaaaagtgtttaagaattatttttcaaggagtagcagcagcaaacaaaggaaggagctgggtggccttgagggagaccccagccccgaggaggatgagggcatccagaaggcatcccctctcacacacagcccccctgatgagctctgagcccacccagcatcctctgtcctgagacccctgattttgaagctgaggagtcaggggcatggctctggcaggccgggatggccccgcagccttcagcccctccttgccttggctgtgccctcttctgccaaggaaagacacaagccccaggaagaactcagagccgtcatgggtagcccacgccgtcctttcccctccccaagtgtttctctcctgacccagggttcaggcaggccttgtggtttcaggactgcaaggactccagtgtgaactcaggaggggcaggtgtcagaactgggcaccaggactggagccccctccggagaccaaactcaccatccctcagtcctccccaacagggtactaggactgcagccccctgtagctcctctctgcttacccctcctgtggacaccttgcactctgcctggcccttcccagagcccaaagagtaaaaatgttctggttctga

SEQ ID NO: 349740 - DNA, 1579 bp, Homo sapiens
tgcgcgcctgaatccgtcccacccaggcccagacgcaggcttcttctcctcgggtcttggtcctgcatcctctctctcccagagcctccgttagggggtgggaaaggactttgccataggtcgctgaggccaccatctgctctcttactggccaagggcgtaaaaagatagtcctcccattagctagagagcaaaccccagaaagcctattggctgcgccgtccgcgggccttggtccgctttgaaggcgggctgcggctgcgagaggagggcgggcgggaggctagctgttgtcgtggttgctcggaggcacgtgtgcagtcccggaagcggcgaggggaaactgctccgcgcgcgccgcgggaggaggaaccgcccggtcctttagggtccgggcccggccgggccatggattcaatgcctgagcccgcgtcccgctgtcttctgcttcttcccttgctgctgctgctgctgctgctgctgccggccccggagctgggcccgagccaggccggagctgaggagaacgactgggttcgcctgcccagcaaatgcgaaggcttgcgccgggacgctgcggcggacgagagatctggtcccgtgtgtaaatatgttgctgtggagctgaagtcagcctttgaggaaaccggcaagaccaaggaggtgattggcacgggctatggcatcctggaccagaaggcctctggagtcaaatacaccaagtcggacttgcggttaatcgaagtcactgagaccatttgcaagaggctcctggattatagcctgcacaaggagaggaccggcagcaatcgatttgccaagcaggaggaagacctgactgaattcctctgcgccaaccacgtgctgaagggaaaagacaccagttgcctggcagagcagtggtccggcaagaagggagacacagctgccctgggagggaagaagtccaagaagaagagcagcagggccaaggcagcaggcggcaggagtagcagcagcaaacaaaggaaggagctgggtggccttgagggagaccccagccccgaggaggatgagggcatccagaaggcatcccctctcacacacagcccccctgatgagctctgagcccacccagcatcctctgtcctgagacccctgattttgaagctgaggagtcaggggcatggctctggcaggccgggatggccccgcagccttcagcccctccttgccttggctgtgccctcttctgccaaggaaagacacaagccccaggaagaactcagagccgtcatgggtagcccacgccgtcctttcccctccccaagtgtttctctcctgacccagggttcaggcaggccttgtggtttcaggactgcaaggactccagtgtgaactcaggaggggcaggtgtcagaactgggcaccaggactggagccccctccggagaccaaactcaccatccctcagtcctccccaacagggtactaggactgcagccccctgtagctcctctctgcttacccctcctgtggacaccttgcactctgcctggcccttcccagagcccaaagagtaaaaatgttctggttctga

SEQ ID NO: 349741 - DNA, 1215 bp, Homo sapiens
tgcgcgcctgaatccgtcccacccaggcccagacgcaggcttcttctcctcgggtcttggtcctgcatcctctctctcccagagcctccgttagggggtgggaaaggactttgccataggtcgctgaggccaccatctgctctcttactggccaagggcgtaaaaagatagtcctcccattagctagagagcaaaccccagaaagcctattggctgcgccgtccgcgggccttggtccgctttgaaggcgggctgcggctgcgagaggagggcgggcgggaggctagctgttgtcgtggttgctcggaggcacgtgtgcagtcccggaagcggcgaggggaaactgctccgcgcgcgccgcgggaggaggaaccgcccggtcctttagggtccgggcccggccgggccatggattcaatgcctgagcccgcgtcccgctgtcttctgcttcttcccttgctgctgctgctgctgctgctgctgccggccccggagctgggcccgagccaggccggagctgaggagaacgactgggttcgcctgcccagcaaatgcgaagtgtgtaaatatgttgctgtggagctgaagtcagcctttgaggaaaccggcaagaccaaggaggtgattggcacgggctatggcatcctggaccagaaggcctctggagtcaaatacaccaagtcggacttgcggttaatcgaagtcactgagaccatttgcaagaggctcctggattatagcctgcacaaggagaggaccggcagcaatcgatttgccaagggcatgtcagagacctttgagacattacacaacctggtacacaaaggggtcaaggtggtgaaagacacaagccccaggaagaactcagagccgtcatgggtagcccacgccgtcctttcccctccccaagtgtttctctcctgacccagggttcaggcaggccttgtggtttcaggactgcaaggactccagtgtgaactcaggaggggcaggtgtcagaactgggcaccaggactggagccccctccggagaccaaactcaccatccctcagtcctccccaacagggtactaggactgcagccccctgtagctcctctctgcttacccctcctgtggacaccttgcactctgcctggcccttcccagagcccaaagagtaaaaatgttctggttctgagatttctgagtcctctgcagccctcagaggtgccct

SEQ ID NO: 349742 - DNA, 558 bp, Homo sapiens
ggggacttgttctctaggtccaggatcttcctaatgcatcgcctcagccatgaacaacgcggagttctttaatacccgcgtctggctccgcagcagaacacgaagtttgcattccccaaggggcggccagggggcggaccagggaaaggtagtcctctgcattttgccgtgtgctggaatggtgtagagtgacgatgaggtggcggtaaggggttgagcgctcacgcgaacgcctaagtgaccagaacgactggtgtgaagccgtgatctgactctgtggagcctgggactggtttcagcgagagcctctgtactgctctgtagtctctgctaggacatggacgaaaagggacgcagccgggagagcgactgccccaggtgggggctggggggacgtaagggaagaataatgattatctggctgtgtttttgtttaaaaaaaaaaaaaaaactggtgtaaatctccatagacttcctatcctcgctcccttcacccacccacgcgctcccaagatgcaataagcaaataaaaagactaataacgctgtaaaaaaggtc

SEQ ID NO: 349743 - DNA, 609 bp, Homo sapiens
ggggacttgttctctaggtccaggatcttcctaatgcatcgcctcagccatgaacaacgcggagttctttaatacccgtgagcagcagcccaggccccttgaagagtgcagactcccacctggcctgggcgtctggctccgcagcagaacacgaagtttgcattccccaaggggcggccagggggcggaccagggaaaggtagtcctctgcattttgccgtgtgctggaatggtgtagagtgacgatgaggtggcggtaaggggttgagcgctcacgcgaacgcctaagtgaccagaacgactggtgtgaagccgtgatctgactctgtggagcctgggactggtttcagcgagagcctctgtactgctctgtagtctctgctaggacatggacgaaaagggacgcagccgggagagcgactgccccaggtgggggctggggggacgtaagggaagaataatgattatctggctgtgtttttgtttaaaaaaaaaaaaaaaactggtgtaaatctccatagacttcctatcctcgctcccttcacccacccacgcgctcccaagatgcaataagcaaataaaaagactaataacgctgtaaaaaaggtc

SEQ ID NO: 349744 - DNA, 371 bp, Homo sapiens
cgctgccttcatctctccatctctgcgctgctgccggctgcgccatccagcacccagactccagcaccggccgaggacccccactccggctgcagggaccctgtcccagcgagaccgcaggcatgtcatccgaaaagtcaggactcccagactcagtccctcacacttctccgccgccctacaatgcccctcagcctccagccgaacccccagccccaccgccacaggcagccccttcctcacaccatcaccaccaccaccactaccatcagtctggcaccgccaccctcccgcgcttaggggcagggggcctggcctcttccgcggccaccgctcagcgcggtccctcctcctctgccacgctgccgagg

SEQ ID NO: 349745 - DNA, 2571 bp, Homo sapiens
ggggacttgttctctaggtccaggatcttcctaatgcatcgcctcagccatgaacaacgcggagttctttaatacccgtgagcagcagcccaggccccttgaagagtgcagactcccacctggcctgggtccgtaggcctcgctccacccgctgtttacttatcccaagtctggaacccacggtggcggggggaagggcgtctggctccgcagcagaacacgaagtttgcattccccaaggggcggccagggggcggaccagggaaagtccgccccaggtcagcgacttacaactcttcattctgaagtgcgtgtagtgcccttgtctccagagacgcagagagtcctcgaggccccttgagctaagtgcagcctggcccagtttctcctgccctactctactcccctccctataagcgacccaccctcaaggggcggagggcgcgtagggatgcgctgactcatgcccgcgtaatttcgaccagtctttcaacctgaacgacccccagaatctggctgtctgagttatctgtgggtggctccctaccgaaacccccaggcgccccacctctccgcctgtgacccctaaccgacaccctagtgcctcagggcttttacttgctagggcttttacttagcatttaaagacgtttctctagagataaggatttctcagcatgtctgagcccctctctctgtttacaaggtcattgcttggtctaaatttgtctcaatcaaaacatttttgcgctcagaatggtgtagagtgacgatgaggtggcggtaaggggttgagcgctcacgcgaacgcctaagtgaccagaacgactggtgtgaagccgtgatctgactctgtggagcctgggactggtttcagcgagagcctctgtactgctctgtagtctctgctaggacatggacgaaaagggacgcagccgggagagcgactgccccagtcccacccgcctcgcctggtctagcctccgtgtttccatgacaactccaaaggagcccaaactgggggcttgaatgccgggcacccagactccagcaccggccgaggacccccactccggctgcagggaccctgtcccagcgagaccgcaggcatgtcatccgaaaagtcaggagactcgcttcgagggcccacttcccccgccgccgcccgctgccgccgccccgcccccgccggcgccagcccagactgcccaggcccctggcttcgtggtgcccacgcacgcggggactgtgggcacgctgccgctggggggctacgtagcgcccggataccccctgcagctgcagccttgcactgcttacgtgccggtctacccggtgggcacgccatatgcaggcgggaccccggggggaacaggagtgacctccactctccccccgccgccccagggcccagggctggccctactggagccgaggcgcccgccacacgactacatgcccatcgcggtgctgaccaccatctgttgcttctggcctactggcatcattgccatcttcaaggccgtgcaggtgcgcacggccttggcccgcggagacatggtgtcggccgagatcgcttcacgcgaggcccggaacttctccttcatctccctggccgtgggcatcgcggccatggtgctctgtaccatcctcaccgtagtcatcatcatcgccgcgcagcaccacgagaactactgggatccctaaaaacgcccctggtccggccccactctgcgcccctcgatctcccaggctctttctgcagtcataccgcggacccaatgggcgccctgcacacccgtttctggggccgtcagacttggatacatcgtaaactccgcctccacggaacgtctcgccttgcgagcaagctcggaatccagttcctcaggaacccctccaaaacccacacccccagggacgccgctttccgggatcccggccaaacgccggaccctcagtcgctccaggccccctcaccctcaaagtgtagcgcccccaaccgagcaacctcggtttggtccctaaaaccccgcctcctctataagcaccgccccagctctgacaaaaccccgcctccaggtcggcaggctccgccttcttttcttctccgcggggtgattcagtccagtgattgggtttgtggctccaggcctcgcccacagacggacagacccctccctttcttccggcaaaaggaccgagccctggggtagtaaggcccccacactcctgttttttgcaagtacatttttgtccctcctccacccaggtatctgcctattttcttgctaatcccagaacctttccttttgctttttttaaggacatttgggaagttcctggtgtaggacccttctccctgggataagaaacctgcctgtaaacgctctgtaaatactcccttccacccatcccagcccctgggcagccgggcagaagggaatccaggctatggacctcccaagtccccgctccccgctcccctcggcggccccgccttgttctgatctgtgtgtgagtgtgtgtgaacttctgaaagacaatattaaagagacttagttgatttat

SEQ ID NO: 349746 - DNA, 2177 bp, Homo sapiens
atgccacccgacccttacctgcaggagactcgcttcgagggcccacttcccccgccgccgcccgctgccgccgccccgcccccgccggcgccagcccagactgcccaggcccctggcttcgtggtgcccacgcacgcggggactgtgggcacgctgccgctggggggctacgtagcgcccggataccccctgcagctgcagccttgcactgcttacgtgccggtctacccggtgggcacgccatatgcaggcgggaccccggggggaacaggagtgacctccactctccccccgccgccccagggcccagggctggccctactggagccgaggcgcccgccacacgactacatgcccatcgcggtgctgaccaccatctgttgcttctggcctactggcatcattgccatcttcaaggccgtgcaggtgcgcacggccttggcccgcggagacatggtgtcggccgagatcgcttcacgcgaggcccggaacttctccttcatctccctggccgtgggcatcgcggccatggtgctctgtaccatcctcaccgtagtcatcatcatcgccgcgcagcaccacgagaactactgggatccctaaaaacgcccctggtccggccccactctgcgcccctcgatctcccaggctctttctgcagtcataccgcggacccaatgggcgccctgcacacccgtttctggggccgtcagacttggatacatcgtaaactccgcctccacggaacgtctcgccttgcgagcaagctcggaatccagttcctcaggaacccctccaaaacccacacccccagggacgccgctttccgggatcccggccaaacgccggaccctcagtcgctccaggccccctcaccctcaaagtgtagcgcccccaaccgagcaacctcggtttggtccctaaaaccccgcctcctctataagcaccgccccagctctgacaaaaccccgcctccaggtcggcaggctccgccttcttttcttctccgcggggtgattcagtccagtgattgggtttgtggctccaggcctcgcccacagacggacagacccctccctttcttccggcaaaaggaccgagccctggggtagtaaggcccccacactcctgttttttgcaagtacatttttgtccctcctccacccaggtatctgcctattttcttgctaatcccagaacctttccttttgctttttttaaggacatttgggaagttcctggtgtaggacccttctccctgggataagaaacctgcctgtaaacgctctgtaaatactcccttccacccatcccagcccctgggcagccgggcagaagggaatccaggctatggacctcccaagtccccgctccccgctcccctcggcggccccgccttgttctgatctgtgtgtgagtgtgtgtgaacttctgaaagacaatattaaagagacttagttgatttataaaaaaaaacaaaaaaaaaaaaaaaaaaaaaaaaaaaaaaaaacaaaaaaaaaaaaaaaaacacaccaacaaaaacaaaaaaacaacaaaaaaaacaaaaacaacaacaaaaaaaggcgggcgcggcgcgcccctatactataatcccctcccaccgccgaggcaggcgcagcaccttcaggccgccaccctcctcactctcttcttatctgactacgacgcggcgcgccctcctctatgtgcgggatcgtctttattattatagacgagcacaacgacgcggcgcgcgatctcacctcatacaaaggccaatagcgagacgcggacagacgaagaacatcctgatgtcggcgcgcagaccccacggcttgtccgacagacggggagccccactactaactgtctgtcgccgctgcgcggcgcgagacgcccgccgtcgcgccgccaacacccactcgtcccggcgtgcgcagtctattgatgcataccgccccgccagctggagccgcgcgtcatagcaataccaaaaaaactagccgctcgacgcggcgccgagaggagagacggcgcgtgagtacacaacgcaccgcgcgtctccgacatgtgtctgtgtccgccgggcgccgcaagttgagagttttgtgctgtcccgcgcgaggcgagcgtgtctcaatacgattcgcggcgacgctgctaagttaagcataggg

SEQ ID NO: 349747 - DNA, 1136 bp, Homo sapiens
ggggacttgttctctaggtccaggatcttcctaatgcatcgcctcagccatgaacaacgcggagttctttaatacccgtgagcagcagcccaggccccttgaagagtgcagactcccacctggcctgggtccgtaggcctcgctccacccgctgtttacttatcccaagtctggaacccacggtggcggggggaagggcgtctggctccgcagcagaacacgaagtttgcattccccaaggggcggccagggggcggaccagggaaagtccgccccaggtcagcgacttacaactcttcattctgaagtgcgtgtagtgcccttgtctccagagacgcagagagtcctcgaggccccttgagctaagtgcagcctggcccagtttctcctgccctactctactcccctccctataagcgacccaccctcaaggggcggagggcgcgtagggatgcgctgactcatgcccgcgtaatttcgaccagtctttcaacctgaacgacccccagaatctggctgtctgagttatctgtgggtggctccctaccgaaacccccaggcgccccacctctccgcctgtgacccctaaccgacaccctagtgcctcagggcttttacttgctagggcttttacttagcatttaaagacgtttctctagagataaggatttctcagcatgtctgagcccctctctctgtttacaaggtcattgcttggtctaaatttgtctcaatcaaaacatttttgcgctcagaatggtgtagagtgacgatgaggtggcggtaaggggttgagcgctcacgcgaacgcctaagtgaccagaacgactggtgtgaagccgtgatctgactctgtggagcctgggactggtttcagcgagagcctctgtactgctctgtagtctctgctaggacatggacgaaaagggacgcagccgggagagcgactgccccaggtgggggctggggggacgtaagggaagaataatgattatctggctgtgtttttgtttaaaaaaaaaaaaaaaactggtgtaaatctccatagacttcctatcctcgctcccttcacccacccacgcgctcccaagatgcaataagcaaataaaaagactaataacgctgtaaaaaaggtc

SEQ ID NO: 349748 - DNA, 286 bp, Homo sapiens
agatggcctagatacagcccctctcttgcccctcaaattagagatggtttctcacccgtctctctctatgtgtctctcccattatctttctccatccctgaccggctgtgtttccccttaccccctcctcaactcatcactgtgtcatctttcctcttatactctcctccactcacctcccccaggactcccagactcagtccctcacacttctccgccgccctacaatgcccctcagcctccagccgaacccccagccccaccgccacaggcagccccttcctca

SEQ ID NO: 349749 - DNA, 2044 bp, Homo sapiens
ggggacttgttctctaggtccaggatcttcctaatgcatcgcctcagccatgaacaacgcggagttctttaatacccgtgagcagcagcccaggccccttgaagagtgcagactcccacctggcctgggcgtctggctccgcagcagaacacgaagtttgcattccccaaggggcggccagggggcggaccagggaaaggtagtcctctgcattttgccgtgtgctggaatggtgtagagtgacgatgaggtggcggtaaggggttgagcgctcacgcgaacgcctaagtgaccagaacgactggtgtgaagccgtgatctgactctgtggagcctgggactggtttcagcgagagcctctgtactgctctgtagtctctgctaggacatggacgaaaagggacgcagccgggagagcgactgccccagtcccacccgcctcgcctggtctagcctccgtgtttccatgacaactccaaaggagcccaaactgggggcttgaatgccgggcacccagactccagcaccggccgaggacccccactccggctgcagggaccctgtcccagcgagaccgcaggcatgtcatccgaaaagtcaggagactcgcttcgagggcccacttcccccgccgccgcccgctgccgccgccccgcccccgccggcgccagcccagactgcccaggcccctggcttcgtggtgcccacgcacgcggggactgtgggcacgctgccgctggggggctacgtagcgcccggataccccctgcagctgcagccttgcactgcttacgtgccggtctacccggtgggcacgccatatgcaggcgggaccccggggggaacaggagtgacctccactctccccccgccgccccagggcccagggctggccctactggagccgaggcgcccgccacacgactacatgcccatcgcggtgctgaccaccatctgttgcttctggcctactggcatcattgccatcttcaaggccgtgcaggtgcgcacggccttggcccgcggagacatggtgtcggccgagatcgcttcacgcgaggcccggaacttctccttcatctccctggccgtgggcatcgcggccatggtgctctgtaccatcctcaccgtagtcatcatcatcgccgcgcagcaccacgagaactactgggatccctaaaaacgcccctggtccggccccactctgcgcccctcgatctcccaggctctttctgcagtcataccgcggacccaatgggcgccctgcacacccgtttctggggccgtcagacttggatacatcgtaaactccgcctccacggaacgtctcgccttgcgagcaagctcggaatccagttcctcaggaacccctccaaaacccacacccccagggacgccgctttccgggatcccggccaaacgccggaccctcagtcgctccaggccccctcaccctcaaagtgtagcgcccccaaccgagcaacctcggtttggtccctaaaaccccgcctcctctataagcaccgccccagctctgacaaaaccccgcctccaggtcggcaggctccgccttcttttcttctccgcggggtgattcagtccagtgattgggtttgtggctccaggcctcgcccacagacggacagacccctccctttcttccggcaaaaggaccgagccctggggtagtaaggcccccacactcctgttttttgcaagtacatttttgtccctcctccacccaggtatctgcctattttcttgctaatcccagaacctttccttttgctttttttaaggacatttgggaagttcctggtgtaggacccttctccctgggataagaaacctgcctgtaaacgctctgtaaatactcccttccacccatcccagcccctgggcagccgggcagaagggaatccaggctatggacctcccaagtccccgctccccgctcccctcggcggccccgccttgttctgatctgtgtgtgagtgtgtgtgaacttctgaaagacaatattaaagagacttagttgatttat

SEQ ID NO: 349750 - DNA, 2078 bp, Homo sapiens
cgctgccttcatctctccatctctgcgctgctgccggctgcgccatccagcacccagactccagcaccggccgaggacccccactccggctgcagggaccctgtcccagcgagaccgcaggcatgtcatccgaaaagtcagccatatgcaggcgggaccccggggggaacaggagtgacctccactctccccccgccgccccagggcccagggctggccctactggagccgaggcgcccgccacacgactacatgcccatcgcggtgctgaccaccatctgttgcttctggcctactggcatcattgccatcttcaaggccgtgcaggtgcgcacggccttggcccgcggagacatggtgtcggccgagatcgcttcacgcgaggcccggaacttctccttcatctccctggccgtgggcatcgcggccatggtgctctgtaccatcctcaccgtagtcatcatcatcgccgcgcagcaccacgagaactactgggatccctaaaaacgcccctggtccggccccactctgcgcccctcgatctcccaggctctttctgcagtcataccgcggacccaatgggcgccctgcacacccgtttctggggccgtcagacttggatacatcgtaaactccgcctccacggaacgtctcgccttgcgagcaagctcggaatccagttcctcaggaacccctccaaaacccacacccccagggacgccgctttccgggatcccggccaaacgccggaccctcagtcgctccaggccccctcaccctcaaagtgtagcgcccccaaccgagcaacctcggtttggtccctaaaaccccgcctcctctataagcaccgccccagctctgacaaaaccccgcctccaggtcggcaggctccgccttcttttcttctccgcggggtgattcagtccagtgattgggtttgtggctccaggcctcgcccacagacggacagacccctccctttcttccggcaaaaggaccgagccctggggtagtaaggcccccacactcctgttttttgcaagtacatttttgtccctcctccacccaggtatctgcctattttcttgctaatcccagaacctttccttttgctttttttaaggacatttgggaagttcctggtgtaggacccttctccctgggataagaaacctgcctgtaaacgctctgtaaatactcccttccacccatcccagcccctgggcagccgggcagaagggaatccaggctatggacctcccaagtccccgctccccgctcccctcggcggccccgccttgttctgatctgtgtgtgagtgtgtgtgaacttctgaaagacaatattaaagagacttagttgatttataaaaaaaaacaaaaaaaaaaaaaaaaaaaaaaaaaaaaaaaaacaaaaaaaaaaaaaaaaacacaccaacaaaaacaaaaaaacaacaaaaaaaacaaaaacaacaacaaaaaaaggcgggcgcggcgcgcccctatactataatcccctcccaccgccgaggcaggcgcagcaccttcaggccgccaccctcctcactctcttcttatctgactacgacgcggcgcgccctcctctatgtgcgggatcgtctttattattatagacgagcacaacgacgcggcgcgcgatctcacctcatacaaaggccaatagcgagacgcggacagacgaagaacatcctgatgtcggcgcgcagaccccacggcttgtccgacagacggggagccccactactaactgtctgtcgccgctgcgcggcgcgagacgcccgccgtcgcgccgccaacacccactcgtcccggcgtgcgcagtctattgatgcataccgccccgccagctggagccgcgcgtcatagcaataccaaaaaaactagccgctcgacgcggcgccgagaggagagacggcgcgtgagtacacaacgcaccgcgcgtctccgacatgtgtctgtgtccgccgggcgccgcaagttgagagttttgtgctgtcccgcgcgaggcgagcgtgtctcaatacgattcgcggcgacgctgctaagttaagcataggg

SEQ ID NO: 349751 - DNA, 1744 bp, Homo sapiens
  misc_feature (32)..(32): n is a, c, g, or t
  misc_feature (35)..(35): n is a, c, g, or t
  misc_feature (39)..(39): n is a, c, g, or t
  misc_feature (46)..(46): n is a, c, g, or t
  misc_feature (70)..(70): n is a, c, g, or t
  misc_feature (73)..(73): n is a, c, g, or t
actacggcgggtaacgtaattatgaacctacnatnatgngggcgancaccttgcgaagcgtttaatcggncgngtgcgcgatactcgttacatacatatacagtatgatcagccaatcgcgactcgaatcgcgaacgaggtgcagcgcgcccagtgatggattcaagcctcgtgaacgaagcggtggggagcaggcacaggactgggatgctctgccacccaagcggccccgactaggggcaggaaacaagatcggaggccgtaggcttattgtggtgctggaaggggccagtctggagacagtcaaggtagggaagacatatgagctactcaactgtgacaagcacaagtctatattgttgaagaatggacgggaccctggggaagcgcggccagatatcacccaccagagtttgctgatgctgatggatagtcccctgaaccgagctggcttgctacaggtttatatccatacacagaagaatgttctgattgaagtgaatccccagacccgaattcccagaacctttgaccgcttttgtggcctcatggttcaacttttacacaagctcagtgttcgagcagctgatggcccccagaagcttttgaaggtaattaagaatccagtatcagatcactttccagttggatgtatgaaagttggcacttctttttccatcccggttgtcagtgatgtgcgtgagctggtgcccagcagtgatcctattgtttttgtggtaggggcctttgcccatggcaaggtcagtgtggagtatacagagaagatggtgtccatcagtaactaccccctttctgctgccctcacctgtgcaaaacttaccacagcctttgaggaagtatggggggtcatttgacagtagtagaacctgttctgaaaccagaaactgttgatgtcacatcctttgaccctggtctgagctgactgctggaagatgatctttctgcactgagactgtggagtttggggaagccaaggctgtacatttgctatttgtttatcctatgaatactgttcttgcaaacctggttgttttggggttcctaaagtatccagtggtgtaaaactgtttgttccccgggacttcagggacagataggaggttacagagtttgcagtttggttccatgctttgaaggcaggctttagctcccagattcccatgtgctaaaggagagaaccctgatgatggagaagaactgtgaaagagagcagtcaggaatgctagtggtgaaaaactgaacaaacagaagtgattttatctaatacagttccaaggtagaaaaagtggagcaggcagggccttgcacccctctccacccccccatggggggggtggtggtagcggcacatacacaatcatagtaaattggcagaagaaaaacacaatagattcctggctagatggggagagataaggcaatgtgcatgggggaatcagaggggagatgtgagcccctctgctcctcccacaagagtttcccctttgggccgggcacggtggctcacgcctgtaatcccagcactttgggaggcggaggcgggtggatcacttgcggtcaggagttcgagaccagcctggccaacgtggtgaaatcccgtttctactgaaaatacaaaaattagctgggcatggtggcgtgcctgtattcccaaagtgctgggattacaggcatcactggcccaggcagagccaattctgtataataaatctgtctctctctg

SEQ ID NO: 349752 - DNA, 1619 bp, Homo sapiens
  misc_feature (32)..(32): n is a, c, g, or t
  misc_feature (35)..(35): n is a, c, g, or t
  misc_feature (39)..(39): n is a, c, g, or t
  misc_feature (46)..(46): n is a, c, g, or t
  misc_feature (70)..(70): n is a, c, g, or t
  misc_feature (73)..(73): n is a, c, g, or t
actacggcgggtaacgtaattatgaacctacnatnatgngggcgancaccttgcgaagcgtttaatcggncgngtgcgcgatactcgttacatacatatacagtatgatcagccaatcgcgactcgaatcgcgaacgaggtgcagcgcgcccagtgatggattcaagcctcgtgaacgaagcggtagggaagacatatgagctactcaactgtgacaagcacaagtctatattgttgaagaatggacgggaccctggggaagcgcggccagatatcacccaccagagtttgctgatgctgatggatagtcccctgaaccgagctggcttgctacaggtttatatccatacacagaagaatgttctgattgaagtgaatccccagacccgaattcccagaacctttgaccgcttttgtggcctcatggttcaacttttacacaagctcagtgttcgagcagctgatggcccccagaagcttttgaaggtaattaagaatccagtatcagatcactttccagttggatgtatgaaagttggcacttctttttccatcccggttgtcagtgatgtgcgtgagctggtgcccagcagtgatcctattgtttttgtggtaggggcctttgcccatggcaaggtcagtgtggagtatacagagaagatggtgtccatcagtaactaccccctttctgctgccctcacctgtgcaaaacttaccacagcctttgaggaagtatggggggtcatttgacagtagtagaacctgttctgaaaccagaaactgttgatgtcacatcctttgaccctggtctgagctgactgctggaagatgatctttctgcactgagactgtggagtttggggaagccaaggctgtacatttgctatttgtttatcctatgaatactgttcttgcaaacctggttgttttggggttcctaaagtatccagtggtgtaaaactgtttgttccccgggacttcagggacagataggaggttacagagtttgcagtttggttccatgctttgaaggcaggctttagctcccagattcccatgtgctaaaggagagaaccctgatgatggagaagaactgtgaaagagagcagtcaggaatgctagtggtgaaaaactgaacaaacagaagtgattttatctaatacagttccaaggtagaaaaagtggagcaggcagggccttgcacccctctccacccccccatggggggggtggtggtagcggcacatacacaatcatagtaaattggcagaagaaaaacacaatagattcctggctagatggggagagataaggcaatgtgcatgggggaatcagaggggagatgtgagcccctctgctcctcccacaagagtttcccctttgggccgggcacggtggctcacgcctgtaatcccagcactttgggaggcggaggcgggtggatcacttgcggtcaggagttcgagaccagcctggccaacgtggtgaaatcccgtttctactgaaaatacaaaaattagctgggcatggtggcgtgcctgtattcccaaagtgctgggattacaggcatcactggcccaggcagagccaattctgtataataaatctgtctctctctg

SEQ ID NO: 349753 - DNA, 2423 bp, Homo sapiens
aacacagattcgcgcacaccgtaggccacggcgccggcccccagcaacagcttcagggccgtgcccatgccccggggcccggcgggcagccgtcccgccaagtccttcaagttctgggccatgtctgatcttgaggccggcggcactggaggtcagaagggggtgccggcccgcctctaccccgctccggcttaggtactgcacccttcacacgagggttcgggcccgtaaggctggcgaaagaaagggcagcggaagtgcgctccctttgaaaccctcccccttagcccactacggacccgaacttcgcgcacaggaatcgcgcatacggaagtcccgcccctttctggaaggctgccctcccagggagggcagcgcaagacagcaagtcatctccatttcctggcccactttcaaaatggcagccggaaggaaatttgtgattagaagccgcgctgttcttatttaagagcgttagcgcaacttccggtattgttgcaagatggccgcgcccagtgatggattcaagcctcgtgaacgaagcggtggggagcaggcacaggactgggatgctctgccacccaagcggccccgactaggggcaggaaacaagatcggaggccgtaggcttattgtggtgctggaaggggccagtctggagacagtcaaggtagggaagacatatgagctactcaactgtgacaagcacaagtctatattgttgaagaatggacgggaccctggggaagcgcggccagatatcacccaccagagtttgctgatgctgatggatagtcccctgaaccgagctggcttgctacaggtttatatccatacacagaagaatgttctgattgaagtgaatccccagacccgaattcccagaacctttgaccgcttttgtggcctcatggttcaacttttacacaagctcagtgttcgagcagctgatggcccccagaagcttttgaaggtaattaagaatccagtatcagatcactttccagttggatgtatgaaagttggcacttctttttccatcccggttgtcagtgatgtgcgtgagctggtgcccagcagtgatcctattgtttttgtggtaggggcctttgcccatggcaaggtaaggtctgggctcaaccctgaaattcttggtagagctgaacttagtatagaattcccagagcagtaggcattttaacaatgcttacaatgagctagaagacacatgacagttccacaccctgccccagggcacatcctttgagggctgctgccataattggaagtcacagttaggaccttcttcatcctttgtagggatttgatattcaacagcacagctgaaatactagctcagccatagttttcctgccctaaagaagggctgaaacagctactgagtgacagagttggctgacaaaactgttcttttcttaggtcagtgtggagtatacagagaagatggtgtccatcagtaactaccccctttctgctgccctcacctgtgcaaaacttaccacagcctttgaggaagtatggggggtcatttgacagtagtagaacctgttctgaaaccagaaactgttgatgtcacatcctttgaccctggtctgagctgactgctggaagatgatctttctgcactgagactgtggagtttggggaagccaaggctgtacatttgctatttgtttatcctatgaatactgttcttgcaaacctggttgttttggggttcctaaagtatccagtggtgtaaaactgtttgttccccgggacttcagggacagataggaggttacagagtttgcagtttggttccatgctttgaaggcaggctttagctcccagattcccatgtgctaaaggagagaaccctgatgatggagaagaactgtgaaagagagcagtcaggaatgctagtggtgaaaaactgaacaaacagaagtgattttatctaatacagttccaaggtagaaaaagtggagcaggcagggccttgcacccctctccacccccccatggggggggtggtggtagcggcacatacacaatcatagtaaattggcagaagaaaaacacaatagattcctggctagatggggagagataaggcaatgtgcatgggggaatcagaggggagatgtgagcccctctgctcctcccacaagagtttcccctttgggccgggcacggtggctcacgcctgtaatcccagcactttgggaggcggaggcgggtggatcacttgcggtcaggagttcgagaccagcctggccaacgtggtgaaatcccgtttctactgaaaatacaaaaattagctgggcatggtggcgtgcctgtattcccaaagtgctgggattacaggcatcactggcccaggcagagccaattctgtataataaatctgtctctctctg

SEQ ID NO: 349754 - DNA, 2502 bp, Homo sapiens
aacacagattcgcgcacaccgtaggccacggcgccggcccccagcaacagcttcagggccgtgcccatgccccggggcccggcgggcagccgtcccgccaagtccttcaagttctgggccatgtctgatcttgaggccggcggcactggaggtcagaagggggtgccggcccgcctctaccccgctccggcttaggtactgcacccttcacacgagggttcgggcccgtaaggctggcgaaagaaagggcagcggaagtgcgctccctttgaaaccctcccccttagcccactacggacccgaacttcgcgcacaggaatcgcgcatacggaagtcccgcccctttctggaaggctgccctcccagggagggcagcgcaagacagcaagtcatctccatttcctggcccactttcaaaatggcagccggaaggaaatttgtgattagaagccgcgctgttcttatttaagagcgttagcgcaacttccggtattgttgcaagatggccgcgcccagtgatggattcaagcctcgtgaacgaagcggtggggagcaggcacaggactgggatgctctgccacccaagcggccccgactaggggcaggaaacaagatcggaggccgtaggcttattgtggtgctggaaggggccagtctggagacagtcaaggtagggaagacatatgagctactcaactgtgacaagcacaagtctatattgttgaagaatggacgggaccctggggaagcgcggccagatatcacccaccagagtttgctgatgctgatggatagtcccctgaaccgagctggcttgctacaggtttatatccatacacagaagaatgttctgattgaagtgaatccccagacccgaattcccagaacctttgaccgcttttgtggcctcatgggtaagaagccttagaacaaagttagaatgaacttgtcagtagggaagaagggaggaagaggaaaagggagaactaaatgtggatttttaagcgagaaaatgggagaacaacatgattaataccaggacaaggactgttattatttttctatgtttgtggaaactccactcctgttcttgcagtagcttcctggctgagtgaaagagggagtctgaacccatcactgtacagctagccatatgcttggcaactgtttgttcctaacatttcaggagtccagtctagatataaagcacacagggaactcatcttatccatggggttttccttgttcgatgactggacagaaggactgtggtctccatctagctctgaactcttttttcccccttctagttcaacttttacacaagctcagtgttcgagcagctgatggcccccagaagcttttgaaggtaattaagaatccagtatcagatcactttccagttggatgtatgaaagttggcacttctttttccatcccggttgtcagtgatgtgcgtgagctggtgcccagcagtgatcctattgtttttgtggtaggggcctttgcccatggcaaggtcagtgtggagtatacagagaagatggtgtccatcagtaactaccccctttctgctgccctcacctgtgcaaaacttaccacagcctttgaggaagtatggggggtcatttgacagtagtagaacctgttctgaaaccagaaactgttgatgtcacatcctttgaccctggtctgagctgactgctggaagatgatctttctgcactgagactgtggagtttggggaagccaaggctgtacatttgctatttgtttatcctatgaatactgttcttgcaaacctggttgttttggggttcctaaagtatccagtggtgtaaaactgtttgttccccgggacttcagggacagataggaggttacagagtttgcagtttggttccatgctttgaaggcaggctttagctcccagattcccatgtgctaaaggagagaaccctgatgatggagaagaactgtgaaagagagcagtcaggaatgctagtggtgaaaaactgaacaaacagaagtgattttatctaatacagttccaaggtagaaaaagtggagcaggcagggccttgcacccctctccacccccccatggggggggtggtggtagcggcacatacacaatcatagtaaattggcagaagaaaaacacaatagattcctggctagatggggagagataaggcaatgtgcatgggggaatcagaggggagatgtgagcccctctgctcctcccacaagagtttcccctttgggccgggcacggtggctcacgcctgtaatcccagcactttgggaggcggaggcgggtggatcacttgcggtcaggagttcgagaccagcctggccaacgtggtgaaatcccgtttctactgaaaatacaaaaattagctgggcatggtggcgtgcctgtattcccaaagtgctgggattacaggcatcactggcccaggcagagccaattctgtataataaatctgtctctctctg

SEQ ID NO: 349755 - DNA, 1478 bp, Homo sapiens
aacacagattcgcgcacaccgtaggccacggcgccggcccccagcaacagcttcagggccgtgcccatgccccggggcccggcgggcagccgtcccgccaagtccttcaagttctgggccatgtctgatcttgaggccggcggcactggaggtcagaagggggtgccggcccgcctctaccccgctccggcttaggtactgcacccttcacacgagggttcgggcccgtaaggctggcgaaagaaagggcagcggaagtgcgctccctttgaaaccctcccccttagcccactacggacccgaacttcgcgcacaggaatcgcgcatacggaagtcccgcccctttctggaaggctgccctcccagggagggcagcgcaagacagcaagtcatctccatttcctggcccactttcaaaatggcagccggaaggaaatttgtgattagaagccgcgctgttcttatttaagagcgttagcgcaacttccggtattgttgcaagatggccgcgcccagtgatggattcaagcctcgtgaacgaagcggtggggagcaggcacaggactgggatgctctgccacccaagcggccccgactaggggcaggaaacaagatcggaggccgtaggcttattgtggtgctggaaggggccagtctggagacagtcaaggtagggaagacatatgagctactcaactgtgacaagcacaagtctatattgttgaagaatggacgggaccctggggaagcgcggccagatatcacccaccagagtttgctgatgctgatggatagtcccctgaaccgagctggcttgctacaggtttatatccatacacagaagaatgttctgattgaagtgaatccccagacccgaattcccagaacctttgaccgcttttgtggcctcatggttcaacttttacacaagctcagtgttcgagcagctgatggcccccagaagcttttgaaggtaattaagaatccagtatcagatcactttccagttggatgtatgaaagttggcacttctttttccatcccggttgtcagtgatgtgcgtgagctggtgcccagcagtgatcctattgtttttgtggtaggggcctttgcccatggcaagagatgcgacttgctctgttgtccagacttgagtgcagtagctcaatcatagctcactgcagccttgaattccgggctaccacacccagcttgttactgtatttttgaatgtctgaagtgaagaatgaatctaagtggggactgcttggctcggtcattcagttacatccacagcacagagaaactgaggattctttgttgatgaggtgtctggatcgtatctattccagagtaaagtcatgatggctttatgacgttctgaggtgcgttttgcaggaggggacgttgttgagttccaaacaggtgaggtattgcacactagcaaacacatgagaagaaggcggaggaattgggag

SEQ ID NO: 349756 - DNA, 2582 bp, Homo sapiens
aacacagattcgcgcacaccgtaggccacggcgccggcccccagcaacagcttcagggccgtgcccatgccccggggcccggcgggcagccgtcccgccaagtccttcaagttctgggccatgtctgatcttgaggccggcggcactggaggtcagaagggggtgccggcccgcctctaccccgctccggcttaggtactgcacccttcacacgagggttcgggcccgtaaggctggcgaaagaaagggcagcggaagtgcgctccctttgaaaccctcccccttagcccactacggacccgaacttcgcgcacaggaatcgcgcatacggaagtcccgcccctttctggaaggctgccctcccagggagggcagcgcaagacagcaagtcatctccatttcctggcccactttcaaaatggcagccggaaggaaatttgtgattagaagccgcgctgttcttatttaagagcgttagcgcaacttccggtattgttgcaagatggccgcgcccagtgatggattcaagcctcgtgaacgaagcggtggggagcaggcacaggactgggatgctctgccacccaagcggccccgactaggggcaggaaacaagatcggaggccgtaggcttattgtggtgctggaaggggccagtctggagacagtcaaggtagggaagacatatgagctactcaactgtgacaagcacaagtctatattgttgaagaatggacgggaccctggggaagcgcggccagatatcacccaccagagtttgctgatgctgatggatagtcccctgaaccgagctggcttgctacaggtttatatccatacacagaagaatgttctgattgaagtgaatccccagacccgaattcccagaacctttgaccgcttttgtggcctcatgggtaagaagccttagaacaaagttagaatgaacttgtcagtagggaagaagggaggaagaggaaaagggagaactaaatgtggatttttaagcgagaaaatgggagaacaacatgattaataccaggacaaggactgttattatttttctatgtttgtggaaactccactcctgttcttgcagtagcttcctggctgagtgaaagagggagtctgaacccatcactgtacagctagccatatgcttggcaactgtttgttcctaacatttcaggagtccagtctagatataaagcacacagggaactcatcttatccatggggttttccttgttcgatgactggacagaaggactgtggtctccatctagctctgaactcttttttcccccttctagttcaacttttacacaagctcagtgttcgagcagctgatggcccccagaagcttttgaaggtgaggtattgaaacctgttagttgaaggctggttctgggaatgtttctggggctgacttttctctcttttttactttaggtaattaagaatccagtatcagatcactttccagttggatgtatgaaagttggcacttctttttccatcccggttgtcagtgatgtgcgtgagctggtgcccagcagtgatcctattgtttttgtggtaggggcctttgcccatggcaaggtcagtgtggagtatacagagaagatggtgtccatcagtaactaccccctttctgctgccctcacctgtgcaaaacttaccacagcctttgaggaagtatggggggtcatttgacagtagtagaacctgttctgaaaccagaaactgttgatgtcacatcctttgaccctggtctgagctgactgctggaagatgatctttctgcactgagactgtggagtttggggaagccaaggctgtacatttgctatttgtttatcctatgaatactgttcttgcaaacctggttgttttggggttcctaaagtatccagtggtgtaaaactgtttgttccccgggacttcagggacagataggaggttacagagtttgcagtttggttccatgctttgaaggcaggctttagctcccagattcccatgtgctaaaggagagaaccctgatgatggagaagaactgtgaaagagagcagtcaggaatgctagtggtgaaaaactgaacaaacagaagtgattttatctaatacagttccaaggtagaaaaagtggagcaggcagggccttgcacccctctccacccccccatggggggggtggtggtagcggcacatacacaatcatagtaaattggcagaagaaaaacacaatagattcctggctagatggggagagataaggcaatgtgcatgggggaatcagaggggagatgtgagcccctctgctcctcccacaagagtttcccctttgggccgggcacggtggctcacgcctgtaatcccagcactttgggaggcggaggcgggtggatcacttgcggtcaggagttcgagaccagcctggccaacgtggtgaaatcccgtttctactgaaaatacaaaaattagctgggcatggtggcgtgcctgtattcccaaagtgctgggattacaggcatcactggcccaggcagagccaattctgtataataaatctgtctctctctg

SEQ ID NO: 349757 - DNA, 1567 bp, Homo sapiens
  misc_feature (34)..(34): n is a, c, g, or t
catgatacgaattgagctggtcccgaaggagacncaggtgaggtattgaaacctgttagttgaaggctggttctgggaatgtttctggggctgacttttctctcttttttactttaggtaattaagaatccagtatcagatcactttccagttggatgtatgaaagttggcacttctttttccatcccggttgtcagtgatgtgcgtgagctggtgcccagcagtgatcctattgtttttgtggtaggggcctttgcccatggcaaggtaaggtctgggctcaaccctgaaattcttggtagagctgaacttagtatagaattcccagagcagtaggcattttaacaatgcttacaatgagctagaagacacatgacagttccacaccctgccccagggcacatcctttgagggctgctgccataattggaagtcacagttaggaccttcttcatcctttgtagggatttgatattcaacagcacagctgaaatactagctcagccatagttttcctgccctaaagaagggctgaaacagctactgagtgacagagttggctgacaaaactgttcttttcttaggtcagtgtggagtatacagagaagatggtgtccatcagtaactaccccctttctgctgccctcacctgtgcaaaacttaccacagcctttgaggaagtatggggggtcatttgacagtagtagaacctgttctgaaaccagaaactgttgatgtcacatcctttgaccctggtctgagctgactgctggaagatgatctttctgcactgagactgtggagtttggggaagccaaggctgtacatttgctatttgtttatcctatgaatactgttcttgcaaacctggttgttttggggttcctaaagtatccagtggtgtaaaactgtttgttccccgggacttcagggacagataggaggttacagagtttgcagtttggttccatgctttgaaggcaggctttagctcccagattcccatgtgctaaaggagagaaccctgatgatggagaagaactgtgaaagagagcagtcaggaatgctagtggtgaaaaactgaacaaacagaagtgattttatctaatacagttccaaggtagaaaaagtggagcaggcagggccttgcacccctctccacccccccatggggggggtggtggtagcggcacatacacaatcatagtaaattggcagaagaaaaacacaatagattcctggctagatggggagagataaggcaatgtgcatgggggaatcagaggggagatgtgagcccctctgctcctcccacaagagtttcccctttgggccgggcacggtggctcacgcctgtaatcccagcactttgggaggcggaggcgggtggatcacttgcggtcaggagttcgagaccagcctggccaacgtggtgaaatcccgtttctactgaaaatacaaaaattagctgggcatggtggcgtgcctgtattcccaaagtgctgggattacaggcatcactggcccaggcagagccaattctgtataataaatctgtctctctctg

SEQ ID NO: 349758 - DNA, 1956 bp, Homo sapiens
aacacagattcgcgcacaccgtaggccacggcgccggcccccagcaacagcttcagggccgtgcccatgccccggggcccggcgggcagccgtcccgccaagtccttcaagttctgggccatgtctgatcttgaggccggcggcactggaggtcagaagggggtgccggcccgcctctaccccgctccggcttaggtactgcacccttcacacgagggttcgggcccgtaaggctggcgaaagaaagggcagcggaagtgcgctccctttgaaaccctcccccttagcccactacggacccgaacttcgcgcacaggaatcgcgcatacggaagtcccgcccctttctggaaggctgccctcccagggagggcagcgcaagacagcaagtcatctccatttcctggcccactttcaaaatggcagccggaaggaaatttgtgattagaagccgcgctgttcttatttaagagcgttagcgcaacttccggtattgttgcaagatggccgcgcccagtgatggattcaagcctcgtgaacgaagcggtggggagcaggcacaggactgggatgctctgccacccaagcggccccgactaggggcaggaaacaagatcggaggccgtaggcttattgtggtgctggaaggggccagtctggagacagtcaaggtagggaagacatatgagctactcaactgtgacaagcacaagtctatattgttgaagaatggacgggaccctggggaagcgcggccagatatcacccaccagagtttgctgatgctgatggatagtcccctgaaccgagctggcttgctacaggtttatatccatacacagaagaatgttctgattgaagtgaatccccagacccgaattcccagaacctttgaccgcttttgtggcctcatggttcaacttttacacaagctcagtgttcgagcagctgatggcccccagaagcttttgaaggtcagtgtggagtatacagagaagatggtgtccatcagtaactaccccctttctgctgccctcacctgtgcaaaacttaccacagcctttgaggaagtatggggggtcatttgacagtagtagaacctgttctgaaaccagaaactgttgatgtcacatcctttgaccctggtctgagctgactgctggaagatgatctttctgcactgagactgtggagtttggggaagccaaggctgtacatttgctatttgtttatcctatgaatactgttcttgcaaacctggttgttttggggttcctaaagtatccagtggtgtaaaactgtttgttccccgggacttcagggacagataggaggttacagagtttgcagtttggttccatgctttgaaggcaggctttagctcccagattcccatgtgctaaaggagagaaccctgatgatggagaagaactgtgaaagagagcagtcaggaatgctagtggtgaaaaactgaacaaacagaagtgattttatctaatacagttccaaggtagaaaaagtggagcaggcagggccttgcacccctctccacccccccatggggggggtggtggtagcggcacatacacaatcatagtaaattggcagaagaaaaacacaatagattcctggctagatggggagagataaggcaatgtgcatgggggaatcagaggggagatgtgagcccctctgctcctcccacaagagtttcccctttgggccgggcacggtggctcacgcctgtaatcccagcactttgggaggcggaggcgggtggatcacttgcggtcaggagttcgagaccagcctggccaacgtggtgaaatcccgtttctactgaaaatacaaaaattagctgggcatggtggcgtgcctgtattcccaaagtgctgggattacaggcatcactggcccaggcagagccaattctgtataataaatctgtctctctctg

SEQ ID NO: 349759 - DNA, 1308 bp, Homo sapiens
gcagcagaaagggggtagttactgatggacaccatcttctctgtatactccacactgacctaagaaaagaacagtaggcattttaacaatgcttacaatgagctagaagacacatgacagttccacaccctgccccagggcacatcctttgagggctgctgccataattggaagtcacagttaggaccttcttcatcctttgtagggatttgatattcaacagcacagctgaaatactagctcagccatagttttcctgccctaaagaagggctgaaacagctactgagtgacagagttggctgacaaaactgttcttttcttaggtcagtgtggagtatacagagaagatggtgtccatcagtaactaccccctttctgctgccctcacctgtgcaaaacttaccacagcctttgaggaagtatggggggtcatttgacagtagtagaacctgttctgaaaccagaaactgttgatgtcacatcctttgaccctggtctgagctgactgctggaagatgatctttctgcactgagactgtggagtttggggaagccaaggctgtacatttgctatttgtttatcctatgaatactgttcttgcaaacctggttgttttggggttcctaaagtatccagtggtgtaaaactgtttgttccccgggacttcagggacagataggaggttacagagtttgcagtttggttccatgctttgaaggcaggctttagctcccagattcccatgtgctaaaggagagaaccctgatgatggagaagaactgtgaaagagagcagtcaggaatgctagtggtgaaaaactgaacaaacagaagtgattttatctaatacagttccaaggtagaaaaagtggagcaggcagggccttgcacccctctccacccccccatggggggggtggtggtagcggcacatacacaatcatagtaaattggcagaagaaaaacacaatagattcctggctagatggggagagataaggcaatgtgcatgggggaatcagaggggagatgtgagcccctctgctcctcccacaagagtttcccctttgggccgggcacggtggctcacgcctgtaatcccagcactttgggaggcggaggcgggtggatcacttgcggtcaggagttcgagaccagcctggccaacgtggtgaaatcccgtttctactgaaaatacaaaaattagctgggcatggtggcgtgcctgtattcccaaagtgctgggattacaggcatcactggcccaggcagagccaattctgtataataaatctgtctctctctg

SEQ ID NO: 349760 - DNA, 2106 bp, Homo sapiens
aacacagattcgcgcacaccgtaggccacggcgccggcccccagcaacagcttcagggccgtgcccatgccccggggcccggcgggcagccgtcccgccaagtccttcaagttctgggccatgtctgatcttgaggccggcggcactggaggtcagaagggggtgccggcccgcctctaccccgctccggcttaggtactgcacccttcacacgagggttcgggcccgtaaggctggcgaaagaaagggcagcggaagtgcgctccctttgaaaccctcccccttagcccactacggacccgaacttcgcgcacaggaatcgcgcatacggaagtcccgcccctttctggaaggctgccctcccagggagggcagcgcaagacagcaagtcatctccatttcctggcccactttcaaaatggcagccggaaggaaatttgtgattagaagccgcgctgttcttatttaagagcgttagcgcaacttccggtattgttgcaagatggccgcgcccagtgatggattcaagcctcgtgaacgaagcggtggggagcaggcacaggactgggatgctctgccacccaagcggccccgactaggggcaggaaacaagatcggaggccgtaggcttattgtggtgctggaaggggccagtctggagacagtcaaggtagggaagacatatgagctactcaactgtgacaagcacaagtctatattgttgaagaatggacgggaccctggggaagcgcggccagatatcacccaccagagtttgctgatgctgatggatagtcccctgaaccgagctggcttgctacaggtttatatccatacacagaagaatgttctgattgaagtgaatccccagacccgaattcccagaacctttgaccgcttttgtggcctcatggttcaacttttacacaagctcagtgttcgagcagctgatggcccccagaagcttttgaaggtaattaagaatccagtatcagatcactttccagttggatgtatgaaagttggcacttctttttccatcccggttgtcagtgatgtgcgtgagctggtgcccagcagtgatcctattgtttttgtggtaggggcctttgcccatggcaaggtcagtgtggagtatacagagaagatggtgtccatcagtaactaccccctttctgctgccctcacctgtgcaaaacttaccacagcctttgaggaagtatggggggtcatttgacagtagtagaacctgttctgaaaccagaaactgttgatgtcacatcctttgaccctggtctgagctgactgctggaagatgatctttctgcactgagactgtggagtttggggaagccaaggctgtacatttgctatttgtttatcctatgaatactgttcttgcaaacctggttgttttggggttcctaaagtatccagtggtgtaaaactgtttgttccccgggacttcagggacagataggaggttacagagtttgcagtttggttccatgctttgaaggcaggctttagctcccagattcccatgtgctaaaggagagaaccctgatgatggagaagaactgtgaaagagagcagtcaggaatgctagtggtgaaaaactgaacaaacagaagtgattttatctaatacagttccaaggtagaaaaagtggagcaggcagggccttgcacccctctccacccccccatggggggggtggtggtagcggcacatacacaatcatagtaaattggcagaagaaaaacacaatagattcctggctagatggggagagataaggcaatgtgcatgggggaatcagaggggagatgtgagcccctctgctcctcccacaagagtttcccctttgggccgggcacggtggctcacgcctgtaatcccagcactttgggaggcggaggcgggtggatcacttgcggtcaggagttcgagaccagcctggccaacgtggtgaaatcccgtttctactgaaaatacaaaaattagctgggcatggtggcgtgcctgtattcccaaagtgctgggattacaggcatcactggcccaggcagagccaattctgtataataaatctgtctctctctg

SEQ ID NO: 349761 - DNA, 1673 bp, Homo sapiens
aacacagattcgcgcacaccgtaggccacggcgccggcccccagcaacagcttcagggccgtgcccatgccccggggcccggcgggcagccgtcccgccaagtccttcaagttctgggccatgtctgatcttgaggccggcggcactggaggtcagaagggggtgccggcccgcctctaccccgctccggcttaggtactgcacccttcacacgagggttcgggcccgtaaggctggcgaaagaaagggcagcggaagtgcgctccctttgaaaccctcccccttagcccactacggacccgaacttcgcgcacaggaatcgcgcatacggaagtcccgcccctttctggaaggctgccctcccagggagggcagcgcaagacagcaagtcatctccatttcctggcccactttcaaaatggcagccggaaggaaatttgtgattagaagccgcgctgttcttatttaagagcgttagcgcaacttccggtattgttgcaagatggccgcgcccagtgatggattcaagcctcgtgaacgaagcggtggggagcaggcacaggactgggatgctctgccacccaagcggccccgactaggggcaggaaacaagatcggaggccgtaggcttattgtggtgctggaaggggccagtctggagacagtcaaggtagggaagacatatgagctactcaactgtgacaagcacaagtctatattgttgaagaatggacgggaccctggggaagcgcggccagatatcacccaccagagtttgctgatgctgatggatagtcccctgaaccgagctggcttgctacaggtttatatccatacacagaagaatgttctgattgaagtgaatccccagacccgaattcccagaacctttgaccgcttttgtggcctcatggttcaacttttacacaagctcagtgttcgagcagctgatggcccccagaagcttttgaaggtaattaagaatccagtatcagatcactttccagttggatgtatgaaagttggcacttctttttccatcccggttgtcagtgatgtgcgtgagctggtgcccagcagtgatcctattgtttttgtggtaggggcctttgcccatggcaaggtcagtgtggagtatacagagaagatggtgtccatcagtaactaccccctttctgctgccctcacctgtgcaaaacttaccacagcctttgaggaagtatggggggtcatttgacagtagtagaacctgttctgaaaccagaaactgttgatgtcacatcctttgaccctggtctgagctgactgctggaagatgatctttctgcactgagactgtggagtttggggaagccaaggctgtacatttgctatttgtttatcctatgaatactgttcttgcaaaaaaaaaaaaaaagaaaaacaaacaaaaacaaaaaaaacataacaaaaaaagaaaaacaaaaaactaaagaacgaaaaaaaaaaaaaaaaaatttaaaaaaaaaaaaataagaaagaataaaaaccctgggggcccgcctggcccaagctaattttagattgggaaagtttttttcatgggcccaaatttcagtttacttggccaatttccccttatgggggggggattaaaaatcaagggcccggggtttaaaaaggggggaccgggg

SEQ ID NO: 349762 - DNA, 1428 bp, Homo sapiens
gtgtctagaggatcccataggaagaatgtgcacatcttccaatatggaagaatgtgcgggaccctggggaagcgcggcagatatcacccaccagagtttgctgatgctgatggatagtcccctgaaccgagctggcttgctacaggtttatatccatacacagaagaatgttctgattgaagtgaatccccagacccgaattcccagaacctttgaccgcttttgtggcctcatggttcaacttttacacaagctcagtgttcgagcagctgatggcccccagaagcttttgaaggtaattaagaatccagtatcagatcactttccagttggatgtatgaaagttggcacttctttttccatcccggttgtcagtgatgtgcgtgagctggtgcccagcagtgatcctattgtttttgtggtaggggcctttgcccatggcaaggtcagtgtggagtatacagagaagatggtgtccatcagtaactaccccctttctgctgccctcacctgtgcaaaacttaccacagcctttgaggaagtatggggggtcatttgacagtagtagaacctgttctgaaaccagaaactgttgatgtcacatcctttgaccctggtctgagctgactgctggaagatgatctttctgcactgagactgtggagtttggggaagccaaggctgtacatttgctatttgtttatcctatgaatactgttcttgcaaacctggttgttttggggttcctaaagtatccagtggtgtaaaactgtttgttccccgggacttcagggacagataggaggttacagagtttgcagtttggttccatgctttgaaggcaggctttagctcccagattcccatgtgctaaaggagagaaccctgatgatggagaagaactgtgaaagagagcagtcaggaatgctagtggtgaaaaactgaacaaacagaagtgattttatctaatacagttccaaggtagaaaaagtggagcaggcagggccttgcacccctctccacccccccatggggggggtggtggtagcggcacatacacaatcatagtaaattggcagaagaaaaacacaatagattcctggctagatggggagagataaggcaatgtgcatgggggaatcagaggggagatgtgagcccctctgctcctcccacaagagtttcccctttgggccgggcacggtggctcacgcctgtaatcccagcactttgggaggcggaggcgggtggatcacttgcggtcaggagttcgagaccagcctggccaacgtggtgaaatcccgtttctactgaaaatacaaaaattagctgggcatggtggcgtgcctgtattcccaaagtgctgggattacaggcatcactggcccaggcagagccaattctgtataataaatctgtctctctctg

SEQ ID NO: 349763 - DNA, 2613 bp, Homo sapiens
aacacagattcgcgcacaccgtaggccacggcgccggcccccagcaacagcttcagggccgtgcccatgccccggggcccggcgggcagccgtcccgccaagtccttcaagttctgggccatgtctgatcttgaggccggcggcactggaggtcagaagggggtgccggcccgcctctaccccgctccggcttaggtactgcacccttcacacgagggttcgggcccgtaaggctggcgaaagaaagggcagcggaagtgcgctccctttgaaaccctcccccttagcccactacggacccgaacttcgcgcacaggaatcgcgcatacggaagtcccgcccctttctggaaggctgccctcccagggagggcagcgcaagacagcaagtcatctccatttcctggcccactttcaaaatggcagccggaaggaaatttgtgattagaagccgcgctgttcttatttaagagcgttagcgcaacttccggtattgttgcaagatggccgcgcccagtgatggattcaagcctcgtgaacgaagcggtggggagcaggcacaggactgggatgctctgccacccaagcggccccgactaggggcaggaaacaagatcggaggccgtaggcttattgtggtgctggaaggggccagtctggagacagtcaaggtagggaagacatatgagctactcaactgtgacaagcacaagtctatattgttgaagaatggacgggaccctggggaagcgcggccagatatcacccaccaggtaactccagggacagtgctcacaaccctttgagcctctgtatggaagggttggcagctgagtgctgcctctcttcagccttaaccatgtctcggtttctgctttgctcagagtttgctgatgctgatggatagtcccctgaaccgagctggcttgctacaggtttatatccatacacagaagaatgttctgattgaagtgaatccccagacccgaattcccagaacctttgaccgcttttgtggcctcatgggtaagaagccttagaacaaagttagaatgaacttgtcagtagggaagaagggaggaagaggaaaagggagaactaaatgtggatttttaagcgagaaaatgggagaacaacatgattaataccaggacaaggactgttattatttttctatgtttgtggaaactccactcctgttcttgcagtagcttcctggctgagtgaaagagggagtctgaacccatcactgtacagctagccatatgcttggcaactgtttgttcctaacatttcaggagtccagtctagatataaagcacacagggaactcatcttatccatggggttttccttgttcgatgactggacagaaggactgtggtctccatctagctctgaactcttttttcccccttctagttcaacttttacacaagctcagtgttcgagcagctgatggcccccagaagcttttgaaggtaattaagaatccagtatcagatcactttccagttggatgtatgaaagttggcacttctttttccatcccggttgtcagtgatgtgcgtgagctggtgcccagcagtgatcctattgtttttgtggtaggggcctttgcccatggcaaggtcagtgtggagtatacagagaagatggtgtccatcagtaactaccccctttctgctgccctcacctgtgcaaaacttaccacagcctttgaggaagtatggggggtcatttgacagtagtagaacctgttctgaaaccagaaactgttgatgtcacatcctttgaccctggtctgagctgactgctggaagatgatctttctgcactgagactgtggagtttggggaagccaaggctgtacatttgctatttgtttatcctatgaatactgttcttgcaaacctggttgttttggggttcctaaagtatccagtggtgtaaaactgtttgttccccgggacttcagggacagataggaggttacagagtttgcagtttggttccatgctttgaaggcaggctttagctcccagattcccatgtgctaaaggagagaaccctgatgatggagaagaactgtgaaagagagcagtcaggaatgctagtggtgaaaaactgaacaaacagaagtgattttatctaatacagttccaaggtagaaaaagtggagcaggcagggccttgcacccctctccacccccccatggggggggtggtggtagcggcacatacacaatcatagtaaattggcagaagaaaaacacaatagattcctggctagatggggagagataaggcaatgtgcatgggggaatcagaggggagatgtgagcccctctgctcctcccacaagagtttcccctttgggccgggcacggtggctcacgcctgtaatcccagcactttgggaggcggaggcgggtggatcacttgcggtcaggagttcgagaccagcctggccaacgtggtgaaatcccgtttctactgaaaatacaaaaattagctgggcatggtggcgtgcctgtattcccaaagtgctgggattacaggcatcactggcccaggcagagccaattctgtataataaatctgtctctctctg

SEQ ID NO: 349764 - DNA, 2186 bp, Homo sapiens
aacacagattcgcgcacaccgtaggccacggcgccggcccccagcaacagcttcagggccgtgcccatgccccggggcccggcgggcagccgtcccgccaagtccttcaagttctgggccatgtctgatcttgaggccggcggcactggaggtcagaagggggtgccggcccgcctctaccccgctccggcttaggtactgcacccttcacacgagggttcgggcccgtaaggctggcgaaagaaagggcagcggaagtgcgctccctttgaaaccctcccccttagcccactacggacccgaacttcgcgcacaggaatcgcgcatacggaagtcccgcccctttctggaaggctgccctcccagggagggcagcgcaagacagcaagtcatctccatttcctggcccactttcaaaatggcagccggaaggaaatttgtgattagaagccgcgctgttcttatttaagagcgttagcgcaacttccggtattgttgcaagatggccgcgcccagtgatggattcaagcctcgtgaacgaagcggtggggagcaggcacaggactgggatgctctgccacccaagcggccccgactaggggcaggaaacaagatcggaggccgtaggcttattgtggtgctggaaggggccagtctggagacagtcaaggtagggaagacatatgagctactcaactgtgacaagcacaagtctatattgttgaagaatggacgggaccctggggaagcgcggccagatatcacccaccagagtttgctgatgctgatggatagtcccctgaaccgagctggcttgctacaggtttatatccatacacagaagaatgttctgattgaagtgaatccccagacccgaattcccagaacctttgaccgcttttgtggcctcatggttcaacttttacacaagctcagtgttcgagcagctgatggcccccagaagcttttgaaggtgaggtattgaaacctgttagttgaaggctggttctgggaatgtttctggggctgacttttctctcttttttactttaggtaattaagaatccagtatcagatcactttccagttggatgtatgaaagttggcacttctttttccatcccggttgtcagtgatgtgcgtgagctggtgcccagcagtgatcctattgtttttgtggtaggggcctttgcccatggcaaggtcagtgtggagtatacagagaagatggtgtccatcagtaactaccccctttctgctgccctcacctgtgcaaaacttaccacagcctttgaggaagtatggggggtcatttgacagtagtagaacctgttctgaaaccagaaactgttgatgtcacatcctttgaccctggtctgagctgactgctggaagatgatctttctgcactgagactgtggagtttggggaagccaaggctgtacatttgctatttgtttatcctatgaatactgttcttgcaaacctggttgttttggggttcctaaagtatccagtggtgtaaaactgtttgttccccgggacttcagggacagataggaggttacagagtttgcagtttggttccatgctttgaaggcaggctttagctcccagattcccatgtgctaaaggagagaaccctgatgatggagaagaactgtgaaagagagcagtcaggaatgctagtggtgaaaaactgaacaaacagaagtgattttatctaatacagttccaaggtagaaaaagtggagcaggcagggccttgcacccctctccacccccccatggggggggtggtggtagcggcacatacacaatcatagtaaattggcagaagaaaaacacaatagattcctggctagatggggagagataaggcaatgtgcatgggggaatcagaggggagatgtgagcccctctgctcctcccacaagagtttcccctttgggccgggcacggtggctcacgcctgtaatcccagcactttgggaggcggaggcgggtggatcacttgcggtcaggagttcgagaccagcctggccaacgtggtgaaatcccgtttctactgaaaatacaaaaattagctgggcatggtggcgtgcctgtattcccaaagtgctgggattacaggcatcactggcccaggcagagccaattctgtataataaatctgtctctctctg

SEQ ID NO: 349765 - DNA, 2503 bp, Homo sapiens
aacacagattcgcgcacaccgtaggccacggcgccggcccccagcaacagcttcagggccgtgcccatgccccggggcccggcgggcagccgtcccgccaagtccttcaagttctgggccatgtctgatcttgaggccggcggcactggaggtcagaagggggtgccggcccgcctctaccccgctccggcttaggtactgcacccttcacacgagggttcgggcccgtaaggctggcgaaagaaagggcagcggaagtgcgctccctttgaaaccctcccccttagcccactacggacccgaacttcgcgcacaggaatcgcgcatacggaagtcccgcccctttctggaaggctgccctcccagggagggcagcgcaagacagcaagtcatctccatttcctggcccactttcaaaatggcagccggaaggaaatttgtgattagaagccgcgctgttcttatttaagagcgttagcgcaacttccggtattgttgcaagatggccgcgcccagtgatggattcaagcctcgtgaacgaagcggtggggagcaggcacaggactgggatgctctgccacccaagcggccccgactaggggcaggaaacaagatcggaggccgtaggcttattgtggtgctggaaggggccagtctggagacagtcaaggtagggaagacatatgagctactcaactgtgacaagcacaagtctatattgttgaagaatggacgggaccctggggaagcgcggccagatatcacccaccagagtttgctgatgctgatggatagtcccctgaaccgagctggcttgctacaggtttatatccatacacagaagaatgttctgattgaagtgaatccccagacccgaattcccagaacctttgaccgcttttgtggcctcatggttcaacttttacacaagctcagtgttcgagcagctgatggcccccagaagcttttgaaggtgaggtattgaaacctgttagttgaaggctggttctgggaatgtttctggggctgacttttctctcttttttactttaggtaattaagaatccagtatcagatcactttccagttggatgtatgaaagttggcacttctttttccatcccggttgtcagtgatgtgcgtgagctggtgcccagcagtgatcctattgtttttgtggtaggggcctttgcccatggcaaggtaaggtctgggctcaaccctgaaattcttggtagagctgaacttagtatagaattcccagagcagtaggcattttaacaatgcttacaatgagctagaagacacatgacagttccacaccctgccccagggcacatcctttgagggctgctgccataattggaagtcacagttaggaccttcttcatcctttgtagggatttgatattcaacagcacagctgaaatactagctcagccatagttttcctgccctaaagaagggctgaaacagctactgagtgacagagttggctgacaaaactgttcttttcttaggtcagtgtggagtatacagagaagatggtgtccatcagtaactaccccctttctgctgccctcacctgtgcaaaacttaccacagcctttgaggaagtatggggggtcatttgacagtagtagaacctgttctgaaaccagaaactgttgatgtcacatcctttgaccctggtctgagctgactgctggaagatgatctttctgcactgagactgtggagtttggggaagccaaggctgtacatttgctatttgtttatcctatgaatactgttcttgcaaacctggttgttttggggttcctaaagtatccagtggtgtaaaactgtttgttccccgggacttcagggacagataggaggttacagagtttgcagtttggttccatgctttgaaggcaggctttagctcccagattcccatgtgctaaaggagagaaccctgatgatggagaagaactgtgaaagagagcagtcaggaatgctagtggtgaaaaactgaacaaacagaagtgattttatctaatacagttccaaggtagaaaaagtggagcaggcagggccttgcacccctctccacccccccatggggggggtggtggtagcggcacatacacaatcatagtaaattggcagaagaaaaacacaatagattcctggctagatggggagagataaggcaatgtgcatgggggaatcagaggggagatgtgagcccctctgctcctcccacaagagtttcccctttgggccgggcacggtggctcacgcctgtaatcccagcactttgggaggcggaggcgggtggatcacttgcggtcaggagttcgagaccagcctggccaacgtggtgaaatcccgtttctactgaaaatacaaaaattagctgggcatggtggcgtgcctgtattcccaaagtgctgggattacaggcatcactggcccaggcagagccaattctgtataataaatctgtctctctctg

SEQ ID NO: 349766 - DNA, 3053 bp, Homo sapiens
ccttcaatgtgaagctaatatctcctatagcatagttaatgtttattcaacaaatattcatgcagcggagtcaagaacacaccacgatggcggagaaaggaagagacgccgagcgggccgagtgcggccgagcaaagccggagccggagcggggccgcaggagacgggccgggtccggacgggccgagatgccctataaactgaaaaaggagaaggagccccccaaggttgccaaatgcacagccaagcctagcagctcgggcaaggatggtggaggcgagaacactgaggaggcccagccgcagccccagccccagccccagccccaagcccagtctcagccaccgtcatccaacaagcgtcccagcaatagcacgccgccccccacgcagctcagcaaaatcaagtactcaggggggccccagattgtcaagaaggagcgacggcaaagctcctcccgcttcaacctcagcaagaatcgggagctgcagaagcttcctgccctgaaagattcgccaacccaggagcgggaggagctgtttatccagaagctacgccagtgctgtgtcctctttgacttcgtgtcagacccactcagtgacctcaaattcaaggaggtgaagcgggcaggactcaacgagatggtggagtacatcacccatagccgtgatgttgtcactgaggccatttaccctgaggctgtcaccatgttttcagtgaacctcttccggacgctgccaccttcatcgaatcccacaggggctgagtttgacccagaggaagatgagcccaccctggaagctgcttggccacatctccagctcgtgtatgagttcttcttacgtttccttgagtctcctgatttccagccaaacatagccaagaagtacatcgaccagaagtttgtacttgctctcctagacctatttgacagtgaggatcctcgagagcgggacttcctcaagaccattttgcatcgcatctatggcaagtttttggggctccgggcttatatccgtaggcagatcaaccacatcttctacaggttcatctacgagacggagcatcacaacgggattgctgagctcctggagatcctgggcagcatcatcaatggctttgccctgccccttaaagaagagcacaagatgttcctcatccgtgtcctacttccccttcacaaggtcaagtccctgagtgtctaccaccctcagctggcatactgtgtggtacaattcctggagaaggagagcagtctgactgagccggtaattgtgggacttctcaagttttggcccaagacccacagccccaaggaggtgatgttcttgaatgagctggaggagattctggacgtcattgaaccttctgagttcagcaaagtgatggaacccctcttccgccagctggccaagtgtgtctctagcccccatttccaggtggcagagcgtgctctctattactggaacaatgagtacatcatgagcctgataagtgacaatgctgcccgagtcctccccatcatgttccctgcactctacaggaactccaagagccactggaacaagacaatccatggactgatctataatgccctgaagttgtttatggaaatgaatcagaagctgtttgatgactgcacacaacaatacaaggcagagaagcagaagggccggttccgaatgaaggaaagggaagagatgtggcaaaaaatcgaggagctggcccggcttaatccccagtatcccatgttccgagcccctccaccactgccccctgtgtactcgatggagacagagacccccacagctgaggacatccagcttctgaagaggactgtggagactgaggctgttcagatgctaaaagacatcaagaaggagaaagtgctgctgcggaggaagtcggagctgccccaggacgtgtacaccatcaaggcactggaggcgcacaagcgggcggaagagttcctaactgccagccaggaggctctctgacccctcacgttcctaccacagggccacagcccacacagccctgggacactgccctggccctccatactctgctccctactggctgtcttgggggaaggcagcgcctctctagctactcaagggagggggatgtgggcacttgaagcagggacacccacagaatggtccctcttctccccaaaaggtgttcatgcctccctgtggctagtacaggctgagcactaagatgcttagtgctcagacaacctggggatgcctgtcccctacctgctcctcacccacagctacctgaggctgctctgagaagtacacacaggaatacatacgctcctctattcttcccttcatcctcatttgaacgccaggtatctcccctcctctctctcccctgcagaggcatgtagggaacagcaggagattattctcaccaaagttatgtcaagccccattggtcccagagtagctgaagggaagccaacccccctgcagcacaaataggccccccagtcccagccgtgtgctggcagatagggttgtattatttcttcttaccccatgcctgaccaagggaggtcaaaaggagaaaagtataggctgtggacaataactgatgaatatagggcccagatggaccaagtggggccggggagggatgaataaacaccctaccccgtgccctgtctttggtgagcagcagccctggggtcacagacatggaagggaccaccctggggctgactgcttttctgtgctgttggttcccaaaactagaaagaaggaagcagggagcggtgccccaagcatggctcctgccaacacctatttatttccttgtttgtgctatgctgggcaggccttctcttgtcccttataggtaccttggaggggccaggggctgaggaaggccggacccaggttccaggggcgcaggcagtgcggcttttggctgtgtacatagggtgctttattctccacagagtgatacatgctaaggtgggttgggcttggaccgatgtccccatatgtacagaactgaataaagtgggtctctgagaa

SEQ ID NO: 349767 - DNA, 2997 bp, Homo sapiens
gcgcaggcaccgctcgacccgggcgcagcgcgcaggcggtggcgaagagacgccgagcgggccgagtgcggccgagcaaagccggagccggagcggggccgcaggagacgggccgggtccggacgggccgagatgccctataaactgaaaaaggagaaggagccccccaaggttgccaaatgcacagccaagcctagcagctcgggcaaggatggtggaggcgagaacactgaggaggcccagccgcagccccagccccagccccagccccaagcccagtctcagccaccgtcatccaacaagcgtcccagcaatagcacgccgccccccacgcagctcagcaaaatcaagtactcaggggggccccagattgtcaagaaggagcgacggcaaagctcctcccgcttcaacctcagcaagaatcgggagctgcagaagcttcctgccctgaaagattcgccaacccaggagcgggaggagctgtttatccagaagctacgccagtgctgtgtcctctttgacttcgtgtcagacccactcagtgacctcaaattcaaggaggtgaagcgggcaggactcaacgagatggtggagtacatcacccatagccgtgatgttgtcactgaggccatttaccctgaggctgtcaccatgttttcagtgaacctcttccggacgctgccaccttcatcgaatcccacaggggctgagtttgacccagaggaagatgagcccaccctggaagctgcttggccacatctccagctcgtgtatgagttcttcttacgtttccttgagtctcctgatttccagccaaacatagccaagaagtacatcgaccagaagtttgtacttgctctcctagacctatttgacagtgaggatcctcgagagcgggacttcctcaagaccattttgcatcgcatctatggcaagtttttggggctccgggcttatatccgtaggcagatcaaccacatcttctacaggttcatctacgagacggagcatcacaacgggattgctgagctcctggagatcctgggcagcatcatcaatggctttgccctgccccttaaagaagagcacaagatgttcctcatccgtgtcctacttccccttcacaaggtcaagtccctgagtgtctaccaccctcagctggcatactgtgtggtacaattcctggagaaggagagcagtctgactgagccggtaattgtgggacttctcaagttttggcccaagacccacagccccaaggaggtgatgttcttgaatgagctggaggagattctggacgtcattgaaccttctgagttcagcaaagtgatggaacccctcttccgccagctggccaagtgtgtctctagcccccatttccaggtggcagagcgtgctctctattactggaacaatgagtacatcatgagcctgataagtgacaatgctgcccgagtcctccccatcatgttccctgcactctacaggaactccaagagccactggaacaagacaatccatggactgatctataatgccctgaagttgtttatggaaatgaatcagaagctgtttgatgactgcacacaacaatacaaggcagagaagcagaagggccggttccgaatgaaggaaagggaagagatgtggcaaaaaatcgaggagctggcccggcttaatccccagtatcccatgttccgagcccctccaccactgccccctgtgtactcgatggagacagagacccccacagctgaggacatccagcttctgaagaggactgtggagactgaggctgttcagatgctaaaagacatcaagaaggagaaagtgctgctgcggaggaagtcggagctgccccaggacgtgtacaccatcaaggcactggaggcgcacaagcgggcggaagagttcctaactgccagccaggaggctctctgacccctcacgttcctaccacagggccacagcccacacagccctgggacactgccctggccctccatactctgctccctactggctgtcttgggggaaggcagcgcctctctagctactcaagggagggggatgtgggcacttgaagcagggacacccacagaatggtccctcttctccccaaaaggtgttcatgcctccctgtggctagtacaggctgagcactaagatgcttagtgctcagacaacctggggatgcctgtcccctacctgctcctcacccacagctacctgaggctgctctgagaagtacacacaggaatacatacgctcctctattcttcccttcatcctcatttgaacgccaggtatctcccctcctctctctcccctgcagaggcatgtagggaacagcaggagattattctcaccaaagttatgtcaagccccattggtcccagagtagctgaagggaagccaacccccctgcagcacaaataggccccccagtcccagccgtgtgctggcagatagggttgtattatttcttcttaccccatgcctgaccaagggaggtcaaaaggagaaaagtataggctgtggacaataactgatgaatatagggcccagatggaccaagtggggccggggagggatgaataaacaccctaccccgtgccctgtctttggtgagcagcagccctggggtcacagacatggaagggaccaccctggggctgactgcttttctgtgctgttggttcccaaaactagaaagaaggaagcagggagcggtgccccaagcatggctcctgccaacacctatttatttccttgtttgtgctatgctgggcaggccttctcttgtcccttataggtaccttggaggggccaggggctgaggaaggccggacccaggttccaggggcgcaggcagtgcggcttttggctgtgtacatagggtgctttattctccacagagtgatacatgctaaggtgggttgggcttggaccgatgtccccatatgtacagaactgaataaagtgggtctctgagaa

SEQ ID NO: 349768 - DNA, 3442 bp, Homo sapiens
  misc_feature (3289)..(3289): n is a, c, g, or t
  misc_feature (3294)..(3294): n is a, c, g, or t
  misc_feature (3300)..(3300): n is a, c, g, or t
  misc_feature (3311)..(3312): n is a, c, g, or t
  misc_feature (3316)..(3316): n is a, c, g, or t
  misc_feature (3327)..(3327): n is a, c, g, or t
gcgcaggcaccgctcgacccgggcgcagcgcgcaggcggtggcgaagagacgccgagcgggccgagtgcggccgagcaaagccggagccggagcggggccgcaggagacgggccgggtccggacgggccgagatgccctataaactgaaaaaggagaaggagccccccaaggttgccaaatgcacagccaagcctagcagctcgggcaaggatggtggaggcgagaacactgaggaggcccagccgcagccccagccccagccccagccccaagcccagtctcagccaccgtcatccaacaagcgtcccagcaatagcacgccgccccccacgcagctcagcaaaatcaagtactcaggggggccccagattgtcaagaaggagcgacggcaaagctcctcccgcttcaacctcagcaagaatcgggagctgcagaagcttcctgccctgaaagattcgccaacccaggagcgggaggagctgtttatccagaagctacgccagtgctgtgtcctctttgacttcgtgtcagacccactcagtgacctcaaattcaaggaggtgaagcgggcaggactcaacgagatggtggagtacatcacccatagccgtgatgttgtcactgaggccatttaccctgaggctgtcaccatgttttcagtgaacctcttccggacgctgccaccttcatcgaatcccacaggggctgagtttgacccagaggaagatgagcccaccctggaagctgcttggccacatctccagctcgtgtatgagttcttcttacgtttccttgagtctcctgatttccagccaaacatagccaagaagtacatcgaccagaagtttgtacttgctctcctagacctatttgacagtgaggatcctcgagagcgggacttcctcaagaccattttgcatcgcatctatggcaagtttttggggctccgggcttatatccgtaggcagatcaaccacatcttctacaggttcatctacgagacggagcatcacaacgggattgctgagctcctggagatcctgggcagcatcatcaatggctttgccctgccccttaaagaagagcacaagatgttcctcatccgtgtcctacttccccttcacaaggtcaagtccctgagtgtctaccaccctcagctggcatactgtgtggtacaattcctggagaaggagagcagtctgactgagccggtaattgtgggacttctcaagttttggcccaagacccacagccccaaggaggtgatgttcttgaatgagctggaggagattctggacgtcattgaaccttctgagttcagcaaagtgatggaacccctcttccgccagctggccaagtgtgtctctagcccccatttccaggtggcagagcgtgctctctattactggaacaatgagtacatcatgagcctgataagtgacaatgctgcccgagtcctccccatcatgttccctgcactctacaggaactccaagagccactggaacaagacaatccatggactgatctataatgccctgaagttgtttatggaaatgaatcagaagctgtttgatgactgcacacaacaatacaaggcagagaagcagaagggccggttccgaatgaaggaaagggaagagatgtggcaaaaaatcgaggagctggcccggcttaatccccagtatcccatgttccgagcccctccaccactgccccctgtgtactcgatggagacagagacccccacagctgaggacatccagcttctgaagaggactgtggagactgaggctgttcagatgctaaaagacatcaagaaggagaaagtgctgctgcggaggaagtcggagctgccccaggacgtgtacaccatcaaggcactggaggcgcacaagcgggcggaagagttcctaactgccagccaggaggctctctgacccctcacgttcctaccacagggccacagcccacacagccctgggacactgccctggccctccatactctgctccctactggctgtcttgggggaaggcagcgcctctctagctactcaagggagggggatgtgggcacttgaagcagggacacccacagaatggtccctcttctccccaaaaggtgttcatgcctccctgtggctagtacaggctgagcactaagatgcttagtgctcagacaacctggggatgcctgtcccctacctgctcctcacccacagctacctgaggctgctctgagaagtacacacaggaatacatacgctcctctattcttcccttcatcctcatttgaacgccaggtatctcccctcctctctctcccctgcagaggcatgtagggaacagcaggagattattctcaccaaagttatgtcaagccccattggtcccagagtagctgaagggaagccaacccccctgcagcacaaataggccccccagtcccagccgtgtgctggcagatagggttgtattatttcttcttaccccatgcctgaccaagggaggtcaaaaggagaaaagtataggctgtggacaataactgatgaatatagggcccagatggaccaagtggggccggggagggatgaataaacaccctaccccgtgccctgtctttggtgagcagcagccctggggtcacagacatggaagggaccaccctggggctgactgcttttctgtgctgttggttcccaaaactagaaagaaggaagcagggagcggtgccccaagcatggctcctgccaacacctatttatttccttgtttgtgctatgctgggcaggccttctcttgtcccttataggtaccttggaggggccaggggctgaggaaggccggacccaggttccaggggcgcaggcagtgcggcttttggctgtgtacatagggtgctttattctccacagagtgatacatgctaaggtgggttgggcttggaccgatgtccccatatgtacagaactgaataaagtgggtctctgagaagtctgatgtgccttgatgtggaaagggagacggggaagatggaaatggacattacaaccagggatgtgttcagtcctgtgctggttctggcctggaatgtaggaatataaggcagctctcactgtggtcacttccaggcaggggatgcctgccgggcttggagggctttctgtaccacatcttcccactgggcatccgatatctcccgagcccaggcaggaacccctggcgcaggcaggcttactccagccattgtccttttcaccagctctacatgttctgggtccatggnaatanagctgnggttgttcaannctgnagctccctccncatctacatcttcattttctaatggtgagtcctccaaaagaaaccccaggggctgggactccatcctggaagacaacaaatacatctcccccccccccggcggggcaagatccac

SEQ ID NO: 349769 - DNA, 3644 bp, Homo sapiens
gcgcaggcaccgctcgacccgggcgcagcgcgcaggcggtggcgaagagacgccgagcgggccgagtgcggccgagcaaagccggagccggagcggggccgcaggagacgggccgggtccggacgggccgagatgccctataaactgaaaaaggagaaggagccccccaaggttgccaaatgcacagccaagcctagcagctcgggcaaggatggtggaggcgagaacactgaggaggcccagccgcagccccagccccagccccagccccaagcccagtctcagccaccgtcatccaacaagcgtcccagcaatagcacgccgccccccacgcagctcagcaaaatcaagtactcaggggggccccagattgtcaagaaggagcgacggcaaagctcctcccgcttcaacctcagcaagaatcgggagctgcagaagcttcctgccctgaaagattcgccaacccaggagcgggaggagctgtttatccagaagctacgccagtgctgtgtcctctttgacttcgtgtcagacccactcagtgacctcaaattcaaggaggtgaagcgggcaggactcaacgagatggtggagtacatcacccatagccgtgatgttgtcactgaggccatttaccctgaggctgtcaccatgttttcagtgaacctcttccggacgctgccaccttcatcgaatcccacaggggctgagtttgacccagaggaagatgagcccaccctggaagctgcttggccacatctccagctcgtgtatgagttcttcttacgtttccttgagtctcctgatttccagccaaacatagccaagaagtacatcgaccagaagtttgtacttgctctcctagacctatttgacagtgaggatcctcgagagcgggacttcctcaagaccattttgcatcgcatctatggcaagtttttggggctccgggcttatatccgtaggcagatcaaccacatcttctacaggttcatctacgagacggagcatcacaacgggattgctgagctcctggagatcctgggcagcatcatcaatggctttgccctgccccttaaagaagagcacaagatgttcctcatccgtgtcctacttccccttcacaaggtcaagtccctgagtgtctaccaccctcagctggcatactgtgtggtacaattcctggagaaggagagcagtctgactgagccggtaattgtgggacttctcaagttttggcccaagacccacagccccaaggaggtgatgttcttgaatgagctggaggagattctggacgtcattgaaccttctgagttcagcaaagtgatggaacccctcttccgccagctggccaagtgtgtctctagcccccatttccaggtggcagagcgtgctctctattactggaacaatgagtacatcatgagcctgataagtgacaatgctgcccgagtcctccccatcatgttccctgcactctacaggaactccaagagccactggaacaagacaatccatggactgatctataatgccctgaagttgtttatggaaatgaatcagaagctgtttgatgactgcacacaacaatacaaggcagagaagcagaagggccggttccgaatgaaggaaagggaagagatgtggcaaaaaatcgaggagctggcccggcttaatccccagtatcccatgttccgagcccctccaccactgccccctgtgtactcgatggagacagagacccccacagctgaggacatccagcttctgaagaggactgtggagactgaggctgttcagatgctaaaagacatcaagaaggagaaagtgctgctgcggaggaagtcggagctgccccaggacgtgtacaccatcaaggcactggaggcgcacaagcgggcggaagagttcctaactgccagccaggaggctctctgacccctcacgttcctaccacagggccacagcccacacagccctgggacactgccctggccctccatactctgctccctactggctgtcttgggggaaggcagcgcctctctagctactcaagggagggggatgtgggcacttgaagcagggacacccacagaatggtccctcttctccccaaaaggtgttcatgcctccctgtggctagtacaggctgagcactaagatgcttagtgctcagacaacctggggatgcctgtcccctacctgctcctcacccacagctacctgaggctgctctgagaagtacacacaggaatacatacgctcctctattcttcccttcatcctcatttgaacgccaggtatctcccctcctctctctcccctgcagaggcatgtagggaacagcaggagattattctcaccaaagttatgtcaagccccattggtcccagagtagctgaagggaagccaacccccctgcagcacaaataggccccccagtcccagccgtgtgctggcagatagggttgtattatttcttcttaccccatgcctgaccaagggaggtcaaaaggagaaaagtataggctgtggacaataactgatgaatatagggcccagatggaccaagtggggccggggagggatgaataaacaccctaccccgtgccctgtctttggtgagcagcagccctggggtcacagacatggaagggaccaccctggggctgactgcttttctgtgctgttggttcccaaaactagaaagaaggaagcagggagcggtgccccaagcatggctcctgccaacacctatttatttccttgtttgtgctatgctgggcaggccttctcttgtcccttataggtaccttggaggggccaggggctgaggaaggccggacccaggttccaggggcgcaggcagtgcggcttttggctgtgtacatagggtgctttattctccacagagtgatacatgctaaggtgggttgggcttggaccgatgtccccatatgtacagaactgaataaagtgggtctctgagaaaaaaaaaaaaacaaaaaaaaaaaaaacaaaaacaaaaaaaacaaaaaaatccgggggttttttgtgtgcggggggcggagaaaaagagaggcgtaagaagaagaggggcccgagtgggcccaaagcgtgtgtttctcgtggaacccaattttttttgtgtacaccagagggggaaaattcgcgcgcgggtcccccttattatggggaggcagcgctatatatatttcttcgcgcaaaaggccgcgggtgtataacccgcggctcttatatatggttatctttctgcgcacacagccgggaaaaacataaaaaaaaccagaacaggcagagggaacaaaaaaaggaggaggtaaacacaaggagatggagggaaaaaaagaggagcgggggcggaaagagaaaagagcaaaaagccagcaacacggaggaccagagaaagataaacacgaggagaaggaggccagaataaagaaattgaaataaaaacaagcgaaaagagacaaaacatcaaaaatgtacaaaaatatatacatcatcacacctctgtatcattctatacctcattaaacatcctcagacaactaaccaaacacacacaaaggaacagtaaaaaagaaaaacaatgaggcaaactacagaaaagaaaa

SEQ ID NO: 349770 - DNA, 3346 bp, Homo sapiens
gcgcaggcaccgctcgacccgggcgcagcgcgcaggcggtggcgaagagacgccgagcgggccgagtgcggccgagcaaagccggagccggagcggggccgcaggagacgggccgggtccggacgggccgagatgccctataaactgaaaaaggagaaggagccccccaaggttgccaaatgcacagccaagcctagcagctcgggcaaggatggtggaggcgagaacactgaggaggcccagccgcagccccagccccagccccagccccaagcccagtctcagccaccgtcatccaacaagcgtcccagcaatagcacgccgccccccacgcagctcagcaaaatcaagtactcaggggggccccagattgtcaagaaggagcgacggcaaagctcctcccgcttcaacctcagcaagaatcgggagctgcagaagcttcctgccctgaaagattcgccaacccaggagcgggaggagctgtttatccagaagctacgccagtgctgtgtcctctttgacttcgtgtcagacccactcagtgacctcaaattcaaggaggtgaagcgggcaggactcaacgagatggtggagtacatcacccatagccgtgatgttgtcactgaggccatttaccctgaggctgtcaccatgttttcagtgaacctcttccggacgctgccaccttcatcgaatcccacaggggctgagtttgacccagaggaagatgagcccaccctggaagctgcttggccacatctccagctcgtgtatgagttcttcttacgtttccttgagtctcctgatttccagccaaacatagccaagaagtacatcgaccagaagtttgtacttgctctcctagacctatttgacagtgaggatcctcgagagcgggacttcctcaagaccattttgcatcgcatctatggcaagtttttggggctccgggcttatatccgtaggcagatcaaccacatcttctacaggttcatctacgagacggagcatcacaacgggattgctgagctcctggagatcctgggcagcatcatcaatggctttgccctgccccttaaagaagagcacaagatgttcctcatccgtgtcctacttccccttcacaaggtcaagtccctgagtgtctaccaccctcagctggcatactgtgtggtacaattcctggagaaggagagcagtctgactgagccggtaattgtgggacttctcaagttttggcccaagacccacagccccaaggaggtgatgttcttgaatgagctggaggagattctggacgtcattgaaccttctgagttcagcaaagtgatggaacccctcttccgccagctggccaagtgtgtctctagcccccatttccaggtggcagagcgtgctctctattactggaacaatgagtacatcatgagcctgataagtgacaatgctgcccgagtcctccccatcatgttccctgcactctacaggaactccaagagccactggaacaagacaatccatggactgatctataatgccctgaagttgtttatggaaatgaatcagaagctgtttgatgactgcacacaacaatacaaggcagagaagcagaagggccggttccgaatgaaggaaagggaagagatgtggcaaaaaatcgaggagctggcccggcttaatccccagtatcccatgttccgagcccctccaccactgccccctgtgtactcgatggagacagagacccccacagctgaggacatccagcttctgaagaggactgtggagactgaggctgttcagatgctaaaagacatcaagaaggagaaagtgctgctgcggaggaagtcggagctgccccaggacgtgtacaccatcaaggcactggaggcgcacaagcgggcggaagagttcctaactgccagccaggaggctctctgacccctcacgttcctaccacagggccacagcccacacagccctgggacactgccctggccctccatactctgctccctactggctgtcttgggggaaggcagcgcctctctagctactcaagggagggggatgtgggcacttgaagcagggacacccacagaatggtccctcttctccccaaaaggtgttcatgcctccctgtggctagtacaggctgagcactaagatgcttagtgctcagacaacctggggatgcctgtcccctacctgctcctcacccacagctacctgaggctgctctgagaagtacacacaggaatacatacgctcctctattcttcccttcatcctcatttgaacgccaggtatctcccctcctctctctcccctgcagaggcatgtagggaacagcaggagattattctcaccaaagttatgtcaagccccattggtcccagagtagctgaagggaagccaacccccctgcagcacaaataggccccccagtcccagccgtgtgctggcagatagggttgtattatttcttcttaccccatgcctgaccaagggaggtcaaaaggagaaaagtataggctgtggacaataactgatgaatatagggcccagatggaccaagtggggccggggagggatgaataaacaccctaccccgtgccctgtctttggtgagcagcagccctggggtcacagacatggaagggaccaccctggggctgactgcttttctgtgctgttggttcccaaaactagaaagaaggaagcagggagcggtgccccaagcatggctcctgccaacacctatttatttccttgtttgtgctatgctgggcaggccttctcttgtcccttataggtaccttggaggggccaggggctgaggaaggccggacccaggttccaggggcgcaggcagtgcggcttttggctgtgtacatagggtgctttattctccacagagtgatacatgctaaggtgggttgggcttggaccgatgtccccatatgtacagaactgaataaagtgggtctctgagaaaaaaaaaaaaacaaaaaaaaaaaaaaaagggggggggggtaaaaaatttccctgggggggcccaagtttagggttacccggtttttttgtaaaggggggccctaaaagggaagccgaattaaaaaagagaagggaaaggggacgcggcggttttaaaaacgtcggtgagtgggggacaatggtctacgtggggattgtgtggagcgaactgctatttgctgggggggtggcatattggggaattactcagggaatttgaggatcaggggaactttcacaatttcagtgtttagtggtgaaccagccgcatttgctggcgtgagaaatttgtgacgagatgtttggaata

SEQ ID NO: 349771 - DNA, 3341 bp, Homo sapiens
gcgcaggcaccgctcgacccgggcgcagcgcgcaggcggtggcgaagagacgccgagcgggccgagtgcggccgagcaaagccggagccggagcggggccgcaggagacgggccgggtccggacgggccgagatgccctataaactgaaaaaggagaaggagccccccaaggttgccaaatgcacagccaagcctagcagctcgggcaaggatggtggaggcgagaacactgaggaggcccagccgcagccccagccccagccccagccccaagcccagtctcagccaccgtcatccaacaagcgtcccagcaatagcacgccgccccccacgcagctcagcaaaatcaagtactcaggggggccccagattgtcaagaaggagcgacggcaaagctcctcccgcttcaacctcagcaagaatcgggagctgcagaagcttcctgccctgaaagattcgccaacccaggagcgggaggagctgtttatccagaagctacgccagtgctgtgtcctctttgacttcgtgtcagacccactcagtgacctcaaattcaaggaggtgaagcgggcaggactcaacgagatggtggagtacatcacccatagccgtgatgttgtcactgaggccatttaccctgaggctgtcaccatgttttcagtgaacctcttccggacgctgccaccttcatcgaatcccacaggggctgagtttgacccagaggaagatgagcccaccctggaagctgcttggccacatctccagctcgtgtatgagttcttcttacgtttccttgagtctcctgatttccagccaaacatagccaagaagtacatcgaccagaagtttgtacttgctctcctagacctatttgacagtgaggatcctcgagagcgggacttcctcaagaccattttgcatcgcatctatggcaagtttttggggctccgggcttatatccgtaggcagatcaaccacatcttctacaggttcatctacgagacggagcatcacaacgggattgctgagctcctggagatcctgggcagcatcatcaatggctttgccctgccccttaaagaagagcacaagatgttcctcatccgtgtcctacttccccttcacaaggtcaagtccctgagtgtctaccaccctcagctggcatactgtgtggtacaattcctggagaaggagagcagtctgactgagccggtaattgtgggacttctcaagttttggcccaagacccacagccccaaggaggtgatgttcttgaatgagctggaggagattctggacgtcattgaaccttctgagttcagcaaagtgatggaacccctcttccgccagctggccaagtgtgtctctagcccccatttccaggtggcagagcgtgctctctattactggaacaatgagtacatcatgagcctgataagtgacaatgctgcccgagtcctccccatcatgttccctgcactctacaggaactccaagagccactggaacaagacaatccatggactgatctataatgccctgaagttgtttatggaaatgaatcagaagctgtttgatgactgcacacaacaatacaaggcagagaagcagaagggccggttccgaatgaaggaaagggaagagatgtggcaaaaaatcgaggagctggcccggcttaatccccagtatcccatgttccgagcccctccaccactgccccctgtgtactcgatggagacagagacccccacagctgaggacatccagcttctgaagaggactgtggagactgaggctgttcagatgctaaaagacatcaagaaggagaaagtgctgctgcggaggaagtcggagctgccccaggacgtgtacaccatcaaggcactggaggcgcacaagcgggcggaagagttcctaactgccagccaggaggctctctgacccctcacgttcctaccacagggccacagcccacacagccctgggacactgccctggccctccatactctgctccctactggctgtcttgggggaaggcagcgcctctctagctactcaagggagggggatgtgggcacttgaagcagggacacccacagaatggtccctcttctccccaaaaggtgttcatgcctccctgtggctagtacaggctgagcactaagatgcttagtgctcagacaacctggggatgcctgtcccctacctgctcctcacccacagctacctgaggctgctctgagaagtacacacaggaatacatacgctcctctattcttcccttcatcctcatttgaacgccaggtatctcccctcctctctctcccctgcagaggcatgtagggaacagcaggagattattctcaccaaagttatgtcaagccccattggtcccagagtagctgaagggaagccaacccccctgcagcacaaataggccccccagtcccagccgtgtgctggcagatagggttgtattatttcttcttaccccatgcctgaccaagggaggtcaaaaggagaaaagtataggctgtggacaataactgatgaatatagggcccagatggaccaagtggggccggggagggatgaataaacaccctaccccgtgccctgtctttggtgagcagcagccctggggtcacagacatggaagggaccaccctggggctgactgcttttctgtgctgttggttcccaaaactagaaagaaggaagcagggagcggtgccccaagcatggctcctgccaacacctatttatttccttgtttgtgctatgctgggcaggccttctcttgtcccttataggtaccttggaggggccaggggctgaggaaggccggacccaggttccaggggcgcaggcagtgcggcttttggctgtgtacatagggtgctttattctccacagagtgatacatgctaaggtgggttgggcttggaccgatgtccccatatgtacagaactgaataaagtgggtctctgagaagtctgatgtgccttgatgtggaaagggagacggggaagatggaaatggacattacaaccagggatgtgttcagtcctgtgctggttctggcctggaatgtaggaatataaggcagctctcactgtggtcacttccaggcaggggatgcctgccgggcttggagggctttctgtaccacatcttcccactgggcatccgatatctcccgagcccagggccttctgaagggccctgatgtcccagttcctcagtctgattggggaagatacgctcagggcccatggtgtctcctcctagaactactgttgccatccgggcaggggccgctcagagcccgggaggcg

SEQ ID NO: 349772 - DNA, 3513 bp, Homo sapiens
gcgcaggcaccgctcgacccgggcgcagcgcgcaggcggtggcgaagagacgccgagcgggccgagtgcggccgagcaaagccggagccggagcggggccgcaggagacgggccgggtccggacgggccgagatgccctataaactgaaaaaggagaaggagccccccaaggttgccaaatgcacagccaagcctagcagctcgggcaaggatggtggaggcgagaacactgaggaggcccagccgcagccccagccccagccccagccccaagcccagtctcagccaccgtcatccaacaagcgtcccagcaatagcacgccgccccccacgcagctcagcaaaatcaagtactcaggggggccccagattgtcaagaaggagcgacggcaaagctcctcccgcttcaacctcagcaagaatcgggagctgcagaagcttcctgccctgaaagattcgccaacccaggagcgggaggagctgtttatccagaagctacgccagtgctgtgtcctctttgacttcgtgtcagacccactcagtgacctcaaattcaaggaggtgaagcgggcaggactcaacgagatggtggagtacatcacccatagccgtgatgttgtcactgaggccatttaccctgaggctgtcaccatgttttcagtgaacctcttccggacgctgccaccttcatcgaatcccacaggggctgagtttgacccagaggaagatgagcccaccctggaagctgcttggccacatctccagctcgtgtatgagttcttcttacgtttccttgagtctcctgatttccagccaaacatagccaagaagtacatcgaccagaagtttgtacttgctctcctagacctatttgacagtgaggatcctcgagagcgggacttcctcaagaccattttgcatcgcatctatggcaagtttttggggctccgggcttatatccgtaggcagatcaaccacatcttctacaggttcatctacgagacggagcatcacaacgggattgctgagctcctggagatcctgggcagcatcatcaatggctttgccctgccccttaaagaagagcacaagatgttcctcatccgtgtcctacttccccttcacaaggtcaagtccctgagtgtctaccaccctcagctggcatactgtgtggtacaattcctggagaaggagagcagtctgactgagccggtaattgtgggacttctcaagttttggcccaagacccacagccccaaggaggtgatgttcttgaatgagctggaggagattctggacgtcattgaaccttctgagttcagcaaagtgatggaacccctcttccgccagctggccaagtgtgtctctagcccccatttccaggtggcagagcgtgctctctattactggaacaatgagtacatcatgagcctgataagtgacaatgctgcccgagtcctccccatcatgttccctgcactctacaggaactccaagagccactggaacaagacaatccatggactgatctataatgccctgaagttgtttatggaaatgaatcagaagctgtttgatgactgcacacaacaatacaaggcagagaagcagaagggccggttccgaatgaaggaaagggaagagatgtggcaaaaaatcgaggagctggcccggcttaatccccagtatcccatgttccgagcccctccaccactgccccctgtgtactcgatggagacagagacccccacagctgaggacatccagcttctgaagaggactgtggagactgaggctgttcagatgctaaaagacatcaagaaggagaaagtgctgctgcggaggaagtcggagctgccccaggacgtgtacaccatcaaggcactggaggcgcacaagcgggcggaagagttcctaactgccagccaggaggctctctgacccctcacgttcctaccacagggccacagcccacacagccctgggacactgccctggccctccatactctgctccctactggctgtcttgggggaaggcagcgcctctctagctactcaagggagggggatgtgggcacttgaagcagggacacccacagaatggtccctcttctccccaaaaggtgttcatgcctccctgtggctagtacaggctgagcactaagatgcttagtgctcagacaacctggggatgcctgtcccctacctgctcctcacccacagctacctgaggctgctctgagaagtacacacaggaatacatacgctcctctattcttcccttcatcctcatttgaacgccaggtatctcccctcctctctctcccctgcagaggcatgtagggaacagcaggagattattctcaccaaagttatgtcaagccccattggtcccagagtagctgaagggaagccaacccccctgcagcacaaataggccccccagtcccagccgtgtgctggcagatagggttgtattatttcttcttaccccatgcctgaccaagggaggtcaaaaggagaaaagtataggctgtggacaataactgatgaatatagggcccagatggaccaagtggggccggggagggatgaataaacaccctaccccgtgccctgtctttggtgagcagcagccctggggtcacagacatggaagggaccaccctggggctgactgcttttctgtgctgttggttcccaaaactagaaagaaggaagcagggagcggtgccccaagcatggctcctgccaacacctatttatttccttgtttgtgctatgctgggcaggccttctcttgtcccttataggtaccttggaggggccaggggctgaggaaggccggacccaggttccaggggcgcaggcagtgcggcttttggctgtgtacatagggtgctttattctccacagagtgatacatgctaaggtgggttgggcttggaccgatgtccccatatgtacagaactgaataaagtgggtctctgagaagtctgatgtgccttgatgtggaaagggagacggggaagatggaaatggacattacaaccagggatgtgttcagtcctgtgctggttctggcctggaatgtaggaatattttacctgggtcccatgggaatagagctgtggttgttcaacagctgtagctccctcctcatcttcatcttcactctctaatggtgggtctggcaaatgaagccccagggccctggattcgatcctggatgtcagcaactacatctccatcccccactggtgcccagttccacctcctcttgttcaggatcttggttcaggggctggtaggagtagccagctgggcccgaccccgtttcctcctgctcttcctcaggctcctcactgctccaatccccagtgccttctgaagggccctgatgtcccagttcctcagtctgattggggaagatacgctcagggcccatggtgtctcctcctagaactactgttgccatccgggcaggggccgctcagagcccgggaggcg

SEQ ID NO: 349773 - DNA, 3428 bp, Homo sapiens
gcgcaggcaccgctcgacccgggcgcagcgcgcaggcggtggcgaagagacgccgagcgggccgagtgcggccgagcaaagccggagccggagcggggccgcaggagacgggccgggtccggacgggccgagatgccctataaactgaaaaaggagaaggagccccccaaggttgccaaatgcacagccaagcctagcagctcgggcaaggatggtggaggcgagaacactgaggaggcccagccgcagccccagccccagccccagccccaagcccagtctcagccaccgtcatccaacaagcgtcccagcaatagcacgccgccccccacgcagctcagcaaaatcaagtactcaggggggccccagattgtcaagaaggagcgacggcaaagctcctcccgcttcaacctcagcaagaatcgggagctgcagaagcttcctgccctgaaagattcgccaacccaggagcgggaggagctgtttatccagaagctacgccagtgctgtgtcctctttgacttcgtgtcagacccactcagtgacctcaaattcaaggaggtgaagcgggcaggactcaacgagatggtggagtacatcacccatagccgtgatgttgtcactgaggccatttaccctgaggctgtcaccatgttttcagtgaacctcttccggacgctgccaccttcatcgaatcccacaggggctgagtttgacccagaggaagatgagcccaccctggaagctgcttggccacatctccagctcgtgtatgagttcttcttacgtttccttgagtctcctgatttccagccaaacatagccaagaagtacatcgaccagaagtttgtacttgctctcctagacctatttgacagtgaggatcctcgagagcgggacttcctcaagaccattttgcatcgcatctatggcaagtttttggggctccgggcttatatccgtaggcagatcaaccacatcttctacaggttcatctacgagacggagcatcacaacgggattgctgagctcctggagatcctgggcagcatcatcaatggctttgccctgccccttaaagaagagcacaagatgttcctcatccgtgtcctacttccccttcacaaggtcaagtccctgagtgtctaccaccctcagctggcatactgtgtggtacaattcctggagaaggagagcagtctgactgagccggtaattgtgggacttctcaagttttggcccaagacccacagccccaaggaggtgatgttcttgaatgagctggaggagattctggacgtcattgaaccttctgagttcagcaaagtgatggaacccctcttccgccagctggccaagtgtgtctctagcccccatttccaggtggcagagcgtgctctctattactggaacaatgagtacatcatgagcctgataagtgacaatgctgcccgagtcctccccatcatgttccctgcactctacaggaactccaagagccactggaacaagacaatccatggactgatctataatgccctgaagttgtttatggaaatgaatcagaagctgtttgatgactgcacacaacaatacaaggcagagaagcagaagggccggttccgaatgaaggaaagggaagagatgtggcaaaaaatcgaggagctggcccggcttaatccccagtatcccatgttccgagcccctccaccactgccccctgtgtactcgatggagacagagacccccacagctgaggacatccagcttctgaagaggactgtggagactgaggctgttcagatgctaaaagacatcaagaaggagaaagtgctgctgcggaggaagtcggagctgccccaggacgtgtacaccatcaaggcactggaggcgcacaagcgggcggaagagttcctaactgccagccaggaggctctctgacccctcacgttcctaccacagggccacagcccacacagccctgggacactgccctggccctccatactctgctccctactggctgtcttgggggaaggcagcgcctctctagctactcaagggagggggatgtgggcacttgaagcagggacacccacagaatggtccctcttctccccaaaaggtgttcatgcctccctgtggctagtacaggctgagcactaagatgcttagtgctcagacaacctggggatgcctgtcccctacctgctcctcacccacagctacctgaggctgctctgagaagtacacacaggaatacatacgctcctctattcttcccttcatcctcatttgaacgccaggtatctcccctcctctctctcccctgcagaggcatgtagggaacagcaggagattattctcaccaaagttatgtcaagccccattggtcccagagtagctgaagggaagccaacccccctgcagcacaaataggccccccagtcccagccgtgtgctggcagatagggttgtattatttcttcttaccccatgcctgaccaagggaggtcaaaaggagaaaagtataggctgtggacaataactgatgaatatagggcccagatggaccaagtggggccggggagggatgaataaacaccctaccccgtgccctgtctttggtgagcagcagccctggggtcacagacatggaagggaccaccctggggctgactgcttttctgtgctgttggttcccaaaactagaaagaaggaagcagggagcggtgccccaagcatggctcctgccaacacctatttatttccttgtttgtgctatgctgggcaggccttctcttgtcccttataggtaccttggaggggccaggggctgaggaaggccggacccaggttccaggggcgcaggcagtgcggcttttggctgtgtacatagggtgctttattctccacagagtgatacatgctaaggtgggttgggcttggaccgatgtccccatatgtacagaactgaataaagtgggtctctgagaagtctgatgtgccttgatgtggaaagggagacggggaagatggaaatggacattacaaccagggatgtgttcagtcctgtgctggttctggcctggaatgtaggaatataaggcagctctcactgtggtcacttcctggattcgatcctggatgtcagcaactacatctccatcccccactggtgcccagttccacctcctcttgttcaggatcttggttcaggggctggtaggagtagccagctgggcccgaccccgtttcctcctgctcttcctcaggctcctcactgctccaatccccagtgccttctgaagggccctgatgtcccagttcctcagtctgattggggaagatacgctcagggcccatggtgtctcctcctagaactactgttgccatccgggcaggggccgctcagagcccgggaggcg

SEQ ID NO: 349774 - DNA, 2943 bp, Homo sapiens
gcgcaggcaccgctcgacccgggcgcagcgcgcaggcggtggcgaagagacgccgagcgggccgagtgcggccgagcaaagccggagccggagcggggccgcaggagacgggccgggtccggacgggccgagatgccctataaactgaaaaaggagaaggagccccccaaggttgccaaatgcacagccaagcctagcagctcgggcaaggatggtggaggcgagaacactgaggaggcccagccgcagccccagccccagccccagccccaagcccagtctcagccaccgtcatccaacaagcgtcccagcaatagcacgccgccccccacgcagctcagcaaaatcaagtactcaggggggccccagattgtcaagaaggagcgacggcaaagctcctcccgcttcaacctcagcaagaatcgggagctgcagaagcttcctgccctgaaagattcgccaacccaggagcgggaggagctgtttatccagaagctacgccagtgctgtgtcctctttgacttcgtgtcagacccactcagtgacctcaaattcaaggaggtgaagcgggcaggactcaacgagatggtggagtacatcacccatagccgtgatgttgtcactgaggccatttaccctgaggctgtcaccatgttttcagtgaacctcttccggacgctgccaccttcatcgaatcccacaggggctgagtttgacccagaggaagatgagcccaccctggaagctgcttggccacatctccagctcgtgtatgagttcttcttacgtttccttgagtctcctgatttccagccaaacatagccaagaagtacatcgaccagaagtttgtacttgctctcctagacctatttgacagtgaggatcctcgagagcgggacttcctcaagaccattttgcatcgcatctatggcaagtttttggggctccgggcttatatccgtaggcagatcaaccacatcttctacaggttcatctacgagacggagcatcacaacgggattgctgagctcctggagatcctgggcagcatcatcaatggctttgccctgccccttaaagaagagcacaagatgttcctcatccgtgtcctacttccccttcacaaggtcaagtccctgagtgtctaccaccctcaggtaattgtgggacttctcaagttttggcccaagacccacagccccaaggaggtgatgttcttgaatgagctggaggagattctggacgtcattgaaccttctgagttcagcaaagtgatggaacccctcttccgccagctggccaagtgtgtctctagcccccatttccaggtggcagagcgtgctctctattactggaacaatgagtacatcatgagcctgataagtgacaatgctgcccgagtcctccccatcatgttccctgcactctacaggaactccaagagccactggaacaagacaatccatggactgatctataatgccctgaagttgtttatggaaatgaatcagaagctgtttgatgactgcacacaacaatacaaggcagagaagcagaagggccggttccgaatgaaggaaagggaagagatgtggcaaaaaatcgaggagctggcccggcttaatccccagtatcccatgttccgagcccctccaccactgccccctgtgtactcgatggagacagagacccccacagctgaggacatccagcttctgaagaggactgtggagactgaggctgttcagatgctaaaagacatcaagaaggagaaagtgctgctgcggaggaagtcggagctgccccaggacgtgtacaccatcaaggcactggaggcgcacaagcgggcggaagagttcctaactgccagccaggaggctctctgacccctcacgttcctaccacagggccacagcccacacagccctgggacactgccctggccctccatactctgctccctactggctgtcttgggggaaggcagcgcctctctagctactcaagggagggggatgtgggcacttgaagcagggacacccacagaatggtccctcttctccccaaaaggtgttcatgcctccctgtggctagtacaggctgagcactaagatgcttagtgctcagacaacctggggatgcctgtcccctacctgctcctcacccacagctacctgaggctgctctgagaagtacacacaggaatacatacgctcctctattcttcccttcatcctcatttgaacgccaggtatctcccctcctctctctcccctgcagaggcatgtagggaacagcaggagattattctcaccaaagttatgtcaagccccattggtcccagagtagctgaagggaagccaacccccctgcagcacaaataggccccccagtcccagccgtgtgctggcagatagggttgtattatttcttcttaccccatgcctgaccaagggaggtcaaaaggagaaaagtataggctgtggacaataactgatgaatatagggcccagatggaccaagtggggccggggagggatgaataaacaccctaccccgtgccctgtctttggtgagcagcagccctggggtcacagacatggaagggaccaccctggggctgactgcttttctgtgctgttggttcccaaaactagaaagaaggaagcagggagcggtgccccaagcatggctcctgccaacacctatttatttccttgtttgtgctatgctgggcaggccttctcttgtcccttataggtaccttggaggggccaggggctgaggaaggccggacccaggttccaggggcgcaggcagtgcggcttttggctgtgtacatagggtgctttattctccacagagtgatacatgctaaggtgggttgggcttggaccgatgtccccatatgtacagaactgaataaagtgggtctctgagaa

SEQ ID NO: 349775 - DNA, 2811 bp, Homo sapiens
  misc_feature (2795)..(2795): n is a, c, g, or t
gcgcaggcaccgctcgacccgggcgcagcgcgcaggcggtggcgaagagacgccgagcgggccgagtgcggccgagcaaagccggagccggagcggggccgcaggagacgggccgggtccggacgggccgagatgccctataaactgaaaaaggagaaggagccccccaaggttgccaaatgcacagccaagcctagcagctcgggcaaggatggtggaggcgagaacactgaggaggcccagccgcagccccagccccagccccagccccaagcccagtctcagccaccgtcatccaacaagcgtcccagcaatagcacgccgccccccacgcagctcagcaaaatcaagtactcaggggggccccagattgtcaagaaggagcgacggcaaagctcctcccgcttcaacctcagcaagaatcgggagctgcagaagcttcctgccctgaaagattcgccaacccaggagcgggaggagctgtttatccagaagctacgccagtgctgtgtcctctttgacttcgtgtcagacccactcagtgacctcaaattcaaggaggtgaagcgggcaggactcaacgagatggtggagtacatcacccatagccgtgatgttgtcactgaggccatttaccctgaggctgtcaccatgttttcagtgaacctcttccggacgctgccaccttcatcgaatcccacaggggctgagtttgacccagaggaagatgagcccaccctggaagctgcttggccacatctccagctcgtgtatgagttcttcttacgtttccttgagtctcctgatttccagccaaacatagccaagaagtacatcgaccagaagtttgtacttgctctcctagacctatttgacagtgaggatcctcgagagcgggacttcctcaagaccattttgcatcgcatctatggcaagtttttggggctccgggcttatatccgtaggcagatcaaccacatcttctacaggttcatctacgagacggagcatcacaacgggattgctgagctcctggagatcctgggcagcatcatcaatggctttgccctgccccttaaagaagagcacaagatgttcctcatccgtgtcctacttccccttcacaaggtcaagtccctgagtgtctaccaccctcagctggcatactgtgtggtacaattcctggagaaggagagcagtctgactgagccggtaattgtgggacttctcaagttttggcccaagacccacagccccaaggaggtgatgttcttgaatgagctggaggagattctggacgtcattgaaccttctgagttcagcaaagtgatggaacccctcttccgccagctggccaagtgtgtctctagcccccatttccaggtggcagagcgtgctctctattactggaacaatgagtacatcatgagcctgataagtgacaatgctgcccgagtcctccccatcatgttccctgcactctacaggaactccaagagccactggaacaagacaatccatggactgatctataatgccctgaagttgtttatggaaatgaatcagaagctgtttgatgactgcacacaacaatacaaggcagagaagcagaagggccggttccgaatgaaggaaagggaagagatgtggcaaaaaatcgaggagctggcccggcttaatccccagtatcccatgttccgagcccctccaccactgccccctgtgtactcgatggagacagagacccccacagctgaggacatccagcttctgaagaggactgtggagactgaggctgttcagatgctaaaagacatcaagaaggagaaagtgctgctgcggaggaagtcggagctgccccaggacgtgtacaccatcaaggcactggaggcgcacaagcgggcggaagagttcctaactgccagccaggaggctctctgacccctcacgttcctaccacagggccacagcccacacagccctgggacactgccctggccctccatactctgctccctactggctgtcttgggggaaggcagcgcctctctagctactcaagggagggggatgtgggcacttgaagcagggacacccacagaatggtccctcttctccccaaaaggtgttcatgcctccctgtggctagtacaggctgagcactaagatgcttagtgctcagacaacctggggatgcctgtcccctacctgctcctcacccacagctacctgaggctgctctgagaagtacacacaggaatacatacgctcctctattcttcccttcatcctcatttgaacgccaggtatctcccctcctctctctcccctgcagaggcatgtagggaacagcaggagattattctcaccaaagttatgtcaagccccattggtcccagagtagctgaagggaagccaacccccctgcagcacaaataggccccccagtcccagccgtgtgctggcagatagggttgtattatttcttcttaccccatgcctgaccaagggaggtcaaaaggagaaaagtataggctgtggacaataactgatgaatatagggcccagatggaccaagtggggccggggagggatgaataaacaccctaccccgtgccctgtctttggtgagcagcagccctggggtcacagacatggaagggaccaccctggggctgactgcttttctgtgctgttggttcccaaaactagaaagaaggaagcagggagcggtgccccaagcatggctcctgccaacacctatttatttccttgtttgtgctacgctggaatgnattggaccgacactga

SEQ ID NO: 349776 - DNA, 3104 bp, Homo sapiens
gcgcaggcaccgctcgacccgggcgcagcgcgcaggcggtggcgaagagacgccgagcgggccgagtgcggccgagcaaagccggagccggagcggggccgcaggagacgggccgggtccggacgggccgagatgccctataaactgaaaaaggagaaggagccccccaaggttgccaaatgcacagccaagcctagcagctcgggcaaggatggtggaggcgagaacactgaggaggcccagccgcagccccagccccagccccagccccaagcccagtctcagccaccgtcatccaacaagcgtcccagcaatagcacgccgccccccacgcagctcagcaaaatcaagtactcaggggggccccagattgtcaagaaggagcgacggcaaagctcctcccgcttcaacctcagcaagaatcgggagctgcagaagcttcctgccctgaaagattcgccaacccaggagcgggaggagctgtttatccagaagctacgccagtgctgtgtcctctttgacttcgtgtcagacccactcagtgacctcaaattcaaggaggtgaagcgggcaggactcaacgagatggtggagtacatcacccatagccgtgatgttgtcactgaggccatttaccctgaggctgtcaccatgttttcagtgaacctcttccggacgctgccaccttcatcgaatcccacaggggctgagtttgacccagaggaagatgagcccaccctggaagctgcttggccacatctccaggtaccagggcaagggggcagattggccgtggctgcagggagtggggcacttggaggcctgcaagtccttgggaacatcccctcagtggcgtgccttttcccctatagctcgtgtatgagttcttcttacgtttccttgagtctcctgatttccagccaaacatagccaagaagtacatcgaccagaagtttgtacttgctctcctagacctatttgacagtgaggatcctcgagagcgggacttcctcaagaccattttgcatcgcatctatggcaagtttttggggctccgggcttatatccgtaggcagatcaaccacatcttctacaggttcatctacgagacggagcatcacaacgggattgctgagctcctggagatcctgggcagcatcatcaatggctttgccctgccccttaaagaagagcacaagatgttcctcatccgtgtcctacttccccttcacaaggtcaagtccctgagtgtctaccaccctcagctggcatactgtgtggtacaattcctggagaaggagagcagtctgactgagccggtaattgtgggacttctcaagttttggcccaagacccacagccccaaggaggtgatgttcttgaatgagctggaggagattctggacgtcattgaaccttctgagttcagcaaagtgatggaacccctcttccgccagctggccaagtgtgtctctagcccccatttccaggtggcagagcgtgctctctattactggaacaatgagtacatcatgagcctgataagtgacaatgctgcccgagtcctccccatcatgttccctgcactctacaggaactccaagagccactggaacaagacaatccatggactgatctataatgccctgaagttgtttatggaaatgaatcagaagctgtttgatgactgcacacaacaatacaaggcagagaagcagaagggccggttccgaatgaaggaaagggaagagatgtggcaaaaaatcgaggagctggcccggcttaatccccagtatcccatgttccgagcccctccaccactgccccctgtgtactcgatggagacagagacccccacagctgaggacatccagcttctgaagaggactgtggagactgaggctgttcagatgctaaaagacatcaagaaggagaaagtgctgctgcggaggaagtcggagctgccccaggacgtgtacaccatcaaggcactggaggcgcacaagcgggcggaagagttcctaactgccagccaggaggctctctgacccctcacgttcctaccacagggccacagcccacacagccctgggacactgccctggccctccatactctgctccctactggctgtcttgggggaaggcagcgcctctctagctactcaagggagggggatgtgggcacttgaagcagggacacccacagaatggtccctcttctccccaaaaggtgttcatgcctccctgtggctagtacaggctgagcactaagatgcttagtgctcagacaacctggggatgcctgtcccctacctgctcctcacccacagctacctgaggctgctctgagaagtacacacaggaatacatacgctcctctattcttcccttcatcctcatttgaacgccaggtatctcccctcctctctctcccctgcagaggcatgtagggaacagcaggagattattctcaccaaagttatgtcaagccccattggtcccagagtagctgaagggaagccaacccccctgcagcacaaataggccccccagtcccagccgtgtgctggcagatagggttgtattatttcttcttaccccatgcctgaccaagggaggtcaaaaggagaaaagtataggctgtggacaataactgatgaatatagggcccagatggaccaagtggggccggggagggatgaataaacaccctaccccgtgccctgtctttggtgagcagcagccctggggtcacagacatggaagggaccaccctggggctgactgcttttctgtgctgttggttcccaaaactagaaagaaggaagcagggagcggtgccccaagcatggctcctgccaacacctatttatttccttgtttgtgctatgctgggcaggccttctcttgtcccttataggtaccttggaggggccaggggctgaggaaggccggacccaggttccaggggcgcaggcagtgcggcttttggctgtgtacatagggtgctttattctccacagagtgatacatgctaaggtgggttgggcttggaccgatgtccccatatgtacagaactgaataaagtgggtctctgagaa

SEQ ID NO: 349777 - DNA, 2943 bp, Homo sapiens
gcgcaggcaccgctcgacccgggcgcagcgcgcaggcggtggcgaagagacgccgagcgggccgagtgcggccgagcaaagccggagccggagcggggccgcaggagacgggccgggtccggacgggccgagatgccctataaactgaaaaaggagaaggagccccccaaggttgccaaatgcacagccaagcctagcagctcgggcaaggatggtggaggcgagaacactgaggaggcccagccgcagccccagccccagccccagccccaagcccagtctcagccaccgtcatccaacaagcgtcccagcaatagcacgccgccccccacgcagctcagcaaaatcaagtactcaggggggccccagattgtcaagaaggagcgacggcaaagctcctcccgcttcaacctcagcaagaatcgggagctgcagaagcttcctgccctgaaagattcgccaacccaggagcgggaggagctgtttatccagaagctacgccagtgctgtgtcctctttgacttcgtgtcagacccactcagtgacctcaaattcaaggaggtgaagcgggcaggactcaacgagatggtggagtacatcacccatagccgtgatgttgtcactgaggccatttaccctgaggctgtcaccatgttttcagtgaacctcttccggacgctgccaccttcatcgaatcccacaggggctgagtttgacccagaggaagatgagcccaccctggaagctgcttggccacatctccagctcgtgtatgagttcttcttacgtttccttgagtctcctgatttccagccaaacatagccaagaagtacatcgaccagaagtttgtacttgctctcctagacctatttgacagtgaggatcctcgagagcgggacttcctcaagaccattttgcatcgcatctatggcaagtttttggggctccgggcttatatccgtaggcagatcaaccacatcttctacaggttcatctacgagacggagcatcacaacgggattgctgagctcctggagatcctgggcagcatcatcaatggctttgccctgccccttaaagaagagcacaagatgttcctcatccgtgtcctacttccccttcacaaggtcaagtccctgagtgtctaccaccctcagctggcatactgtgtggtacaattcctggagaaggagagcagtctgactgagccggtaattgtgggacttctcaagttttggcccaagacccacagccccaaggaggtgatgttcttgaatgagctggaggagattctggacgtcattgaaccttctgagttcagcaaagtgatggaacccctcttccgccagctggccaagtgtgtctctagcccccatttccaggtggcagagcgtgctctctattactggaacaatgagtacatcatgagcctgataagtgacaatgctgcccgagtcctccccatcatgttccctgcactctacaggaactccaagagccactggaacaagacaatccatggactgatctataatgccctgaagttgtttatggaaatgaatcagaagctgtttgatgactgcacacaacaatacaaggcagagaagcagaagggccggttccgaatgaaggaaagggaagagatgtggcaaaaaatcgaggagctggcccggcttaatccccagtatcccatgttccgagcccctccaccactgccccctgtgtactcgatggagacagagacccccacagctgaggacatccagcttctgaagaggactgtggagactgaggctgttcagatgctaaaagacatcaagaaggagaaagtgctgctgcggaggaagtcggagctgccccaggacgtgtacaccatcaaggcactggaggcgcacaagcgggcggaagagttcctaactgccagccaggaggctctctgacccctcacgttcctaccacagggccacagcccacacagccctgggacactgccctggccctccatactctgctccctactggctgtcttgggggaaggcagcgcctctctagctactcaagggagggggatgtgggcacttgaagcagggacacccacagaatggtccctcttctccccgtgctcagacaacctggggatgcctgtcccctacctgctcctcacccacagctacctgaggctgctctgagaagtacacacaggaatacatacgctcctctattcttcccttcatcctcatttgaacgccaggtatctcccctcctctctctcccctgcagaggcatgtagggaacagcaggagattattctcaccaaagttatgtcaagccccattggtcccagagtagctgaagggaagccaacccccctgcagcacaaataggccccccagtcccagccgtgtgctggcagatagggttgtattatttcttcttaccccatgcctgaccaagggaggtcaaaaggagaaaagtataggctgtggacaataactgatgaatatagggcccagatggaccaagtggggccggggagggatgaataaacaccctaccccgtgccctgtctttggtgagcagcagccctggggtcacagacatggaagggaccaccctggggctgactgcttttctgtgctgttggttcccaaaactagaaagaaggaagcagggagcggtgccccaagcatggctcctgccaacacctatttatttccttgtttgtgctatgctgggcaggccttctcttgtcccttataggtaccttggaggggccaggggctgaggaaggccggacccaggttccaggggcgcaggcagtgcggcttttggctgtgtacatagggtgctttattctccacagagtgatacatgctaaggtgggttgggcttggaccgatgtccccatatgtacagaactgaataaagtgggtctctgagaa

SEQ ID NO: 349778 - DNA, 2735 bp, Homo sapiens
ccttcaatgtgaagctaatatctcctatagcatagttaatgtttattcaacaaatattcatgcagcggagtcaagaacacaccacgatggcggagaaaggaagagacgccgagcgggccgagtgcggccgagcaaagccggagccggagcggggccgcaggagacgggccgggtccggacgggccgagatgccctataaactgaaaaaggagaaggagctgtttatccagaagctacgccagtgctgtgtcctctttgacttcgtgtcagacccactcagtgacctcaaattcaaggaggtgaagcgggcaggactcaacgagatggtggagtacatcacccatagccgtgatgttgtcactgaggccatttaccctgaggctgtcaccatgttttcagtgaacctcttccggacgctgccaccttcatcgaatcccacaggggctgagtttgacccagaggaagatgagcccaccctggaagctgcttggccacatctccagctcgtgtatgagttcttcttacgtttccttgagtctcctgatttccagccaaacatagccaagaagtacatcgaccagaagtttgtacttgctctcctagacctatttgacagtgaggatcctcgagagcgggacttcctcaagaccattttgcatcgcatctatggcaagtttttggggctccgggcttatatccgtaggcagatcaaccacatcttctacaggttcatctacgagacggagcatcacaacgggattgctgagctcctggagatcctgggcagcatcatcaatggctttgccctgccccttaaagaagagcacaagatgttcctcatccgtgtcctacttccccttcacaaggtcaagtccctgagtgtctaccaccctcagctggcatactgtgtggtacaattcctggagaaggagagcagtctgactgagccggtaattgtgggacttctcaagttttggcccaagacccacagccccaaggaggtgatgttcttgaatgagctggaggagattctggacgtcattgaaccttctgagttcagcaaagtgatggaacccctcttccgccagctggccaagtgtgtctctagcccccatttccaggtggcagagcgtgctctctattactggaacaatgagtacatcatgagcctgataagtgacaatgctgcccgagtcctccccatcatgttccctgcactctacaggaactccaagagccactggaacaagacaatccatggactgatctataatgccctgaagttgtttatggaaatgaatcagaagctgtttgatgactgcacacaacaatacaaggcagagaagcagaagggccggttccgaatgaaggaaagggaagagatgtggcaaaaaatcgaggagctggcccggcttaatccccagtatcccatgttccgagcccctccaccactgccccctgtgtactcgatggagacagagacccccacagctgaggacatccagcttctgaagaggactgtggagactgaggctgttcagatgctaaaagacatcaagaaggagaaagtgctgctgcggaggaagtcggagctgccccaggacgtgtacaccatcaaggcactggaggcgcacaagcgggcggaagagttcctaactgccagccaggaggctctctgacccctcacgttcctaccacagggccacagcccacacagccctgggacactgccctggccctccatactctgctccctactggctgtcttgggggaaggcagcgcctctctagctactcaagggagggggatgtgggcacttgaagcagggacacccacagaatggtccctcttctccccaaaaggtgttcatgcctccctgtggctagtacaggctgagcactaagatgcttagtgctcagacaacctggggatgcctgtcccctacctgctcctcacccacagctacctgaggctgctctgagaagtacacacaggaatacatacgctcctctattcttcccttcatcctcatttgaacgccaggtatctcccctcctctctctcccctgcagaggcatgtagggaacagcaggagattattctcaccaaagttatgtcaagccccattggtcccagagtagctgaagggaagccaacccccctgcagcacaaataggccccccagtcccagccgtgtgctggcagatagggttgtattatttcttcttaccccatgcctgaccaagggaggtcaaaaggagaaaagtataggctgtggacaataactgatgaatatagggcccagatggaccaagtggggccggggagggatgaataaacaccctaccccgtgccctgtctttggtgagcagcagccctggggtcacagacatggaagggaccaccctggggctgactgcttttctgtgctgttggttcccaaaactagaaagaaggaagcagggagcggtgccccaagcatggctcctgccaacacctatttatttccttgtttgtgctatgctgggcaggccttctcttgtcccttataggtaccttggaggggccaggggctgaggaaggccggacccaggttccaggggcgcaggcagtgcggcttttggctgtgtacatagggtgctttattctccacagagtgatacatgctaaggtgggttgggcttggaccgatgtccccatatgtacagaactgaataaagtgggtctctgagaa

SEQ ID NO: 349779 - DNA, 3189 bp, Homo sapiens
gcgcaggcaccgctcgacccgggcgcagcgcgcaggcggtggcgaagagacgccgagcgggccgagtgcggccgagcaaagccggagccggagcggggccgcaggagacgggccgggtccggacgggccgagatgccctataaactgaaaaaggagaaggagccccccaaggttgccaaatgcacagccaagcctagcagctcgggcaaggatggtggaggcgagaacactgaggaggcccagccgcagccccagccccagccccagccccaagcccagtctcagccaccgtcatccaacaagcgtcccagcaatagcacgccgccccccacgcagctcagcaaaatcaagtactcaggggggccccagattgtcaagaaggagcgacggcaaagctcctcccgcttcaacctcagcaagaatcgggagctgcagaagcttcctgccctgaaagattcgccaacccaggagcgggaggagctgtttatccagaagctacgccagtgctgtgtcctctttgacttcgtgtcagacccactcagtgacctcaaattcaaggaggtgaagcgggcaggactcaacgagatggtggagtacatcacccatagccgtgatgttgtcactgaggccatttaccctgaggctgtcaccatggtgggcacagggaaaggacacaggggggactggtgaggggctctggagaagcccaggtggagctctaactggccctacccctcagttttcagtgaacctcttccggacgctgccaccttcatcgaatcccacaggggctgagtttgacccagaggaagatgagcccaccctggaagctgcttggccacatctccaggtaccagggcaagggggcagattggccgtggctgcagggagtggggcacttggaggcctgcaagtccttgggaacatcccctcagtggcgtgccttttcccctatagctcgtgtatgagttcttcttacgtttccttgagtctcctgatttccagccaaacatagccaagaagtacatcgaccagaagtttgtacttgctctcctagacctatttgacagtgaggatcctcgagagcgggacttcctcaagaccattttgcatcgcatctatggcaagtttttggggctccgggcttatatccgtaggcagatcaaccacatcttctacaggttcatctacgagacggagcatcacaacgggattgctgagctcctggagatcctgggcagcatcatcaatggctttgccctgccccttaaagaagagcacaagatgttcctcatccgtgtcctacttccccttcacaaggtcaagtccctgagtgtctaccaccctcagctggcatactgtgtggtacaattcctggagaaggagagcagtctgactgagccggtaattgtgggacttctcaagttttggcccaagacccacagccccaaggaggtgatgttcttgaatgagctggaggagattctggacgtcattgaaccttctgagttcagcaaagtgatggaacccctcttccgccagctggccaagtgtgtctctagcccccatttccaggtggcagagcgtgctctctattactggaacaatgagtacatcatgagcctgataagtgacaatgctgcccgagtcctccccatcatgttccctgcactctacaggaactccaagagccactggaacaagacaatccatggactgatctataatgccctgaagttgtttatggaaatgaatcagaagctgtttgatgactgcacacaacaatacaaggcagagaagcagaagggccggttccgaatgaaggaaagggaagagatgtggcaaaaaatcgaggagctggcccggcttaatccccagtatcccatgttccgagcccctccaccactgccccctgtgtactcgatggagacagagacccccacagctgaggacatccagcttctgaagaggactgtggagactgaggctgttcagatgctaaaagacatcaagaaggagaaagtgctgctgcggaggaagtcggagctgccccaggacgtgtacaccatcaaggcactggaggcgcacaagcgggcggaagagttcctaactgccagccaggaggctctctgacccctcacgttcctaccacagggccacagcccacacagccctgggacactgccctggccctccatactctgctccctactggctgtcttgggggaaggcagcgcctctctagctactcaagggagggggatgtgggcacttgaagcagggacacccacagaatggtccctcttctccccaaaaggtgttcatgcctccctgtggctagtacaggctgagcactaagatgcttagtgctcagacaacctggggatgcctgtcccctacctgctcctcacccacagctacctgaggctgctctgagaagtacacacaggaatacatacgctcctctattcttcccttcatcctcatttgaacgccaggtatctcccctcctctctctcccctgcagaggcatgtagggaacagcaggagattattctcaccaaagttatgtcaagccccattggtcccagagtagctgaagggaagccaacccccctgcagcacaaataggccccccagtcccagccgtgtgctggcagatagggttgtattatttcttcttaccccatgcctgaccaagggaggtcaaaaggagaaaagtataggctgtggacaataactgatgaatatagggcccagatggaccaagtggggccggggagggatgaataaacaccctaccccgtgccctgtctttggtgagcagcagccctggggtcacagacatggaagggaccaccctggggctgactgcttttctgtgctgttggttcccaaaactagaaagaaggaagcagggagcggtgccccaagcatggctcctgccaacacctatttatttccttgtttgtgctatgctgggcaggccttctcttgtcccttataggtaccttggaggggccaggggctgaggaaggccggacccaggttccaggggcgcaggcagtgcggcttttggctgtgtacatagggtgctttattctccacagagtgatacatgctaaggtgggttgggcttggaccgatgtccccatatgtacagaactgaataaagtgggtctctgagaa

SEQ ID NO: 349780 - DNA, 2024 bp, Homo sapiens
cccttccgggccccaaggcccacctcttactgtcagcatcacttgccagtctgtacctactgggggtgccataagggggaactcaggagggctgtgacctgaccggtaacatggtttcctctctgaaggggaagcaaaacctatatacacctaggaaacagatccaaggcaaagaaacgggtagctggctgagatcacccaaactgtgcccaccagggtgggggagagagcaggtaggggtaattgtgggacttctcaagttttggcccaagacccacagccccaaggaggtgatgttcttgaatgagctggaggagattctggacgtcattgaaccttctgagttcagcaaagtgatggaacccctcttccgccagctggccaagtgtgtctctagcccccatttccaggtggcagagcgtgctctctattactggaacaatgagtacatcatgagcctgataagtgacaatgctgcccgagtcctccccatcatgttccctgcactctacaggaactccaagagccactggaacaagacaatccatggactgatctataatgccctgaagttgtttatggaaatgaatcagaagctgtttgatgactgcacacaacaatacaaggcagagaagcagaagggccggttccgaatgaaggaaagggaagagatgtggcaaaaaatcgaggagctggcccggcttaatccccagtatcccatgttccgagcccctccaccactgccccctgtgtactcgatggagacagagacccccacagctgaggacatccagcttctgaagaggactgtggagactgaggctgttcagatgctaaaagacatcaagaaggagaaagtgctgctgcggaggaagtcggagctgccccaggacgtgtacaccatcaaggcactggaggcgcacaagcgggcggaagagttcctaactgccagccaggaggctctctgacccctcacgttcctaccacagggccacagcccacacagccctgggacactgccctggccctccatactctgctccctactggctgtcttgggggaaggcagcgcctctctagctactcaagggagggggatgtgggcacttgaagcagggacacccacagaatggtccctcttctccccaaaaggtgttcatgcctccctgtggctagtacaggctgagcactaagatgcttagtgctcagacaacctggggatgcctgtcccctacctgctcctcacccacagctacctgaggctgctctgagaagtacacacaggaatacatacgctcctctattcttcccttcatcctcatttgaacgccaggtatctcccctcctctctctcccctgcagaggcatgtagggaacagcaggagattattctcaccaaagttatgtcaagccccattggtcccagagtagctgaagggaagccaacccccctgcagcacaaataggccccccagtcccagccgtgtgctggcagatagggttgtattatttcttcttaccccatgcctgaccaagggaggtcaaaaggagaaaagtataggctgtggacaataactgatgaatatagggcccagatggaccaagtggggccggggagggatgaataaacaccctaccccgtgccctgtctttggtgagcagcagccctggggtcacagacatggaagggaccaccctggggctgactgcttttctgtgctgttggttcccaaaactagaaagaaggaagcagggagcggtgccccaagcatggctcctgccaacacctatttatttccttgtttgtgctatgctgggcaggccttctcttgtcccttataggtaccttggaggggccaggggctgaggaaggccggacccaggttccaggggcgcaggcagtgcggcttttggctgtgtacatagggtgctttattctccacagagtgatacatgctaaggtgggttgggcttggaccgatgtccccatatgtacagaactgaataaagtgggtctctgagaa

SEQ ID NO: 349781 - DNA, 1926 bp, Homo sapiens
gcgcaggcaccgctcgacccgggcgcagcgcgcaggcggtggcgaagagacgccgagcgggccgagtgcggccgagcaaagccggagccggagcggggccgcaggagacgggccgggtccggacgggccgagatgccctataaactgaaaaaggagaaggagccccccaaggttgccaaatgcacagccaagcctagcagctcgggcaaggatggtggaggcgagaacactgaggaggcccagccgcagccccagccccagccccagccccaagcccagtctcagccaccgtcatccaacaagcgtcccagcaatagcacgccgccccccacgcagctcagcaaaatcaagtactcaggggggccccagattgtcaagaaggagcgacggcaaagctcctcccgcttcaacctcagcaagaatcgggagctgcagaagcttcctgccctgaaagattcgccaacccaggagcgggaggagctgtttatccagaagctacgccagtgctgtgtcctctttgacttcgtgtcagacccactcagtgacctcaaattcaaggaggtgaagcgggcaggactcaacgagatggtggagtacatcacccatagccgtgatgttgtcactgaggccatttaccctgaggctgtcaccatgttttcagtgaacctcttccggacgctgccaccttcatcgaatcccacaggggctgagtttgacccagaggaagatgagcccaccctggaagctgcttggccacatctccagctcgtgtatgagttcttcttacgtttccttgagtctcctgatttccagccaaacatagccaagaagtacatcgaccagaagtttgtacttgctctcctagacctatttgacagtgaggatcctcgagagcgggacttcctcaagaccattttgcatcgcatctatggcaagtttttggggctccgggcttatatccgtaggcagatcaaccacatcttctacaggttcatctacgagacggagcatcacaacgggattgctgagctcctggagatcctgggcagcatcatcaatggctttgccctgccccttaaagaagagcacaagatgttcctcatccgtgtcctacttccccttcacaaggtcaagtccctgagtgtctaccaccctcagctggcatactgtgtggtacaattcctggagaaggagagcagtctgactgagccggtaattgtgggacttctcaagttttggcccaagacccacagccccaaggaggtgatgttcttgaatgagctggaggagattctggacgtcattgaaccttctgagttcagcaaagtgatggaacccctcttccgccagctggccaagtgtgtctctagcccccatttccaggtggcagagcgtgctctctattactggaacaatgagtacatcatgagcctgataagtgacaatgctgcccgagtcctccccatcatgttccctgcactctacaggaactccaagagccactggaacaagacaatccatggactgatctataatgccctgaagttgtttatggaaatgaatcagaagctgtttgatgactgcacacaacaatacaaggcagagaagcagaagggccggttccgaatgaaggaaagggaagagatgtggcaaaaaatcgaggagctggcccggcttaatccccagtaccctaagttcagagccaggcctggctctgaacttaggcagtcaaagcgaactactatactcaattgatccaataacttgaccaacggaacaagttaccctagggataacagcgcaatcttattctagagtccatatcgactatagcatttacgaccttgatgtatggatcagcacatcccgatggtcaagccgcctagtttcagagctttatttgatccaccgcatgtcatactcaat

SEQ ID NO: 349782 - DNA, 1247 bp, Homo sapiens
  misc_feature (24)..(25): n is a, c, g, or t
  misc_feature (28)..(28): n is a, c, g, or t
  misc_feature (30)..(30): n is a, c, g, or t
  misc_feature (32)..(33): n is a, c, g, or t
  misc_feature (35)..(35): n is a, c, g, or t
  misc_feature (37)..(37): n is a, c, g, or t
  misc_feature (41)..(41): n is a, c, g, or t
ggcagtactatacggtgttaaggnngcnangnngngnggcntgggtgtcgcagatgctaaaagacatcaagaaggagaaagtgctgctgcggaggaagtcggagctgccccaggacgtgtacaccatcaaggcactggaggcgcacaagcgggcggaagagttcctaactgccagccaggaggctctctgacccctcacgttcctaccacagggccacagcccacacagccctgggacactgccctggccctccatactctgctccctactggctgtcttgggggaaggcagcgcctctctagctactcaagggagggggatgtgggcacttgaagcagggacacccacagaatggtccctcttctccccaaaaggtgttcatgcctccctgtggctagtacaggctgagcactaagatgcttagtgctcagacaacctggggatgcctgtcccctacctgctcctcacccacagctacctgaggctgctctgagaagtacacacaggaatacatacgctcctctattcttcccttcatcctcatttgaacgccaggtatctcccctcctctctctcccctgcagaggcatgtagggaacagcaggagattattctcaccaaagttatgtcaagccccattggtcccagagtagctgaagggaagccaacccccctgcagcacaaataggccccccagtcccagccgtgtgctggcagatagggttgtattatttcttcttaccccatgcctgaccaagggaggtcaaaaggagaaaagtataggctgtggacaataactgatgaatatagggcccagatggaccaagtggggccggggagggatgaataaacaccctaccccgtgccctgtctttggtgagcagcagccctggggtcacagacatggaagggaccaccctggggctgactgcttttctgtgctgttggttcccaaaactagaaagaaggaagcagggagcggtgccccaagcatggctcctgccaacacctatttatttccttgtttgtgctatgctgggcaggccttctcttgtcccttataggtaccttggaggggccaggggctgaggaaggccggacccaggttccaggggcgcaggcagtgcggcttttggctgtgtacatagggtgctttattctccacagagtgatacatgctaaggtgggttgggcttggaccgatgtccccatatgtacagaactgaataaagtgggtctctgagaa

SEQ ID NO: 349783 - DNA, 823 bp, Homo sapiens
  misc_feature (24)..(25): n is a, c, g, or t
  misc_feature (28)..(28): n is a, c, g, or t
  misc_feature (30)..(30): n is a, c, g, or t
  misc_feature (32)..(33): n is a, c, g, or t
  misc_feature (35)..(35): n is a, c, g, or t
  misc_feature (37)..(37): n is a, c, g, or t
  misc_feature (41)..(41): n is a, c, g, or t
ggcagtactatacggtgttaaggnngcnangnngngnggcntgggtgtcggctacctgaggctgctctgagaagtacacacaggaatacatacgctcctctattcttcccttcatcctcatttgaacgccaggtatctcccctcctctctctcccctgcagaggcatgtagggaacagcaggagattattctcaccaaagttatgtcaagccccattggtcccagagtagctgaagggaagccaacccccctgcagcacaaataggccccccagtcccagccgtgtgctggcagatagggttgtattatttcttcttaccccatgcctgaccaagggaggtcaaaaggagaaaagtataggctgtggacaataactgatgaatatagggcccagatggaccaagtggggccggggagggatgaataaacaccctaccccgtgccctgtctttggtgagcagcagccctggggtcacagacatggaagggaccaccctggggctgactgcttttctgtgctgttggttcccaaaactagaaagaaggaagcagggagcggtgccccaagcatggctcctgccaacacctatttatttccttgtttgtgctatgctgggcaggccttctcttgtcccttataggtaccttggaggggccaggggctgaggaaggccggacccaggttccaggggcgcaggcagtgcggcttttggctgtgtacatagggtgctttattctccacagagtgatacatgctaaggtgggttgggcttggaccgatgtccccatatgtacagaactgaataaagtgggtctctgagaa

SEQ ID NO: 349784 - DNA, 801 bp, Homo sapiens
  misc_feature (648)..(648): n is a, c, g, or t
  misc_feature (653)..(653): n is a, c, g, or t
  misc_feature (659)..(659): n is a, c, g, or t
  misc_feature (670)..(671): n is a, c, g, or t
  misc_feature (675)..(675): n is a, c, g, or t
  misc_feature (686)..(686): n is a, c, g, or t
agcggggtgcaacatggaagggacaccctggaggctgactgcttttctgtgctgttggttcccaaaactagaaagaaggaagcagggagcggtgccccaagcatggctcctgccaacacctatttatttccttgtttgtgctatgctgggcaggccttctcttgtcccttataggtaccttggaggggccaggggctgaggaaggccggacccaggttccaggggcgcaggcagtgcggcttttggctgtgtacatagggtgctttattctccacagagtgatacatgctaaggtgggttgggcttggaccgatgtccccatatgtacagaactgaataaagtgggtctctgagaagtctgatgtgccttgatgtggaaagggagacggggaagatggaaatggacattacaaccagggatgtgttcagtcctgtgctggttctggcctggaatgtaggaatataaggcagctctcactgtggtcacttccaggcaggggatgcctgccgggcttggagggctttctgtaccacatcttcccactgggcatccgatatctcccgagcccaggcaggaacccctggcgcaggcaggcttactccagccattgtccttttcaccagctctacatgttctgggtccatggnaatanagctgnggttgttcaannctgnagctccctccncatctacatcttcattttctaatggtgagtcctccaaaagaaaccccaggggctgggactccatcctggaagacaacaaatacatctcccccccccccggcggggcaagatccac

SEQ ID NO: 349785 - DNA, 1308 bp, Homo sapiens
gcgcaggcaccgctcgacccgggcgcagcgcgcaggcggtggcgaagagacgccgagcgggccgagtgcggccgagcaaagccggagccggagcggggccgcaggagacgggccgggtccggacgggccgagatgccctataaactgaaaaaggagaaggagccccccaaggttgccaaatgcacagccaagcctagcagctcgggcaaggatggtggaggcgagaacactgaggaggcccagccgcagccccagccccagccccagccccaagcccagtctcagccaccgtcatccaacaagcgtcccagcaatagcacgccgccccccacgcagctcagcaaaatcaagtactcaggggggccccagattgtcaagaaggagcgacggcaaagctcctcccgcttcaacctcagcaagaatcgggagctgcagaagcttcctgccctgaaagattcgccaacccaggagcgggaggagctgtttatccagaagctacgccagtgctgtgtcctctttgacttcgtgtcagacccactcagtgacctcaaattcaaggaggtgaagcgggcaggactcaacgagatggtggagtacatcacccatagccgtgatgttgtcactgaggccatttaccctgaggctgtcaccatggtgggcacagggaaaggacacaggggggactggtgaggggctctggagaagcccaggtggagctctaactggccctacccctcagttttcagtgaacctcttccggacgctgccaccttcatcgaatcccacaggggctgagtttgacccagaggaagatgagcccaccctggaagctgcttggccacatctccaggtaccagggcaagggggcagattggccgtggctgcagggagtggggcacttggaggcctgcaagtccttgggaacatcccctcagtggcgtgccttttcccctatagctcgtgtatgagttcttcttacgtttccttgagtctcctgatttccagccaaacatagccaagaagtacatcgaccagaagtttgtacttgctgtgagtccccgagttcctgtccttgccctctctttccattccatgcccccttcatctgtgtcccagtggctctttccccttaagctgaatatattgggtttcatccatgtctggtacgaggaggctataaagggtaaaaaacaaaacaaaacaaaaccctactctggccttaagaaactaacaacataatggtaggaaacaaaaaagcaacagagtacctctctcaggtcaatagtgaggcatcactttggaagtctc

SEQ ID NO: 349786 - DNA, 625 bp, Homo sapiens
gtcgacatatggggacatcggtccaagcccaacccaccttagcatgtatcactgggcttggaccgatgtccccatatgtacagaactgaataaagtgggtctctgagaagtctgatgtgccttgatgtggaaagggagacggggaagatggaaatggacattacaaccagggatgtgttcagtcctgtgctggttctggcctggaatgtaggaatattttacctgggtcccatgggaatagagctgtggttgttcaacagctgtagctccctcctcatcttcatcttcactctctaatggtgggtctggcaaatgaagccccagggccctggattcgatcctggatgtcagcaactacatctccatcccccactggtgcccagttccacctcctcttgttcaggatcttggttcaggggctggtaggagtagccagctgggcccgaccccgtttcctcctgctcttcctcaggctcctcactgctccaatccccagtgccttctgaagggccctgatgtcccagttcctcagtctgattggggaagatacgctcagggcccatggtgtctcctcctagaactactgttgccatccgggcaggggccgctcagagcccgggaggcg

SEQ ID NO: 349787 - DNA, 408 bp, Homo sapiens
atcctagcccctgccagaaactgaggtcttgagtgaaatgagcagcacccaccgagtctgcctctccccaccaggtggcagagcgtgctctctattactggaacaatgagtacatcatgagcctgataagtgacaatgctgcccgagtcctccccatcatgttccctgcactctacaggaactccaagagccactggaacaagtaaggcgctggggtggggctgggtggtggggatccagtttgggaaactttgagggtatggaagaactaaagagccaggggtctcacctagtcacccagcaagtggggctgatgtcccctgcatgttgataggaccttgaggggctgactggagcgaaaagatgcctgtgtgcaagatctctgtgataccaaacagcagggcagcg

SEQ ID NO: 349788 - DNA, 249 bp, Homo sapiens
cttccttctactgactcatgccagttcatttccttagtaattattccagaatgaaagaatgatcttttacctgggtcccatgggaatagagctgtggttgttcaacagctgtagctccctcctcatcttcatcttcactctctaatggtgggtctggcaaatgaagccccagggcctgcagagccacagaagaccgtttgggtctaggctttcagggagcccagcttcacctgttcaggaaccatccct

SEQ ID NO: 349789 - DNA, 1417 bp, Homo sapiens
  misc_feature (1)..(1): n is a, c, g, or t
  misc_feature (1264)..(1264): n is a, c, g, or t
  misc_feature (1269)..(1269): n is a, c, g, or t
  misc_feature (1275)..(1275): n is a, c, g, or t
  misc_feature (1286)..(1287): n is a, c, g, or t
  misc_feature (1291)..(1291): n is a, c, g, or t
  misc_feature (1302)..(1302): n is a, c, g, or t
nccttgttctctccctctgccgtccggctcttgttgtcgtctgttgctcttgctcgtcctcggcctggttgcgctgctgcgtgttgtcgctgcgtcgtttgttggtggctgtgctcgtgcggtgttctttttgggtggtgtgtcgccgtgcgtctgctttgctgcttgttgcgtgcgttgcctgctgtgcctcctgcttctgttctcttcgcgtggtctgtcagttattcttctgcgctgcgtcgtcccgttgttggttgtttttcgtcttctactcacctctatgtgtttactacgcattttggtttgttgtgttactaatactcgtcgggggtatcttgtgtgtcgccgtttttatccgccggtttgggtgttgtcgtctgagctgcctctcaatctgtgttggtttgtcctgtggggtacacgttgttgctgggtgtggtgtgttcctatcctgatagtctcgtacctgtaggtgtcgctgcgctgccggtagtttgatttcgctagcaaggtgctattgttgtttgcccttgccctgtcttcctatcgcgcggtgcgcgcgaggccccgcatgccagcgcacgcgcagacctccatgaggatgcacacccaccccctgctgactctcgttcggtgtcgttggtgtggcatgggttgcccctcaatgcgtcgtattcgttttcttgggatggctcgcgccgccgctctcggctctctctttgctggtcttggctgttgctgtggtcttggtgctcttgctctgtagttgtttttgtttgttttggttgttggtgtgttcttttgggtttttttttttggtttttttttttttttttttttttttgttttttttttttggctgtgtacatagggtgctttattctccacagagtgatacatgctaaggtgggttgggcttggaccgatgtccccatatgtacagaactgaataaagtgggtctctgagaagtctgatgtgccttgatgtggaaagggagacggggaagatggaaatggacattacaaccagggatgtgttcagtcctgtgctggttctggcctggaatgtaggaatataaggcagctctcactgtggtcacttccaggcaggggatgcctgccgggcttggagggctttctgtaccacatcttcccactgggcatccgatatctcccgagcccaggcaggaacccctggcgcaggcaggcttactccagccattgtccttttcaccagctctacatgttctgggtccatggnaatanagctgnggttgttcaannctgnagctccctccncatctacatcttcattttctaatggtgagtcctccaaaagaaaccccaggggctgggactccatcctggaagacaacaaatacatctcccccccccccggcggggcaagatccac

SEQ ID NO: 349790 - DNA, 2901 bp, Homo sapiens
gcgcaggcaccgctcgacccgggcgcagcgcgcaggcggtggcgaagagacgccgagcgggccgagtgcggccgagcaaagccggagccggagcggggccgcaggagacgggccgggtccggacgggccgagatgccctataaactgaaaaaggagaaggagccccccaaggttgccaaatgcacagccaagcctagcagctcgggcaaggatggtggaggcgagaacactgaggaggcccagccgcagccccagccccagccccagccccaagcccagtctcagccaccgtcatccaacaagcgtcccagcaatagcacgccgccccccacgcagctcagcaaaatcaagtactcaggggggccccagattgtcaagaaggagctgtttatccagaagctacgccagtgctgtgtcctctttgacttcgtgtcagacccactcagtgacctcaaattcaaggaggtgaagcgggcaggactcaacgagatggtggagtacatcacccatagccgtgatgttgtcactgaggccatttaccctgaggctgtcaccatgttttcagtgaacctcttccggacgctgccaccttcatcgaatcccacaggggctgagtttgacccagaggaagatgagcccaccctggaagctgcttggccacatctccagctcgtgtatgagttcttcttacgtttccttgagtctcctgatttccagccaaacatagccaagaagtacatcgaccagaagtttgtacttgctctcctagacctatttgacagtgaggatcctcgagagcgggacttcctcaagaccattttgcatcgcatctatggcaagtttttggggctccgggcttatatccgtaggcagatcaaccacatcttctacaggttcatctacgagacggagcatcacaacgggattgctgagctcctggagatcctgggcagcatcatcaatggctttgccctgccccttaaagaagagcacaagatgttcctcatccgtgtcctacttccccttcacaaggtcaagtccctgagtgtctaccaccctcagctggcatactgtgtggtacaattcctggagaaggagagcagtctgactgagccggtaattgtgggacttctcaagttttggcccaagacccacagccccaaggaggtgatgttcttgaatgagctggaggagattctggacgtcattgaaccttctgagttcagcaaagtgatggaacccctcttccgccagctggccaagtgtgtctctagcccccatttccaggtggcagagcgtgctctctattactggaacaatgagtacatcatgagcctgataagtgacaatgctgcccgagtcctccccatcatgttccctgcactctacaggaactccaagagccactggaacaagacaatccatggactgatctataatgccctgaagttgtttatggaaatgaatcagaagctgtttgatgactgcacacaacaatacaaggcagagaagcagaagggccggttccgaatgaaggaaagggaagagatgtggcaaaaaatcgaggagctggcccggcttaatccccagtatcccatgttccgagcccctccaccactgccccctgtgtactcgatggagacagagacccccacagctgaggacatccagcttctgaagaggactgtggagactgaggctgttcagatgctaaaagacatcaagaaggagaaagtgctgctgcggaggaagtcggagctgccccaggacgtgtacaccatcaaggcactggaggcgcacaagcgggcggaagagttcctaactgccagccaggaggctctctgacccctcacgttcctaccacagggccacagcccacacagccctgggacactgccctggccctccatactctgctccctactggctgtcttgggggaaggcagcgcctctctagctactcaagggagggggatgtgggcacttgaagcagggacacccacagaatggtccctcttctccccaaaaggtgttcatgcctccctgtggctagtacaggctgagcactaagatgcttagtgctcagacaacctggggatgcctgtcccctacctgctcctcacccacagctacctgaggctgctctgagaagtacacacaggaatacatacgctcctctattcttcccttcatcctcatttgaacgccaggtatctcccctcctctctctcccctgcagaggcatgtagggaacagcaggagattattctcaccaaagttatgtcaagccccattggtcccagagtagctgaagggaagccaacccccctgcagcacaaataggccccccagtcccagccgtgtgctggcagatagggttgtattatttcttcttaccccatgcctgaccaagggaggtcaaaaggagaaaagtataggctgtggacaataactgatgaatatagggcccagatggaccaagtggggccggggagggatgaataaacaccctaccccgtgccctgtctttggtgagcagcagccctggggtcacagacatggaagggaccaccctggggctgactgcttttctgtgctgttggttcccaaaactagaaagaaggaagcagggagcggtgccccaagcatggctcctgccaacacctatttatttccttgtttgtgctatgctgggcaggccttctcttgtcccttataggtaccttggaggggccaggggctgaggaaggccggacccaggttccaggggcgcaggcagtgcggcttttggctgtgtacatagggtgctttattctccacagagtgatacatgctaaggtgggttgggcttggaccgatgtccccatatgtacagaactgaataaagtgggtctctgagaa

SEQ ID NO: 349791 - DNA, 3365 bp, Homo sapiens
gcgcaggcaccgctcgacccgggcgcagcgcgcaggcggtggcgaagagacgccgagcgggccgagtgcggccgagcaaagccggagccggagcggggccgcaggagacgggccgggtccggacgggccgagatgccctataaactgaaaaaggagaaggagccccccaaggttgccaaatgcacagccaagcctagcagctcgggcaaggatggtggaggcgagaacactgaggaggcccagccgcagccccagccccagccccagccccaagcccagtctcagccaccgtcatccaacaagcgtcccagcaatagcacgccgccccccacgcagctcagcaaaatcaagtactcaggggggccccagattgtcaagaaggagcgacggcaaagctcctcccgcttcaacctcagcaagaatcgggagctgcagaagcttcctgccctgaaagattcgccaacccaggagcgggaggagctgtttatccagaagctacgccagtgctgtgtcctctttgacttcgtgtcagacccactcagtgacctcaaattcaaggaggtgaagcgggcaggactcaacgagatggtggagtacatcacccatagccgtgatgttgtcactgaggccatttaccctgaggctgtcaccatgttttcagtgaacctcttccggacgctgccaccttcatcgaatcccacaggggctgagtttgacccagaggaagatgagcccaccctggaagctgcttggccacatctccagctcgtgtatgagttcttcttacgtttccttgagtctcctgatttccagccaaacatagccaagaagtacatcgaccagaagtttgtacttgctctcctagacctatttgacagtgaggatcctcgagagcgggacttcctcaagaccattttgcatcgcatctatggcaagtttttggggctccgggcttatatccgtaggcagatcaaccacatcttctacaggttcatctacgagacggagcatcacaacgggattgctgagctcctggagatcctgggcagcatcatcaatggctttgccctgccccttaaagaagagcacaagatgttcctcatccgtgtcctacttccccttcacaaggtcaagtccctgagtgtctaccaccctcagctggcatactgtgtggtacaattcctggagaaggagagcagtctgactgagccggtaattgtgggacttctcaagttttggcccaagacccacagccccaaggaggtgatgttcttgaatgagctggaggagattctggacgtcattgaaccttctgagttcagcaaagtgatggaacccctcttccgccagctggccaagtgtgtctctagcccccatttccaggtggcagagcgtgctctctattactggaacaatgagtacatcatgagcctgataagtgacaatgctgcccgagtcctccccatcatgttccctgcactctacaggaactccaagagccactggaacaagacaatccatggactgatctataatgccctgaagttgtttatggaaatgaatcagaagctgtttgatgactgcacacaacaatacaaggcagagaagcagaagggccggttccgaatgaaggaaagggaagagatgtggcaaaaaatcgaggagctggcccggcttaatccccagtatcccatgttccgagcccctccaccactgccccctgtgtactcgatggagacagagacccccacagctgaggacatccagcttctgaagaggactgtggagactgaggctgttcagatgctaaaagacatcaagaaggagaaagtgctgctgcggaggaagtcggagctgccccaggacgtgtacaccatcaaggcactggaggcgcacaagcgggcggaagagttcctaactgccagccaggaggctctctgacccctcacgttcctaccacagggccacagcccacacagccctgggacactgccctggccctccatactctgctccctactggctgtcttgggggaaggcagcgcctctctagctactcaagggagggggatgtgggcacttgaagcagggacacccacagaatggtccctcttctccccaaaaggtgttcatgcctccctgtggctagtacaggctgagcactaagatgcttagtgctcagacaacctggggatgcctgtcccctacctgctcctcacccacagctacctgaggctgctctgagaagtacacacaggaatacatacgctcctctattcttcccttcatcctcatttgaacgccaggtatctcccctcctctctctcccctgcagaggcatgtagggaacagcaggagattattctcaccaaagttatgtcaagccccattggtcccagagtagctgaagggaagccaacccccctgcagcacaaataggccccccagtcccagccgtgtgctggcagatagggttgtattatttcttcttaccccatgcctgaccaagggaggtcaaaaggagaaaagtataggctgtggacaataactgatgaatatagggcccagatggaccaagtggggccggggagggatgaataaacaccctaccccgtgccctgtctttggtgagcagcagccctggggtcacagacatggaagggaccaccctggggctgactgcttttctgtgctgttggttcccaaaactagaaagaaggaagcagggagcggtgccccaagcatggctcctgccaacacctatttatttccttgtttgtgctatgctgggcaggccttctcttgtcccttataggtaccttggaggggccaggggctgaggaaggccggacccaggttccaggggcgcaggcagtgcggcttttggctgtgtacatagggtgctttattctccacagagtgatacatgctaaggtgggttgggcttggaccgatgtccccatatgtacagaactgaataaagtgggtctctgagaaaaaaaaaaaaacaaaaaaaaaaaaaacaaaaacaaaaaaaacaaaaaaaaaaccccgggagcgactctattatagcgcggggcgcgcgaggaaaaacaggttataaaaaagcgcgaccagtgggcaccaaaggttttctcccgaaccccaatttcttttcgtgcgacacccaaggggggagaaaatcatccgcgcgggagccccccccataaatgaggagaggcgccgcggtataaaaattctcacggaaaaacccgcccaggtgtaccccccgcggtttaaatagcgtctccccaagaacaaaaacccccgcgaataattccacacccccacagaacaagaacgcgcgaaaatcagtatactccacg

SEQ ID NO: 349792 - DNA, 3132 bp, Homo sapiens
gcgcaggcaccgctcgacccgggcgcagcgcgcaggcggtggcgaagagacgccgagcgggccgagtgcggccgagcaaagccggagccggagcggggccgcaggagacgggccgggtccggacgggccgagatgccctataaactgaaaaaggagaaggagccccccaaggttgccaaatgcacagccaagcctagcagctcgggcaaggatggtggaggcgagaacactgaggaggcccagccgcagccccagccccagccccagccccaagcccagtctcagccaccgtcatccaacaagcgtcccagcaatagcacgccgccccccacgcagctcagcaaaatcaagtactcaggggggccccagattgtcaagaaggagcgacggcaaagctcctcccgcttcaacctcagcaagaatcgggagctgcagaagcttcctgccctgaaagattcgccaacccaggagcgggaggagctgtttatccagaagctacgccagtgctgtgtcctctttgacttcgtgtcagacccactcagtgacctcaaattcaaggaggtgaagcgggcaggactcaacgagatggtggagtacatcacccatagccgtgatgttgtcactgaggccatttaccctgaggctgtcaccatgttttcagtgaacctcttccggacgctgccaccttcatcgaatcccacaggggctgagtttgacccagaggaagatgagcccaccctggaagctgcttggccacatctccagctcgtgtatgagttcttcttacgtttccttgagtctcctgatttccagccaaacatagccaagaagtacatcgaccagaagtttgtacttgctctcctagacctatttgacagtgaggatcctcgagagcgggacttcctcaagaccattttgcatcgcatctatggcaagtttttggggctccgggcttatatccgtaggcagatcaaccacatcttctacaggtgaggccaggagcccaggcttaggagcaaaaccttctgctactgaggtggggtgggagcagggaggtggggggactgtacagaatgctggagggacatcaggggttgtcaagagagccatttttcttccctcaggttcatctacgagacggagcatcacaacgggattgctgagctcctggagatcctgggcagcatcatcaatggctttgccctgccccttaaagaagagcacaagatgttcctcatccgtgtcctacttccccttcacaaggtcaagtccctgagtgtctaccaccctcagctggcatactgtgtggtacaattcctggagaaggagagcagtctgactgagccggtaattgtgggacttctcaagttttggcccaagacccacagccccaaggaggtgatgttcttgaatgagctggaggagattctggacgtcattgaaccttctgagttcagcaaagtgatggaacccctcttccgccagctggccaagtgtgtctctagcccccatttccaggtggcagagcgtgctctctattactggaacaatgagtacatcatgagcctgataagtgacaatgctgcccgagtcctccccatcatgttccctgcactctacaggaactccaagagccactggaacaagacaatccatggactgatctataatgccctgaagttgtttatggaaatgaatcagaagctgtttgatgactgcacacaacaatacaaggcagagaagcagaagggccggttccgaatgaaggaaagggaagagatgtggcaaaaaatcgaggagctggcccggcttaatccccagtatcccatgttccgagcccctccaccactgccccctgtgtactcgatggagacagagacccccacagctgaggacatccagcttctgaagaggactgtggagactgaggctgttcagatgctaaaagacatcaagaaggagaaagtgctgctgcggaggaagtcggagctgccccaggacgtgtacaccatcaaggcactggaggcgcacaagcgggcggaagagttcctaactgccagccaggaggctctctgacccctcacgttcctaccacagggccacagcccacacagccctgggacactgccctggccctccatactctgctccctactggctgtcttgggggaaggcagcgcctctctagctactcaagggagggggatgtgggcacttgaagcagggacacccacagaatggtccctcttctccccaaaaggtgttcatgcctccctgtggctagtacaggctgagcactaagatgcttagtgctcagacaacctggggatgcctgtcccctacctgctcctcacccacagctacctgaggctgctctgagaagtacacacaggaatacatacgctcctctattcttcccttcatcctcatttgaacgccaggtatctcccctcctctctctcccctgcagaggcatgtagggaacagcaggagattattctcaccaaagttatgtcaagccccattggtcccagagtagctgaagggaagccaacccccctgcagcacaaataggccccccagtcccagccgtgtgctggcagatagggttgtattatttcttcttaccccatgcctgaccaagggaggtcaaaaggagaaaagtataggctgtggacaataactgatgaatatagggcccagatggaccaagtggggccggggagggatgaataaacaccctaccccgtgccctgtctttggtgagcagcagccctggggtcacagacatggaagggaccaccctggggctgactgcttttctgtgctgttggttcccaaaactagaaagaaggaagcagggagcggtgccccaagcatggctcctgccaacacctatttatttccttgtttgtgctatgctgggcaggccttctcttgtcccttataggtaccttggaggggccaggggctgaggaaggccggacccaggttccaggggcgcaggcagtgcggcttttggctgtgtacatagggtgctttattctccacagagtgatacatgctaaggtgggttgggcttggaccgatgtccccatatgtacagaactgaataaagtgggtctctgagaa

SEQ ID NO: 349793 - DNA, 2641 bp, Homo sapiens
gcgcaggcaccgctcgacccgggcgcagcgcgcaggcggtggcgaagagacgccgagcgggccgagtgcggccgagcaaagccggagccggagcggggccgcaggagacgggccgggtccggacgggccgagatgccctataaactgaaaaaggagaaggagccccccaaggttgccaaatgcacagccaagcctagcagctcgggcaaggatggtggaggcgagaacactgaggaggcccagccgcagccccagccccagccccagccccaagcccagtctcagccaccgtcatccaacaagcgtcccagcaatagcacgccgccccccacgcagctcagcaaaatcaagtactcaggggggccccagattgtcaagaaggagcgacggcaaagctcctcccgcttcaacctcagcaagaatcgggagctgcagaagcttcctgccctgaaagattcgccaacccaggagcgggaggagctgtttatccagaagctacgccagtgctgtgtcctctttgacttcgtgtcagacccactcagtgacctcaaattcaaggaggtgaagcgggcaggactcaacgagatggtggagtacatcacccatagccgtgatgttgtcactgaggccatttaccctgaggctgtcaccatgttttcagtgaacctcttccggacgctgccaccttcatcgaatcccacaggggctgagtttgacccagaggaagatgagcccaccctggaagctgcttggccacatctccagctcgtgtatgagttcttcttacgtttccttgagtctcctgatttccagccaaacatagccaagaagtacatcgaccagaagtttgtacttgctctcctagacctatttgacagtgaggatcctcgagagcgggacttcctcaagaccattttgcatcgcatctatggcaagtttttggggctccgggcttatatccgtaggcagatcaaccacatcttctacaggttcatctacgagacggagcatcacaacgggattgctgagctcctggagatcctgggcagcatcatcaatggctttgccctgccccttaaagaagagcacaagatgttcctcatccgtgtcctacttccccttcacaaggtcaagtccctgagtgtctaccaccctcagctggcatactgtgtggtacaattcctggagaaggagagcagtctgactgagccggtaattgtgggacttctcaagttttggcccaagacccacagccccaaggaggtgatgttcttgaatgagctggaggagattctggacgtcattgaaccttctgagttcagcaaagtgatggaacccctcttccgccagctggccaagtgtgtctctagcccccatttccaggtggcagagcgtgctctctattactggaacaatgagtacatcatgagcctgataagtgacaatgctgcccgagtcctccccatcatgttccctgcactctacaggaactccaagagccactggaacaagacaatccatggactgatctataatgccctgaagttgtttatggaaatgaatcagaagctgtttgatgactgcacacaacaatacaaggcagagaagcagaagggccggttccgaatgaaggaaagggaagagatgtggcaaaaaatcgaggagctggcccggcttaatccccagtatcccatgttccgagcccctccaccactgccccctgtgtactcgatggagacagagacccccacagctgaggacatccagcttctgaagaggactgtggagactgaggctgttcagatgctaaaagacatcaagaaggagaaagtgctgctgcggaggaagtcggagctgccccaggacgtgtacaccatcaaggcactggaggcgcacaagcgggcggaagagttcctaactgccagccaggaggctctctgacccctcacgttcctaccacagggccacagcccacacagccctgggacactgccctggccctccatactctgctccctactggctgtcttgggggaaggcagcgcctctctagctactcaagggagggggatgtgggcacttgaagcagggacacccacagaatggtccctcttctccccaaaaggtgttcatgcctccctgtggctagtacaggctgagcactaagatgcttagtgctcagacaacctggggatgcctgtcccctacctgctcctcacccacagctacctgaggctgctctgagaagtacacacaggaatacatacgctcctctattcttcccttcatcctcatttgaacgccaggtatctcccctcctctctctcccctgcagaggcatgtagggaacagcaggagattattctcaccaaagttatgtcaagccccattggtcccagagtagctgaagggaagccaacccccctgcagcacaaataggccccccagtcccagccgtgtgctggcagatagggttgtattatttcttcttaccccatgcctgaccaagggaggtcaaaaggagaaaagtataggctgtggacaataactgatgaatatagggcccagatggaccaagtggggccggggagggtgtttattcatccctccgtcgacgcggccgcgaatttagtagtagtag

SEQ ID NO: 349794 - DNA, 3082 bp, Homo sapiens
gcgcaggcaccgctcgacccgggcgcagcgcgcaggcggtggcgaagagacgccgagcgggccgagtgcggccgagcaaagccggagccggagcggggccgcaggagacgggccgggtccggacgggccgagatgccctataaactgaaaaaggagaaggagccccccaaggttgccaaatgcacagccaagcctagcagctcgggcaaggatggtggaggcgagaacactgaggaggcccagccgcagccccagccccagccccagccccaagcccagtctcagccaccgtcatccaacaagcgtcccagcaatagcacgccgccccccacgcagctcagcaaaatcaagtactcaggggggccccagattgtcaagaaggagcgacggcaaagctcctcccgcttcaacctcagcaagaatcgggagctgcagaagcttcctgccctgaaagattcgccaacccaggagcgggaggagctgtttatccagaagctacgccagtgctgtgtcctctttgacttcgtgtcagacccactcagtgacctcaaattcaaggaggtgaagcgggcaggactcaacgagatggtggagtacatcacccatagccgtgatgttgtcactgaggccatttaccctgaggctgtcaccatggtgggcacagggaaaggacacaggggggactggtgaggggctctggagaagcccaggtggagctctaactggccctacccctcagttttcagtgaacctcttccggacgctgccaccttcatcgaatcccacaggggctgagtttgacccagaggaagatgagcccaccctggaagctgcttggccacatctccagctcgtgtatgagttcttcttacgtttccttgagtctcctgatttccagccaaacatagccaagaagtacatcgaccagaagtttgtacttgctctcctagacctatttgacagtgaggatcctcgagagcgggacttcctcaagaccattttgcatcgcatctatggcaagtttttggggctccgggcttatatccgtaggcagatcaaccacatcttctacaggttcatctacgagacggagcatcacaacgggattgctgagctcctggagatcctgggcagcatcatcaatggctttgccctgccccttaaagaagagcacaagatgttcctcatccgtgtcctacttccccttcacaaggtcaagtccctgagtgtctaccaccctcagctggcatactgtgtggtacaattcctggagaaggagagcagtctgactgagccggtaattgtgggacttctcaagttttggcccaagacccacagccccaaggaggtgatgttcttgaatgagctggaggagattctggacgtcattgaaccttctgagttcagcaaagtgatggaacccctcttccgccagctggccaagtgtgtctctagcccccatttccaggtggcagagcgtgctctctattactggaacaatgagtacatcatgagcctgataagtgacaatgctgcccgagtcctccccatcatgttccctgcactctacaggaactccaagagccactggaacaagacaatccatggactgatctataatgccctgaagttgtttatggaaatgaatcagaagctgtttgatgactgcacacaacaatacaaggcagagaagcagaagggccggttccgaatgaaggaaagggaagagatgtggcaaaaaatcgaggagctggcccggcttaatccccagtatcccatgttccgagcccctccaccactgccccctgtgtactcgatggagacagagacccccacagctgaggacatccagcttctgaagaggactgtggagactgaggctgttcagatgctaaaagacatcaagaaggagaaagtgctgctgcggaggaagtcggagctgccccaggacgtgtacaccatcaaggcactggaggcgcacaagcgggcggaagagttcctaactgccagccaggaggctctctgacccctcacgttcctaccacagggccacagcccacacagccctgggacactgccctggccctccatactctgctccctactggctgtcttgggggaaggcagcgcctctctagctactcaagggagggggatgtgggcacttgaagcagggacacccacagaatggtccctcttctccccaaaaggtgttcatgcctccctgtggctagtacaggctgagcactaagatgcttagtgctcagacaacctggggatgcctgtcccctacctgctcctcacccacagctacctgaggctgctctgagaagtacacacaggaatacatacgctcctctattcttcccttcatcctcatttgaacgccaggtatctcccctcctctctctcccctgcagaggcatgtagggaacagcaggagattattctcaccaaagttatgtcaagccccattggtcccagagtagctgaagggaagccaacccccctgcagcacaaataggccccccagtcccagccgtgtgctggcagatagggttgtattatttcttcttaccccatgcctgaccaagggaggtcaaaaggagaaaagtataggctgtggacaataactgatgaatatagggcccagatggaccaagtggggccggggagggatgaataaacaccctaccccgtgccctgtctttggtgagcagcagccctggggtcacagacatggaagggaccaccctggggctgactgcttttctgtgctgttggttcccaaaactagaaagaaggaagcagggagcggtgccccaagcatggctcctgccaacacctatttatttccttgtttgtgctatgctgggcaggccttctcttgtcccttataggtaccttggaggggccaggggctgaggaaggccggacccaggttccaggggcgcaggcagtgcggcttttggctgtgtacatagggtgctttattctccacagagtgatacatgctaaggtgggttgggcttggaccgatgtccccatatgtacagaactgaataaagtgggtctctgagaa

SEQ ID NO: 349795 - DNA, 1893 bp, Homo sapiens
taattctacattcaccgaggtgcaagctctctgtagttgtctaccaggccgcagctggcatactgtgtggtacaattcctggagaaggagagcagtctgactgagccggtaattgtgggacttctcaagttttggcccaagacccacagccccaaggaggtgatgttcttgaatgagctggaggagattctggacgtcattgaaccttctgagttcagcaaagtgatggaacccctcttccgccagctggccaagtgtgtctctagcccccatttccaggtggcagagcgtgctctctattactggaacaatgagtacatcatgagcctgataagtgacaatgctgcccgagtcctccccatcatgttccctgcactctacaggaactccaagagccactggaacaagacaatccatggactgatctataatgccctgaagttgtttatggaaatgaatcagaagctgtttgatgactgcacacaacaatacaaggcagagaagcagaagggccggttccgaatgaaggaaagggaagagatgtggcaaaaaatcgaggagctggcccggcttaatccccagtatcccatgttccgagcccctccaccactgccccctgtgtactcgatggagacagagacccccacagctgaggacatccagcttctgaagaggactgtggagactgaggctgttcagatgctaaaagacatcaagaaggagaaagtgctgctgcggaggaagtcggagctgccccaggacgtgtacaccatcaaggcactggaggcgcacaagcgggcggaagagttcctaactgccagccaggaggctctctgacccctcacgttcctaccacagggccacagcccacacagccctgggacactgccctggccctccatactctgctccctactggctgtcttgggggaaggcagcgcctctctagctactcaagggagggggatgtgggcacttgaagcagggacacccacagaatggtccctcttctccccaaaaggtgttcatgcctccctgtggctagtacaggctgagcactaagatgcttagtgctcagacaacctggggatgcctgtcccctacctgctcctcacccacagctacctgaggctgctctgagaagtacacacaggaatacatacgctcctctattcttcccttcatcctcatttgaacgccaggtatctcccctcctctctctcccctgcagaggcatgtagggaacagcaggagattattctcaccaaagttatgtcaagccccattggtcccagagtagctgaagggaagccaacccccctgcagcacaaataggccccccagtcccagccgtgtgctggcagatagggttgtattatttcttcttaccccatgcctgaccaagggaggtcaaaaggagaaaagtataggctgtggacaataactgatgaatatagggcccagatggaccaagtggggccggggagggatgaataaacaccctaccccgtgccctgtctttggtgagcagcagccctggggtcacagacatggaagggaccaccctggggctgactgcttttctgtgctgttggttcccaaaactagaaagaaggaagcagggagcggtgccccaagcatggctcctgccaacacctatttatttccttgtttgtgctatgctgggcaggccttctcttgtcccttataggtaccttggaggggccaggggctgaggaaggccggacccaggttccaggggcgcaggcagtgcggcttttggctgtgtacatagggtgctttattctccacagagtgatacatgctaaggtgggttgggcttggaccgatgtccccatatgtacagaactgaataaagtgggtctctgagaa

SEQ ID NO: 349796 - DNA, 2210 bp, Homo sapiens
  misc_feature (2049)..(2050): n is a, c, g, or t
  misc_feature (2052)..(2052): n is a, c, g, or t
  misc_feature (2054)..(2054): n is a, c, g, or t
  misc_feature (2058)..(2058): n is a, c, g, or t
gcgcaggcaccgctcgacccgggcgcagcgcgcaggcggtggcgaagagacgccgagcgggccgagtgcggccgagcaaagccggagccggagcggggccgcaggagacgggccgggtccggacgggccgagatgccctataaactgaaaaaggagaaggagccccccaaggttgccaaatgcacagccaagcctagcagctcgggcaaggatggtggaggcgagaacactgaggaggcccagccgcagccccagccccagccccagccccaagcccagtctcagccaccgtcatccaacaagcgtcccagcaatagcacgccgccccccacgcagctcagcaaaatcaagtactcaggggggccccagattgtcaagaaggagcgacggcaaagctcctcccgcttcaacctcagcaagaatcgggagctgcagaagcttcctgccctgaaagattcgccaacccaggagcgggaggagctgtttatccagaagctacgccagtgctgtgtcctctttgacttcgtgtcagacccactcagtgacctcaaattcaaggaggtgaagcgggcaggactcaacgagatggtggagtacatcacccatagccgtgatgttgtcactgaggccatttaccctgaggctgtcaccatgttttcagtgaacctcttccggacgctgccaccttcatcgaatcccacaggggctgagtttgacccagaggaagatgagcccaccctggaagctgcttggccacatctccagctcgtgtatgagttcttcttacgtttccttgagtctcctgatttccagccaaacatagccaagaagtacatcgaccagaagtttgtacttgctctcctagacctatttgacagtgaggatcctcgagagcgggacttcctcaagaccattttgcatcgcatctatggcaagtttttggggctccgggcttatatccgtaggcagatcaaccacatcttctacaggttcatctacgagacggagcatcacaacgggattgctgagctcctggagatcctgggcagcatcatcaatggctttgccctgccccttaaagaagagcacaagatgttcctcatccgtgtcctacttccccttcacaaggtcaagtccctgagtgtctaccaccctcagctggcatactgtgtggtacaattcctggagaaggagagcagtctgactgagccggtaattgtgggacttctcaagttttggcccaagacccacagccccaaggaggtgatgttcttgaatgagctggaggagattctggacgtcattgaaccttctgagttcagcaaagtgatggaacccctcttccgccagctggccaagtgtgtctctagcccccatttccaggtggcagagcgtgctctctattactggaacaatgagtacatcatgagcctgataagtgacaatgctgcccgagtcctccccatcatgttccctgcactctacaggaactccaagagccactggaacaagacaatccatggactgatctataatgccctgaagttgtttatggaaatgaatcagaagctgtttgatgactgcacacaacaatacaaggcagagaagcagaagggccggttccgaatgaaggaaagggaagagatgtggcaaaaaatcgaggagctggcccggcttaatccccagtatcccatgttccgagcccctccaccactgccccctgtgtactcgatggagacagagacccccacagctgaggacatccagcttctgaagaggactgtggagactgaggctgttcagatgctaaaagacatcaagaaggagaaagtgctgctgcggaggaagtcggagctgccccaggacgtgtacaccatcaaggcactggaggcgcacaagcgggcggaagagttcctaactgccagccaggaggctctctgacccctcacgttcctaccacagggccacagcccacacagccctgggacactgccctggccctccatactctgctccctactggctgtcttgggggaaggcagcgccttnntntnagcntacttaaaggggaagggcggaatgtgggagaacttggaaggaagggaaaaacccagaagaaatgggtcacactattacataccacaaaaaaggtgttcatgacatacatgtagaatagaaaaagatgagcactaagaatgttaagagataaa

SEQ ID NO: 349797 - DNA, 1223 bp, Homo sapiens
gcgcaggcaccgctcgacccgggcgcagcgcgcaggcggtggcgaagagacgccgagcgggccgagtgcggccgagcaaagccggagccggagcggggccgcaggagacgggccgggtccggacgggccgagatgccctataaactgaaaaaggagaaggagccccccaaggttgccaaatgcacagccaagcctagcagctcgggcaaggatggtggaggcgagaacactgaggaggcccagccgcagccccagccccagccccagccccaagcccagtctcagccaccgtcatccaacaagcgtcccagcaatagcacgccgccccccacgcagctcagcaaaatcaagtactcaggggggccccagattgtcaagaaggagcgacggcaaagctcctcccgcttcaacctcagcaagaatcgggagctgcagaagcttcctgccctgaaagattcgccaacccaggagcgggaggagctgtttatccagaagctacgccagtgctgtgtcctctttgacttcgtgtcagacccactcagtgacctcaaattcaaggaggtgaagcgggcaggactcaacgagatggtggagtacatcacccatagccgtgatgttgtcactgaggccatttaccctgaggctgtcaccatgttttcagtgaacctcttccggacgctgccaccttcatcgaatcccacaggggctgagtttgacccagaggaagatgagcccaccctggaagctgcttggccacatctccaggtaccagggcaagggggcagattggccgtggctgcagggagtggggcacttggaggcctgcaagtccttgggaacatcccctcagtggcgtgccttttcccctatagctcgtgtatgagttcttcttacgtttccttgagtctcctgatttccagccaaacatagccaagaagtacatcgaccagaagtttgtacttgctgtgagtccccgagttcctgtccttgccctctctttccattccatgcccccttcatctgtgtcccagtggctctttccccttaagctgaatatattgggtttcatccatgtctggtacgaggaggctataaagggtaaaaaacaaaacaaaacaaaaccctactctggccttaagaaactaacaacataatggtaggaaacaaaaaagcaacagagtacctctctcaggtcaatagtgaggcatcactttggaagtctc

SEQ ID NO: 349798 - DNA, 389 bp, Homo sapiens
ataaggggacggaacaatagaattcactgggaattggtcaccattcctcaccttgtccctattcacacacagatgctaaaagacatcaagaaggagaaagtgctgctgcggaggaagtcggagctgccccaggacgtgtacaccatcaaggcactggaggcgcacaagcgggcggaagagttcctaactgccagccaggaggctctctgacccctcacgttcctaccacagggccacagcccacacagccctgggacactgccctggccctccatactctgctccctactggctgtcttgggggaaggcagcgcctctctagctactcaagggagggggatgtgggcacttgaagcagggacacccacagaatggtccctcttctcccc

SEQ ID NO: 349799 - DNA, 8035 bp, Homo sapiens
gcggaggcaagctcagagcgcacggacagagcggtagcgcgcgcccgcgcgcgttcttagtactctccccggtgacgtgcctgaccgaggccgcgccagggcgctgttgctgccaatacagctgtcatggcgtccaaggcgctggctgcggagaagtggccgcggtctccatagagctgggggcgggcggcccggtatggagagcagccccgagagcctgcagccgctagaacacggggtggcggccgggccagcgtcagggacaggttcttcgcaggaagggctacaggagaccaggctcgccgctggtgatggtcctggggtatgggcggcggagaccagcggcgggaatgggctgggggcggcggccgccaggaggagcctcccggactcggcttctcccgcgggctctcctgaggttcccggaccctgcagctcctccgcgggtttggacttgaaggacagtggtttggagagtcctgctgccgccgaggcgcctctgagagggcagtacaaggtgaccgcctccccggagacagccgtggccggagtgggtcatgagttgggtaccgccggagacgcgggagcccgcccggatctcgccggcacctgccaagcagaactgaccgccgccggctccgaagagcccagcagcgccggcggcctcagcagcagttgcagcgacccgagccctcctggggaatctccgagcctggactctctggagtcgttctctaacctgcattcttttcccagtagctgcgagttcaatagtgaggagggagcggagaacagggtccctgaggaggaggagggcgcggcggtgttgcccggggctgttcctctgtgcaaggaggaggagggggaggagaccgctcaggtgctggcggcctccaaggaacgcttcccgggacaatctgtgtatcacatcaagtggatccagtggaaggaagagaacacacccatcatcacccagaatgagaacggaccctgccccttgctggccatcctcaatgttttgctcctggcctggaaggtgaaacttccaccgatgatggaaatcataactgctgagcagctgatggaatatttaggagattacatgcttgatgcaaagccaaaagaaatttcagaaattcaacgtttaaattatgaacagaatatgagtgatgccatggcaattttgcacaaactacagacaggcctggatgtaaatgtaagattcactggtgttcgagtgtttgaatatacaccagaatgcatagtatttgatcttcttgatattcctttgtaccatgggtggttagtagaccctcagattgatgacattgtaaaagctgttggtaactgcagctacaaccaactagtggagaagatcatctcttgtaaacagtcagacaatagtgagctggttagtgaaggctttgtagctgagcagtttctaaataacacagccactcaactgacataccatggattatgtgaactaacttcaacggttcaggaaggagaactttgtgtgttctttcggaataatcattttagcaccatgaccaaatacaagggtcaactgtatttgttggtaacggaccaggggtttcttactgaagagaaagttgtttgggaaagcctacacaacgtagatggtgatggaaatttctgtgactcagaatttcatcttcgacctccttcagatcctgaaactgtatacaaaggacaacaagatcagatagatcaggattatcttatggcattatctctacaacaagaacagcagagccaagagatcaattgggaacaaatcccggaaggaatcagtgatttggaactagcaaagaaactccaagaggaagaggacagacgggcttctcaatactatcaggaacaggaacaagcagcagctgctgctgctgctgcttctacacaggctcagcagggccagccagcacaagcctctccatcaagtggaagacaatctgggaatagtgaacgtaaacggaaggaaccacgagaaaaagataaagaaaaagaaaaggaaaaaaatagctgtgttattttgtaacaagtgttggcttctgttggaaccacctatatgtcttgagaaacaaaaccacaggaggaaaggaagaaaaaccgatcaataccgtctgtgcctgatttcctaatggattttgttcgttttttcaggggaacggttgttacttagttacaatcagactttttcaagtcacacaatacactctttatgagctggagtttcatgttacaagttggaaatgctgtgtgttgtcattcatgaaaaatactgcacttgtagccagattagcaaatcacagcaaattttgtgtcatagtgacattcataactcatatcagttagtaagctattatatcttctgttctaacaatgaatggaggtaattgatttagtctgattccttcctgaaatctaaatattagcacaatagtttctgaaattttacaatgttaaattatgatctaattcatgagaaaccacgggtttaacatagggattcaaaaaaacaaaaacaaaagaataggaataaataacccttaattgtatattggactagttcagcccttaaacagctttacctttatttaggaatgtacattttaggtattatcttgatcatggagcttagatttaatttagatagcaaaaataaagatttgtatttcttttccaatagcaaaaagttacataacactaatacttataacctatcaatatcagatattaatgactttgtagtgttgtaaaattttgaggaattttggagtctttatcataggtaacctggaccacagttactatttattgacaatgtgattgagtgtatggaggaaagcacagtggatgctaggctttgtaaatatggggatgtagaaaagcagatagttcagtgtctacctttttctagaactaccttgaaccttaaattttaagtcatgttcattgctagaaaattaaatgtacttattaaaaccaatgaaaaagcacatttctgaaatgaagttagagataatctctgtgtcttataaaaagacattaataaaaatctgaaagggccgggcgcagtggctcacgcctgtaatcccaacattttgggaggccaaggtgggcggatcatctgaggccaggagttcgagaccagcctggccagcatggtgaaaccctgtctctactaaaaatacaaaaaatcagcctggcatggtggtgcgtgcctgtagtcccagctactcagggctgaggcaggagaattgcttgaacccggcaggcagaggttgcagtgagccgagatcgccctgctgcactccagcctgggtgacagagggagactccgtctcaaaaaaaaaaaagtctgagagtagctaagaatttatgtaaaagcaatcagagtttttaatttatgggaaccaaataaaactataacctcatagtgtttataagaactcagaaataatatttatttaactttattatgaggccacacatattttcctgtgtttctatatatagtttggaaaactatccttaatagtctgttttatatgccttatatttaaaagtttgttttagttattttgaaagactattgctgctgcaaatagttgtgtgctttacattctaagcttcagtacatttatttaagagcatcataatctgacctgagcatccacttggagagtgttttttttgtgtgtggtctggggtgacaaaagaccacaaaaatgtgtggtctggattttttcaactatgtcattaactttatgatccaagaccagttataggatgaatctgtatgtaaaaatagagtcttatttatggaaggaattattctaagggaaaaatccagggtcaagctgtatcttttatgtcctttatattgcatgtctatttctgttacacaatttgttatttcttcaaatttcctatggtagcatgataaatcatcaaagaacctgtttgggatataaaactctgatagaaaatatttaatgagtatcttgattataacctagaatatgtatacgttagtaaaataaccagatatactacagaactctctattggctcaaacaggttgacctcaatccaagtttactcttgatatcactctgttggctgaaggaggtaactcaaacctcagggtttgtttttcccgggacagatagtagtgatagtgcattatatttgaataagaaaaacaaaccagtataccttgagaaattttaaaaagcatagttgaggcatattttttcataattatatacttatctgtttattgcccatggaaaatatatgtgtagaagtatttcttctgttatttgttactatcttcttaatttgttccaaagaaaatgctgccatactgcattccctctggaaggaaacaaaacaaaacaaaactcactcaaaaccagcagtgctgctatcagataagtagatgtcaatgtatacttacaaggaaaaactaaaaaatgtaatgtgttaattcagcctttttctatgtaatatttccaagtcagactttcttacattcctggaatttactttgatataccaagaataataatgataaaatgtttgctttgattactgtggggggaaagatgaaatgttcaattgtattaaaacaaacaagcttttcagagatactggtttcctgcccttgaagggtataaagaatttagatcatgcctgtaatcccagtactttgggaggccgaggcaggtggatcacctgagatcaggagttcgagaccagcctggccaacatggcaaaaccctgtctctactaaaaatacaataattagccaggcatggtggcgggcacctgtcatcccagctacttgggaggctgaggcaggagaatcgcttgaacccaggaggcagtgattgcagtgagctgagatagcaccactgcatgcaagcctgggcaatagagcgagactccgtctcaaaaaaaaaaaaaaaaaaaaaaaattagagctattgtgtctttattttcttaaattttgcccaaggtaacgttatatatcccaccacttcattgctggtttgggtacataggattttgaaagtggtatattaaagtctttccttccaagtattttgtaatacttgaaaattcttagatgtatactgctaacaaaagttagaacttaaacatttttgtttttatcatttatagcctagattagggacatatttgcatcaaccaaatcatcattagatttgaaaataggcagatgaatgaacaaatatggtcattgcactttccttttactttcagagtctaagtatattccttaaggttagtaaccagtctttattaaaaatataaaatttttcttcatgtctaatcccattgcatccacaatgctgtgatttatagtacatgatcaacacttaaaagtactttacatatgtgtgtttctgaagcaagttttcatgacctctgttagattctcaaaagaattcagaacttcaatttaagaatcaccattttaagaatacatgtgtacatatacacattaagcagtataaagcagctaaaattggcattggttttacactggtgcagtgtgcttaggtaaagtaacttcttccatgtttcaaggtcaggttcagagttgaatgaagtgtagatttaaatttaggattaggctttggaatatatcttgtttttattgtctcacatttctgatattgactacttatcccatattctgtttcaaattctttatcatatttcaagttctttctcatacttcttgatcttggcttaactaagcaagttagtatcagagactagttgactgaacccaagattaaacattttgcacttgcacaaaaccttcttagcattttgctttcaatgaatcagaaagtcaattcactaagagacagatcatgagaggaaagagaactagaggccaataaataaaataattgttcatatattaatgttcacatgtgaactacatatctaaaatcttggagaaaaatcaaggcaagaatttccagaactgtcctcaaatagctcatttatttaagttttgttaaaaagcaaaagcgaattgattacatttgattaacttttcctattccatgcacaagttaccttaaaacatgataaaaaccttatgggcattacctatcacacagtacttatgcataaacttataatagtaaaattactaatgtttgataaaataagatggaggcattacaaatagtctacagtttgtattttaaggaattggacatgaagaattctagatcattttgtgtctataaacccgactttctatcttgccttgggcaaactttctgtgcctcaatgtactctttaaatatgtgaaggatgctctttttgattaagtgttttgcactcctgaataaagggcatagtataagcacaaagtatgacttaatttatcacaaatattacacatcctatgttcttgaatgtgcacacttttttctcaataacaaaatatatcttaagtcagtttttttaatgctgtcaaaatttgtagaattttctttgagtatggcatgatctcttcccaaatgcattttacagttttttgtgtgttctatagactatagagtcaaaatcaagagtattttgagaggatcagaagcatttaaaaatctatttttttctagtatctttcacagatctaaatatttagattctctttgcctttttctccatggaatacggtggtatcaaattactaatacagtatataaacttcgtttgcattggtggaattcatttagatctctcaagtaatattattttagggctatataaattgtgtttttagtgtaaaatgttatttgataatgtgaagttaaatcccttttagaaagtgactgaaaatggtaaaggaactcatcagaatcttagcgttcttaagttctctgataatttagtatattttattaatgatgtccaacacctctaagattgttgagaaaacatgaagaattgaggttactcttctcaggtgacactttaaatattaaaatcagaggcttcctgaacaaaacaaattgcaaaatagcgataatggcatgggagaggccagatgcaggactctggtaaatttaacttactttgaatatctatctaaattttagttcatgcatgttcttacttaatcctggtgtttttgctcttagatgttagagtttaataaattgtgatacgcatatatttttttacatgaaggattctactttctaattttacttttctgatctcaagaaaattaaacttgaaaaacggggtaaaattcttcaactattgcctcaagttcagttttgtcctattgtcctgagaaaggagatttagacttgtctgcctaacacaggtattttttagggcatcgtactatcccagagaaagtgttgagataccatggcagaaatataaaacctaagctttgaaccccagtagacttcttcttctgccattaagtctctctttatctgatattctaaggatttcttcaaactacttaataatttgtcaccattaactttaatatccagttttaatctgcactgtaatatcctgctttgagaagaaagaatgcctcataaattagagaagtacaaaacaaaatgttttggaaggtgatcctggctcctttggctctcataattgttttatagctgaaaataaaaagtcaggaaactggcccggtgcggtggctcatgcctgtaatcccagcactttgggaggctgaggtgggtggatcacctgaagtcaggagttcgagaccagcctggccaacatggtgaaaccctgtctctactaaaaatacaaaaaaaattagctgggtgtggtggcacatgcctgtaatcccagccactggggaggttgaggcgcaagaatcgcttgaacccggaaggcagaggttgcagtgagccaagattgccccactgcactccagcctgggcgactgagcgagactcttatatctcaaaaa

SEQ ID NO: 349800 - DNA, 4534 bp, Homo sapiens
atcagaccaccgagccaactatctctcaagctagaccatggccatcccgcttatgagcgggcgcagtgattataggctttcgcgctaagattagaactgccctagcccacttcttaccgaggaaggcacacctacaccccttatccccatactagttataattcagacgcaacttggcatcataatctgacctgagcatccacttggagagtgttttttttgtgtgtggtctggggtgacaaaagaccacaaaaatgtgtggtctggattttttcaactatgtcattaactttatgatccaagaccagttataggatgaatctgtatgtaaaaatagagtcttatttatggaaggaattattctaagggaaaaatccagggtcaagctgtatcttttatgtcctttatattgcatgtctatttctgttacacaatttgttatttcttcaaatttcctatggtagcatgataaatcatcaaagaacctgtttgggatataaaactctgatagaaaatatttaatgagtatcttgattataacctagaatatgtatacgttagtaaaataaccagatatactacagaactctctattggctcaaacaggttgacctcaatccaagtttactcttgatatcactctgttggctgaaggaggtaactcaaacctcagggtttgtttttcccgggacagatagtagtgatagtgcattatatttgaataagaaaaacaaaccagtataccttgagaaattttaaaaagcatagttgaggcatattttttcataattatatacttatctgtttattgcccatggaaaatatatgtgtagaagtatttcttctgttatttgttactatcttcttaatttgttccaaagaaaatgctgccatactgcattccctctggaaggaaacaaaacaaaacaaaactcactcaaaaccagcagtgctgctatcagataagtagatgtcaatgtatacttacaaggaaaaactaaaaaatgtaatgtgttaattcagcctttttctatgtaatatttccaagtcagactttcttacattcctggaatttactttgatataccaagaataataatgataaaatgtttgctttgattactgtggggggaaagatgaaatgttcaattgtattaaaacaaacaagcttttcagagatactggtttcctgcccttgaagggtataaagaatttagatcatgcctgtaatcccagtactttgggaggccgaggcaggtggatcacctgagatcaggagttcgagaccagcctggccaacatggcaaaaccctgtctctactaaaaatacaataattagccaggcatggtggcgggcacctgtcatcccagctacttgggaggctgaggcaggagaatcgcttgaacccaggaggcagtgattgcagtgagctgagatagcaccactgcatgcaagcctgggcaatagagcgagactccgtctcaaaaaaaaaaaaaaaaaaaaaaaattagagctattgtgtctttattttcttaaattttgcccaaggtaacgttatatatcccaccacttcattgctggtttgggtacataggattttgaaagtggtatattaaagtctttccttccaagtattttgtaatacttgaaaattcttagatgtatactgctaacaaaagttagaacttaaacatttttgtttttatcatttatagcctagattagggacatatttgcatcaaccaaatcatcattagatttgaaaataggcagatgaatgaacaaatatggtcattgcactttccttttactttcagagtctaagtatattccttaaggttagtaaccagtctttattaaaaatataaaatttttcttcatgtctaatcccattgcatccacaatgctgtgatttatagtacatgatcaacacttaaaagtactttacatatgtgtgtttctgaagcaagttttcatgacctctgttagattctcaaaagaattcagaacttcaatttaagaatcaccattttaagaatacatgtgtacatatacacattaagcagtataaagcagctaaaattggcattggttttacactggtgcagtgtgcttaggtaaagtaacttcttccatgtttcaaggtcaggttcagagttgaatgaagtgtagatttaaatttaggattaggctttggaatatatcttgtttttattgtctcacatttctgatattgactacttatcccatattctgtttcaaattctttatcatatttcaagttctttctcatacttcttgatcttggcttaactaagcaagttagtatcagagactagttgactgaacccaagattaaacattttgcacttgcacaaaaccttcttagcattttgctttcaatgaatcagaaagtcaattcactaagagacagatcatgagaggaaagagaactagaggccaataaataaaataattgttcatatattaatgttcacatgtgaactacatatctaaaatcttggagaaaaatcaaggcaagaatttccagaactgtcctcaaatagctcatttatttaagttttgttaaaaagcaaaagcgaattgattacatttgattaacttttcctattccatgcacaagttaccttaaaacatgataaaaaccttatgggcattacctatcacacagtacttatgcataaacttataatagtaaaattactaatgtttgataaaataagatggaggcattacaaatagtctacagtttgtattttaaggaattggacatgaagaattctagatcattttgtgtctataaacccgactttctatcttgccttgggcaaactttctgtgcctcaatgtactctttaaatatgtgaaggatgctctttttgattaagtgttttgcactcctgaataaagggcatagtataagcacaaagtatgacttaatttatcacaaatattacacatcctatgttcttgaatgtgcacacttttttctcaataacaaaatatatcttaagtcagtttttttaatgctgtcaaaatttgtagaattttctttgagtatggcatgatctcttcccaaatgcattttacagttttttgtgtgttctatagactatagagtcaaaatcaagagtattttgagaggatcagaagcatttaaaaatctatttttttctagtatctttcacagatctaaatatttagattctctttgcctttttctccatggaatacggtggtatcaaattactaatacagtatataaacttcgtttgcattggtggaattcatttagatctctcaagtaatattattttagggctatataaattgtgtttttagtgtaaaatgttatttgataatgtgaagttaaatcccttttagaaagtgactgaaaatggtaaaggaactcatcagaatcttagcgttcttaagttctctgataatttagtatattttattaatgatgtccaacacctctaagattgttgagaaaacatgaagaattgaggttactcttctcaggtgacactttaaatattaaaatcagaggcttcctgaacaaaacaaattgcaaaatagcgataatggcatgggagaggccagatgcaggactctggtaaatttaacttactttgaatatctatctaaattttagttcatgcatgttcttacttaatcctggtgtttttgctcttagatgttagagtttaataaattgtgatacgcatatatttttttacatgaaggattctactttctaattttacttttctgatctcaagaaaattaaacttgaaaaacggggtaaaattcttcaactattgcctcaagttcagttttgtcctattgtcctgagaaaggagatttagacttgtctgcctaacacaggtattttttagggcatcgtactatcccagagaaagtgttgagataccatggcagaaatataaaacctaagctttgaaccccagtagacttcttcttctgccattaagtctctctttatctgatattctaaggatttcttcaaactacttaataatttgtcaccattaactttaatatccagttttaatctgcactgtaatatcctgctttgagaagaaagaatgcctcataaattagagaagtacaaaacaaaatgttttggaaggtgatcctggctcctttggctctcataattgttttatagctgaaaataaaaagtcaggaaactggcccggtgcggtggctcatgcctgtaatcccagcactttgggaggctgaggtgggtggatcacctgaagtcaggagttcgagaccagcctggccaacatggtgaaaccctgtctctactaaaaatacaaaaaaaattagctgggtgtggtggcacatgcctgtaatcccagccactggggaggttgaggcgcaagaatcgcttgaacccggaaggcagaggttgcagtgagccaagattgccccactgcactccagcctgggcgactgagcgagactcttatatctcaaaaa

SEQ ID NO: 349801 - DNA, 4218 bp, Homo sapiens
gtgactgtaatgtatttttcaggaatttgtatggtatttttctattttgtgaaatgagattataaacccccccaaaggtgtttataagtcatacattagctgaacatgccaagagctcttatttcttgttatagtgtagtgtgccaattataaactatattcaaagccgagtggatttgaggaagtaaaatatctacttggtctatttattgtgttgtacagatctaaacagtaggaatgtttaatatattctgaagatacagattgtaaaactttccttaaatattatattactagttttgatcaatttaacagtcctttttcttttgttacttcttattaagggtcaactgtatttgttggtaacggaccaggggtttcttactgaagagaaagttgtttgggaaagcctacacaacgtagatggtgatggaaatttctgtgactcagaatttcatcttcgacctccttcagatcctgaaactctgtttattgcccatggaaaatatatgtgtagaagtatttcttctgttatttgttactatcttcttaatttgttccaaagaaaatgctgccatactgcattccctctggaaggaaacaaaacaaaacaaaactcactcaaaaccagcagtgctgctatcagataagtagatgtcaatgtatacttacaaggaaaaactaaaaaatgtaatgtgttaattcagcctttttctatgtaatatttccaagtcagactttcttacattcctggaatttactttgatataccaagaataataatgataaaatgtttgctttgattactgtggggggaaagatgaaatgttcaattgtattaaaacaaacaagcttttcagagatactggtttcctgcccttgaagggtataaagaatttagatcatgcctgtaatcccagtactttgggaggccgaggcaggtggatcacctgagatcaggagttcgagaccagcctggccaacatggcaaaaccctgtctctactaaaaatacaataattagccaggcatggtggcgggcacctgtcatcccagctacttgggaggctgaggcaggagaatcgcttgaacccaggaggcagtgattgcagtgagctgagatagcaccactgcatgcaagcctgggcaatagagcgagactccgtctcaaaaaaaaaaaaaaaaaaaaaaaattagagctattgtgtctttattttcttaaattttgcccaaggtaacgttatatatcccaccacttcattgctggtttgggtacataggattttgaaagtggtatattaaagtctttccttccaagtattttgtaatacttgaaaattcttagatgtatactgctaacaaaagttagaacttaaacatttttgtttttatcatttatagcctagattagggacatatttgcatcaaccaaatcatcattagatttgaaaataggcagatgaatgaacaaatatggtcattgcactttccttttactttcagagtctaagtatattccttaaggttagtaaccagtctttattaaaaatataaaatttttcttcatgtctaatcccattgcatccacaatgctgtgatttatagtacatgatcaacacttaaaagtactttacatatgtgtgtttctgaagcaagttttcatgacctctgttagattctcaaaagaattcagaacttcaatttaagaatcaccattttaagaatacatgtgtacatatacacattaagcagtataaagcagctaaaattggcattggttttacactggtgcagtgtgcttaggtaaagtaacttcttccatgtttcaaggtcaggttcagagttgaatgaagtgtagatttaaatttaggattaggctttggaatatatcttgtttttattgtctcacatttctgatattgactacttatcccatattctgtttcaaattctttatcatatttcaagttctttctcatacttcttgatcttggcttaactaagcaagttagtatcagagactagttgactgaacccaagattaaacattttgcacttgcacaaaaccttcttagcattttgctttcaatgaatcagaaagtcaattcactaagagacagatcatgagaggaaagagaactagaggccaataaataaaataattgttcatatattaatgttcacatgtgaactacatatctaaaatcttggagaaaaatcaaggcaagaatttccagaactgtcctcaaatagctcatttatttaagttttgttaaaaagcaaaagcgaattgattacatttgattaacttttcctattccatgcacaagttaccttaaaacatgataaaaaccttatgggcattacctatcacacagtacttatgcataaacttataatagtaaaattactaatgtttgataaaataagatggaggcattacaaatagtctacagtttgtattttaaggaattggacatgaagaattctagatcattttgtgtctataaacccgactttctatcttgccttgggcaaactttctgtgcctcaatgtactctttaaatatgtgaaggatgctctttttgattaagtgttttgcactcctgaataaagggcatagtataagcacaaagtatgacttaatttatcacaaatattacacatcctatgttcttgaatgtgcacacttttttctcaataacaaaatatatcttaagtcagtttttttaatgctgtcaaaatttgtagaattttctttgagtatggcatgatctcttcccaaatgcattttacagttttttgtgtgttctatagactatagagtcaaaatcaagagtattttgagaggatcagaagcatttaaaaatctatttttttctagtatctttcacagatctaaatatttagattctctttgcctttttctccatggaatacggtggtatcaaattactaatacagtatataaacttcgtttgcattggtggaattcatttagatctctcaagtaatattattttagggctatataaattgtgtttttagtgtaaaatgttatttgataatgtgaagttaaatcccttttagaaagtgactgaaaatggtaaaggaactcatcagaatcttagcgttcttaagttctctgataatttagtatattttattaatgatgtccaacacctctaagattgttgagaaaacatgaagaattgaggttactcttctcaggtgacactttaaatattaaaatcagaggcttcctgaacaaaacaaattgcaaaatagcgataatggcatgggagaggccagatgcaggactctggtaaatttaacttactttgaatatctatctaaattttagttcatgcatgttcttacttaatcctggtgtttttgctcttagatgttagagtttaataaattgtgatacgcatatatttttttacatgaaggattctactttctaattttacttttctgatctcaagaaaattaaacttgaaaaacggggtaaaattcttcaactattgcctcaagttcagttttgtcctattgtcctgagaaaggagatttagacttgtctgcctaacacaggtattttttagggcatcgtactatcccagagaaagtgttgagataccatggcagaaatataaaacctaagctttgaaccccagtagacttcttcttctgccattaagtctctctttatctgatattctaaggatttcttcaaactacttaataatttgtcaccattaactttaatatccagttttaatctgcactgtaatatcctgctttgagaagaaagaatgcctcataaattagagaagtacaaaacaaaatgttttggaaggtgatcctggctcctttggctctcataattgttttatagctgaaaataaaaagtcaggaaactggcccggtgcggtggctcatgcctgtaatcccagcactttgggaggctgaggtgggtggatcacctgaagtcaggagttcgagaccagcctggccaacatggtgaaaccctgtctctactaaaaatacaaaaaaaattagctgggtgtggtggcacatgcctgtaatcccagccactggggaggttgaggcgcaagaatcgcttgaacccggaaggcagaggttgcagtgagccaagattgccccactgcactccagcctgggcgactgagcgagactcttatatctcaaaaa

SEQ ID NO: 349802 - DNA, 546 bp, Homo sapiens
gaaaaagaataactttttgattttgaaattattcttctatctaatgttatgcattggttctataggctttgtagctgagcagtttctaaataacacagccactcaactgacataccatggattatgtgaactaacttcaacggttcaggaaggagaactttgtgtgttctttcggaataatcattttagcaccatgaccaaatacaaggtatgatatagaaatagctatttaatcgtgattctaaatcaaaggagcttgatttagagttgtcttttgatctgcttataaataaaagattttagcgtaatatttcttaaccatcaaattatgaaggtaattattaaatacagtacttcttaaggatgggatggattaacaattgaagcattacctcaaatcactttttgttttttaattctcaacttctttttcacagatctttgcagtaagaagtattttattattttctttctgagagaaaaaaaagataaaccctagagatagaactaggatgacttctttttttttttttttgaaatggaatt

SEQ ID NO: 349803 - DNA, 4980 bp, Homo sapiens
gcggaggcaagctcagagcgcacggacagagcggtagcgcgcgcccgcgcgcgttcttagtactctccccggtgacgtgcctgaccgaggccgcgccagggcgctgttgctgccaatacagctgtcatggcgtccaaggcgctggctgcggagaagtggccgcggtctccatagagctgggggcgggcggcccggtatggagagcagccccgagagcctgcagccgctagaacacggggtggcggccgggccagcgtcagggacaggttcttcgcaggaagggctacaggagaccaggctcgccgctggtgatggtcctggggtatgggcggcggagaccagcggcgggaatgggctgggggcggcggccgccaggaggagcctcccggactcggcttctcccgcgggctctcctgaggttcccggaccctgcagctcctccgcgggtttggacttgaaggacagtggtttggagagtcctgctgccgccgaggcgcctctgagagggcagtacaaggtgaccgcctccccggagacagccgtggccggagtgggtcatgagttgggtaccgccggagacgcgggagcccgcccggatctcgccggcacctgccaagcagaactgaccgccgccggctccgaagagcccagcagcgccggcggcctcagcagcagttgcagcgacccgagccctcctggggaatctccgagcctggactctctggagtcgttctctaacctgcattcttttcccagtagctgcgagttcaatagtgaggagggagcggagaacagggtccctgaggaggaggagggcgcggcggtgttgcccggggctgttcctctgtgcaaggaggaggagggggaggagaccgctcaggtgctggcggcctccaaggaacgcttcccgggacaatctgtgtatcacatcaagtggatccagtggaaggaagagaacacacccatcatcacccagaatgagaacggaccctgccccttgctggccatcctcaatgttttgctcctggcctggaaggtgaaacttccaccgatgatggaaatcataactgctgagcagctgatggaatatttaggagattacatgcttgatgcaaagccaaaagaaatttcagaaattcaacgtttaaattatgaacagaatatgagtgatgccatggcaattttgcacaaactacagacaggcctggatgtaaatgtaagattcactggtgttcgagtgtttgaatatacaccagaatgcatagtatttgatcttcttgatattcctttgtaccatgggtggttagtagaccctcagattgatgacattgtaaaagctgttggtaactgcagctacaaccaactagtggagaagatcatctcttgtaaacagtcagacaatagtgagctggttagtgaaggctttgtagctgagcagtttctaaataacacagccactcaactgacataccatggattatgtgaactaacttcaacggttcaggaaggagaactttgtgtgttctttcggaataatcattttagcaccatgaccaaatacaagggtcaactgtatttgttggtaacggaccaggggtttcttactgaagagaaagttgtttgggaaagcctacacaacgtagatggtgatggaaatttctgtgactcagaatttcatcttcgacctccttcagatcctgaaactgtatacaaaggacaacaagatcagatagatcaggattatcttatggcattatctctacaacaagaacagcagagccaagagatcaattgggaacaaatcccggaaggaatcagtgatttggaactagcaaagaaactccaagaggaagaggacagacgggcttctcaatactatcaggaacaggaacaagcagcagctgctgctgctgctgcttctacacaggctcagcagggccagccagcacaagcctctccatcaagtggaagacaatctgggaatagtgaacgtaaacggaaggaaccacgagaaaaagataaagaaaaagaaaaggaaaaaaatagctgtgttattttgtaacaagtgttggcttctgttggaaccacctatatgtcttgagaaacaaaaccacaggaggaaaggaagaaaaaccgatcaataccgtctgtgcctgatttcctaatggattttgttcgttttttcaggggaacggttgttacttagttacaatcagactttttcaagtcacacaatacactctttatgagctggagtttcatgttacaagttggaaatgctgtgtgttgtcattcatgaaaaatactgcacttgtagccagattagcaaatcacagcaaattttgtgtcatagtgacattcataactcatatcagttagtaagctattatatcttctgttctaacaatgaatggaggtaattgatttagtctgattccttcctgaaatctaaatattagcacaatagtttctgaaattttacaatgttaaattatgatctaattcatgagaaaccacgggtttaacatagggattcaaaaaaacaaaaacaaaagaataggaataaataacccttaattgtatattggactagttcagcccttaaacagctttacctttatttaggaatgtacattttaggtattatcttgatcatggagcttagatttaatttagatagcaaaaataaagatttgtatttcttttccaatagcaaaaagttacataacactaatacttataacctatcaatatcagatattaatgactttgtagtgttgtaaaattttgaggaattttggagtctttatcataggtaacctggaccacagttactatttattgacaatgtgattgagtgtatggaggaaagcacagtggatgctaggctttgtaaatatggggatgtagaaaagcagatagttcagtgtctacctttttctagaactaccttgaaccttaaattttaagtcatgttcattgctagaaaattaaatgtacttattaaaaccaatgaaaaagcacatttctgaaatgaagttagagataatctctgtgtcttataaaaagacattaataaaaatctgaaagggccgggcgcagtggctcacgcctgtaatcccaacattttgggaggccaaggtgggcggatcatctgaggccaggagttcgagaccagcctggccagcatggtgaaaccctgtctctactaaaaatacaaaaaatcagcctggcatggtggtgcgtgcctgtagtcccagctactcagggctgaggcaggagaattgcttgaacccggcaggcagaggttgcagtgagccgagatcgccctgctgcactccagcctgggtgacagagggagactccgtctcaaaaaaaaaaaagtctgagagtagctaagaatttatgtaaaagcaatcagagtttttaatttatgggaaccaaataaaactataacctcatagtgtttataagaactcagaaataatatttatttaactttattatgaggccacacatattttcctgtgtttctatatatagtttggaaaactatccttaatagtctgttttatatgccttatatttaaaagtttgttttagttattttgaaagactattgctgctgcaaatagttgtgtgctttacattctaagcttcagtacatttatttaagagcatcataatctgacctgagcatccacttggagagtgttttttttgtgtgtggtctggggtgacaaaagaccacaaaaatgtgtggtctggattttttcaactatgtcattaactttatgatccaagaccagttataggatgaatctgtatgtaaaaatagagtcttatttatggaaggaattattctaagggaaaaatccagggtcaagctgtatcttttatgtcctttatattgcatgtctatttctgttacacaatttgttatttcttcaaatttcctatggtagcatgataaatcatcaaagaacctgtttgggatataaaactctgatagaaaatatttaatgagtatcttgattataacctagaatatgtatacgttagtaaaataaccagatatactacagaactctctattggctcaaacaggttgacctcaatccaagtttactcttgatatcactctgttggctgaaggaggtaactcaaacctcagggtttgtttttcccgggacagatagtagtgatagtgcattatatttgaataagaaaaacaaaccagtataccttgagaaattttaaaaagcatagttgaggcatattttttcataattatatacttatctgtttattgcccatggaaaatatatgtgtagaagtatttcttctgttatttgttactatcttcttaatttgttccaaagaaaatgctgccatactgcattccctctggaaggaaacaaaacaaaacaaaactcactcaaaaccagcagtgctgctatcagataagtagatgtcaatgtatacttacaaggaaaaactaaaaaatgtaatgtgttaattcagcctttttctatgtaatatttccaagtcagactttcttacattcctggaatttactttgatataccaagaataataatgataaaatgtttgctttgattactgtggggggaaagatgaaatgttcaattgtattaaaacaaacaagcttttcagagatactggtttcctgcccttgaagggtataaagaatttagatcatgcctgtaatcccagtactttgggaggccgaggcaggtggatcacctgagatcaggagttcgagaccagcctggccaacatggcaaaaccctgtctctactaaaaatacaataattagccaggcatggtggcgggcacctgtcatcccagctacttgggaggctgaggcaggagaatcgcttgaacccaggaggcagtgattgcagtgagctgagatagcaccactgcatgcaagcctgggcaatagagcgagactcc

SEQ ID NO: 349804 - DNA, 4635 bp, Homo sapiens
gcggaggcaagctcagagcgcacggacagagcggtagcgcgcgcccgcgcgcgttcttagtactctccccggtgacgtgcctgaccgaggccgcgccagggcgctgttgctgccaatacagctgtcatggcgtccaaggcgctggctgcggagaagtggccgcggtctccatagagctgggggcgggcggcccggtatggagagcagccccgagagcctgcagccgctagaacacggggtggcggccgggccagcgtcagggacaggttcttcgcaggaagggctacaggagaccaggctcgccgctggtgatggtcctggggtatgggcggcggagaccagcggcgggaatgggctgggggcggcggccgccaggaggagcctcccggactcggcttctcccgcgggctctcctgaggttcccggaccctgcagctcctccgcgggtttggacttgaaggacagtggtttggagagtcctgctgccgccgaggcgcctctgtgcaaggaggaggagggggaggagaccgctcaggtgctggcggcctccaaggaacgcttcccgggacaatctgtgtatcacatcaagtggatccagtggaaggaagagaacacacccatcatcacccagaatgagaacggaccctgccccttgctggccatcctcaatgttttgctcctggcctggaaggtgaaacttccaccgatgatggaaatcataactgctgagcagctgatggaatatttaggagattacatgcttgatgcaaagccaaaagaaatttcagaaattcaacgtttaaattatgaacagaatatgagtgatgccatggcaattttgcacaaactacagacaggcctggatgtaaatgtaagattcactggtgttcgagtgtttgaatatacaccagaatgcatagtatttgatcttcttgatattcctttgtaccatgggtggttagtagaccctcagattgatgacattgtaaaagctgttggtaactgcagctacaaccaactagtggagaagatcatctcttgtaaacagtcagacaatagtgagctggttagtgaaggctttgtagctgagcagtttctaaataacacagccactcaactgacataccatggattatgtgaactaacttcaacggttcaggaaggagaactttgtgtgttctttcggaataatcattttagcaccatgaccaaatacaagggtcaactgtatttgttggtaacggaccaggggtttcttactgaagagaaagttgtttgggaaagcctacacaacgtagatggtgatggaaatttctgtgactcagaatttcatcttcgacctccttcagatcctgaaactgtatacaaaggacaacaagatcagatagatcaggattatcttatggcattatctctacaacaagaacagcagagccaagagatcaattgggaacaaatcccggaaggaatcagtgatttggaactagcaaagaaactccaagaggaagaggacagacgggcttctcaatactatcaggaacaggaacaagcagcagctgctgctgctgctgcttctacacaggctcagcagggccagccagcacaagcctctccatcaagtggaagacaatctgggaatagtgaacgtaaacggaaggaaccacgagaaaaagataaagaaaaagaaaaggaaaaaaatagctgtgttattttgtaacaagtgttggcttctgttggaaccacctatatgtcttgagaaacaaaaccacaggaggaaaggaagaaaaaccgatcaataccgtctgtgcctgatttcctaatggattttgttcgttttttcaggggaacggttgttacttagttacaatcagactttttcaagtcacacaatacactctttatgagctggagtttcatgttacaagttggaaatgctgtgtgttgtcattcatgaaaaatactgcacttgtagccagattagcaaatcacagcaaattttgtgtcatagtgacattcataactcatatcagttagtaagctattatatcttctgttctaacaatgaatggaggtaattgatttagtctgattccttcctgaaatctaaatattagcacaatagtttctgaaattttacaatgttaaattatgatctaattcatgagaaaccacgggtttaacatagggattcaaaaaaacaaaaacaaaagaataggaataaataacccttaattgtatattggactagttcagcccttaaacagctttacctttatttaggaatgtacattttaggtattatcttgatcatggagcttagatttaatttagatagcaaaaataaagatttgtatttcttttccaatagcaaaaagttacataacactaatacttataacctatcaatatcagatattaatgactttgtagtgttgtaaaattttgaggaattttggagtctttatcataggtaacctggaccacagttactatttattgacaatgtgattgagtgtatggaggaaagcacagtggatgctaggctttgtaaatatggggatgtagaaaagcagatagttcagtgtctacctttttctagaactaccttgaaccttaaattttaagtcatgttcattgctagaaaattaaatgtacttattaaaaccaatgaaaaagcacatttctgaaatgaagttagagataatctctgtgtcttataaaaagacattaataaaaatctgaaagggccgggcgcagtggctcacgcctgtaatcccaacattttgggaggccaaggtgggcggatcatctgaggccaggagttcgagaccagcctggccagcatggtgaaaccctgtctctactaaaaatacaaaaaatcagcctggcatggtggtgcgtgcctgtagtcccagctactcagggctgaggcaggagaattgcttgaacccggcaggcagaggttgcagtgagccgagatcgccctgctgcactccagcctgggtgacagagggagactccgtctcaaaaaaaaaaaagtctgagagtagctaagaatttatgtaaaagcaatcagagtttttaatttatgggaaccaaataaaactataacctcatagtgtttataagaactcagaaataatatttatttaactttattatgaggccacacatattttcctgtgtttctatatatagtttggaaaactatccttaatagtctgttttatatgccttatatttaaaagtttgttttagttattttgaaagactattgctgctgcaaatagttgtgtgctttacattctaagcttcagtacatttatttaagagcatcataatctgacctgagcatccacttggagagtgttttttttgtgtgtggtctggggtgacaaaagaccacaaaaatgtgtggtctggattttttcaactatgtcattaactttatgatccaagaccagttataggatgaatctgtatgtaaaaatagagtcttatttatggaaggaattattctaagggaaaaatccagggtcaagctgtatcttttatgtcctttatattgcatgtctatttctgttacacaatttgttatttcttcaaatttcctatggtagcatgataaatcatcaaagaacctgtttgggatataaaactctgatagaaaatatttaatgagtatcttgattataacctagaatatgtatacgttagtaaaataaccagatatactacagaactctctattggctcaaacaggttgacctcaatccaagtttactcttgatatcactctgttggctgaaggaggtaactcaaacctcagggtttgtttttcccgggacagatagtagtgatagtgcattatatttgaataagaaaaacaaaccagtataccttgagaaattttaaaaagcatagttgaggcatattttttcataattatatacttatctgtttattgcccatggaaaatatatgtgtagaagtatttcttctgttatttgttactatcttcttaatttgttccaaagaaaatgctgccatactgcattccctctggaaggaaacaaaacaaaacaaaactcactcaaaaccagcagtgctgctatcagataagtagatgtcaatgtatacttacaaggaaaaactaaaaaatgtaatgtgttaattcagcctttttctatgtaatatttccaagtcagactttcttacattcctggaatttactttgatataccaagaataataatgataaaatgtttgctttgattactgtggggggaaagatgaaatgttcaattgtattaaaacaaacaagcttttcagagatactggtttcctgcccttgaagggtataaagaatttagatcatgcctgtaatcccagtactttgggaggccgaggcaggtggatcacctgagatcaggagttcgagaccagcctggccaacatggcaaaaccctgtctctactaaaaatacaataattagccaggcatggtggcgggcacctgtcatcccagctacttgggaggctgaggcaggagaatcgcttgaacccaggaggcagtgattgcagtgagctgagatagcaccactgcatgcaagcctgggcaatagagcgagactcc

SEQ ID NO: 349805 - DNA, 4677 bp, Homo sapiens
gcggaggcaagctcagagcgcacggacagagcggtagcgcgcgcccgcgcgcgttcttagtactctccccggtgacgtgcctgaccgaggccgcgccagggcgctgttgctgccaatacagctgtcatggcgtccaaggcgctggctgcggagaagtggccgcggtctccatagagctgggggcgggcggcccggtatggagagcagccccgagagcctgcagccgctagaacacggggtggcggccgggccagcgtcagggacaggttcttcgcaggaagggctacaggagaccaggctcgccgctggtgatggtcctggggtatgggcggcggagaccagcggcgggaatgggctgggggcggcggccgccaggaggagcctcccggactcggcttctcccgcgggctctcctgaggttcccggaccctgcagctcctccgcgggtttggacttgaaggacagtggtttggagagtcctgctgccgccgaggcgcctctgagagggcagtacaaggtgaccgcctccccggagacagccgtggccggagtgggtcatgagttgggtaccgccggagacgcgggagcccgcccggatctcgccggcacctgccaagcagaactgaccgccgccggctccgaagagcccagcagcgccggcggcctcagcagcagttgcagcgacccgagccctcctggggaatctccgagcctggactctctggagtcgttctctaacctgcattcttttcccagtagctgcgagttcaatagtgaggagggagcggagaacagggtccctgaggaggaggagggcgcggcggtgttgcccggggctgttcctctgtgcaaggaggaggagggggaggagaccgctcaggtgctggcggcctccaaggaacgcttcccgggacaatctgtgtatcacatcaagtggatccagtggaaggaagagaacacacccatcatcacccagaatgagaacggaccctgccccttgctggccatcctcaatgttttgctcctggcctggaaggtgaaacttccaccgatgatggaaatcataactgctgagcagctgatggaatatttaggagattacatgcttgatgcaaagccaaaagaaatttcagaaattcaacgtttaaattatgaacagaatatgagtgatgccatggcaattttgcacaaactacagacaggcctggatgtaaatgtaagattcactggtgttcgagtgtttgaatatacaccagaatgcatagtatttgatcttcttgatattcctttgtaccatgggtggttagtagaccctcagattgatgacattgtaaaagctgttggtaactgcagctacaaccaactagtggagaagatcatctcttgtaaacagtcagacaatagtgagctggttagtgaaggctttgtagctgagcagtttctaaataacacagccactcaactgacataccatggattatgtgaactaacttcaacggttcaggaaggagaactttgtgtgttctttcggaataatcattttagcaccatgaccaaatacaagggtcaactgtatttgttggtaacggaccaggggtttcttactgaagagaaagttgtttgggaaagcctacacaacgtagatggtgatggaaatttctgtgactcagaatttcatcttcgacctccttcagatcctgaaactgtatacaaaggacaacaagatcagatagatcaggattatcttatggcattatctctacaacaagaacagcagagccaagagatcaattgggaacaaatcccggaaggaatcagtgatttggaactagcaaagaaactccaagaggaagaggacagacgggcttctcaatactatcaggaacaggaacaagcagcagctgctgctgctgctgcttctacacaggctcagcagggccagccagcacaagcctctccatcaagtggaagacaatctgggaatagtgaacgtaaacggaaggaaccacgagaaaaagataaagaaaaagaaaaggaaaaaaatagctgtgttattttgtaacaagtgttggcttctgttggaaccacctatatgtcttgagaaacaaaaccacaggaggaaaggaagaaaaaccgatcaataccgtctgtgcctgatttcctaatggattttgttcgttttttcaggggaacggttgttacttagttacaatcagactttttcaagtcacacaatacactctttatgagctggagtttcatgttacaagttggaaatgctgtgtgttgtcattcatgaaaaatactgcacttgtagccagattagcaaatcacagcaaattttgtgtcatagtgacattcataactcatatcagttagtaagctattatatcttctgttctaacaatgaatggaggtaattgatttagtctgattccttcctgaaatctaaatattagcacaatagtttctgaaattttacaatgttaaattatgatctaattcatgagaaaccacgggtttaacatagggattcaaaaaaacaaaaacaaaagaataggaataaataacccttaattgtatattggactagttcagcccttaaacagctttacctttatttaggaatgtacattttaggtattatcttgatcatggagcttagatttaatttagatagcaaaaataaagatttgtatttcttttccaatagcaaaaagttacataacactaatacttataacctatcaatatcagatattaatgactttgtagtgttgtaaaattttgaggaattttggagtctttatcataggtaacctggaccacagttactatttattgacaatgtgattgagtgtatggaggaaagcacagtggatgctaggctttgtaaatatggggatgtagaaaagcagatagttcagtgtctacctttttctagaactaccttgaaccttaaattttaagtcatgttcattgctagaaaattaaatgtacttattaaaaccaatgaaaaagcacatttctgaaatgaagttagagataatctctgtgtcttataaaaagacattaataaaaatctgaaagggccgggcgcagtggctcacgcctgtaatcccaacattttgggaggccaaggtgggcggatcatctgaggccaggagttcgagaccagcctggccagcatggtgaaaccctgtctctactaaaaatacaaaaaatcagcctggcatggtggtgcgtgcctgtagtcccagctactcagggctgaggcaggagaattgcttgaacccggcaggcagaggttgcagtgagccgagatcgccctgctgcactccagcctgggtgacagagggagactccgtctcaaaaaaaaaaaagtctgagagtagctaagaatttatgtaaaagcaatcagagtttttaatttatgggaaccaaataaaactataacctcatagtgtttataagaactcagaaataatatttatttaactttattatgaggccacacatattttcctgtgtttctatatatagtttggaaaactatccttaatagtctgttttatatgccttatatttaaaagtttgttttagttattttgaaagactattgctgctgcaaatagttgtgtgctttacattctaagcttcagtacatttatttaagagcatcataatctgacctgagcatccacttggagagtgttttttttgtgtgtggtctggggtgacaaaagaccacaaaaatgtgtggtctggattttttcaactatgtcattaactttatgatccaagaccagttataggatgaatctgtatgtaaaaatagagtcttatttatggaaggaattattctaagggaaaaatccagggtcaagctgtatcttttatgtcctttatattgcatgtctatttctgttacacaatttgttatttcttcaaatttcctatggtagcatgataaatcatcaaagaacctgtttgggatataaaactctgatagaaaatatttaatgagtatcttgattataacctagaatatgtatacgttagtaaaataaccagatatactacagaactctctattggctcaaacaggttgacctcaatccaagtttactcttgatatcactctgttggctgaaggaggtaactcaaacctcagggtttgtttttcccgggacagatagtagtgatagtgcattatatttgaataagaaaaacaaaccagtataccttgagaaattttaaaaagcatagttgaggcatattttttcataattatatacttatctgtttattgcccatggaaaatatatgtgtagaagtatttcttctgttatttgttactatcttcttaatttgttccaaagaaaatgctgccatactgcattccctctggaaggaaacaaaacaaaacaaaactcactcaaaaccagcagtgctgctatcagataagtagatgtcaatgtatacttacaaggaaaaactaaaaaatgtaatgtgttaattcagcctttttctatgtaatatttccaagtcagactttcttacattcctggaatttactttgatataccaagaataataatgataaaatgtttgctttgattactgtggggggaaagatgaaatgttcaattgtattaaaacaaacaagcttttcag

SEQ ID NO: 349806 - DNA, 1388 bp, Homo sapiens
gcggaggcaagctcagagcgcacggacagagcggtagcgcgcgcccgcgcgcgttcttagtactctccccggtgacgtgcctgaccgaggccgcgccagggcgctgttgctgccaatacagctgtcatggcgtccaaggcgctggctgcggagaagtggccgcggtctccatagagctgggggcgggcggcccggtatggagagcagccccgagagcctgcagccgctagaacacggggtggcggccgggccagcgtcagggacaggttcttcgcaggaagggctacaggagaccaggctcgccgctggtgatggtcctggggtatgggcggcggagaccagcggcgggaatgggctgggggcggcggccgccaggaggagcctcccggactcggcttctcccgcgggctctcctgaggttcccggaccctgcagctcctccgcgggtttggacttgaaggacagtggtttggagagtcctgctgccgccgaggcgcctctgagagggcagtacaaggtgaccgcctccccggagacagccgtggccggagtgggtcatgagttgggtaccgccggagacgcgggagcccgcccggatctcgccggcacctgccaagcagaactgaccgccgccggctccgaagagcccagcagcgccggcggcctcagcagcagttgcagcgacccgagccctcctggggaatctccgagcctggactctctggagtcgttctctaacctgcattcttttcccagtagctgcgagttcaatagtgaggagggagcggagaacagggtccctgaggaggaggagggcgcggcggtgttgcccggggctgttcctctgtgcaaggaggaggagggggaggagaccgctcaggtgctggcggcctccaaggaacgcttcccgggacaatctgtgtatcacatcaagtggatccagtggaaggaagagaacacacccatcatcacccagaatgagaacggaccctgccccttgctggccatcctcaatgttttgctcctggcctggaaggtgaaacttccaccgatgatggaaatcataactgctgagcagctgatggaatatttaggagattacatgcttgatgcaaagccaaaagaaatttcagaaattcaacgtttaaattatgaacagaatatgagtgatgccatggcaattttgcacaaactacagacaggcctggatgtaaatgtaagattcactggtgttcgagtgtttgaatatacaccagaatgcatagtatttgatcttcttgatattcctttgtaccatgggtggttagtagaccctcagattgatgacattgtaaaagctgttggtaactgcacctgggcgactgagcgagactcttatatctcaaaaa

SEQ ID NO: 349807 - DNA, 204 bp, Homo sapiens
tggtcggcaaattccttcagtcaccaaactacatagaaatcaacactgtgtttactgagtgtgcggaagttagacagatatgcataaaagggttatttctgttaagccaggatagcagaataagtctctgttgaccctggggaattttccacccggagaacataagtattctggaaccaaagcacactcttcccttcactgtgc

SEQ ID NO: 349808 - DNA, 5227 bp, Homo sapiens
attttcttatgattttccctaaaagaaaaccaaattttctactccacctcttcctttcctatcattccacttattgttgctgctttgctaacagccagcttagtaagccatcacacaagttagtgtgaggcttggttttaaaatagataacagagaatcttgattaaatagtatccaactttgtagcataacacagctaattcaggcaatgacatagagatgataagaaacaacatggtttggtagagggaacatttgatttagactctgcccatttttagctgtatgacttacataagtcattttgtgtccaagcctcattttctcccatatgaaaagtgaaggggttggattaaatgactaaaatccccttccagccctatgagcccaatgtattatgatctctgctttgtttccttcttaagaggcttcctactataaaatgtgacctatttacattttaagttgaagtagcccacaataatgaataatcaatttagatttttctcatctcctttgggagaaattaaattcaagcctctattcatttgatgttttacaacaagcttcaaagttggccatgttcattcacagtttgatattttgagacaccaataaaagttttttaataaaagttcccttgacttaaactcaccttcctaatagaagtagtgatttggctcacggaaaaatgtttccagagtcaacatgagaggactggatgaacctacagcctcactcaagctgttgcatcattgctgctgtagcaacagagccctctctgaatacccaaaacacacaattttctccaacaattctaattgcccacccagtatgggaatttgagagcctttggtgaataaccttgatcactcttttgaaatttggtgcaacacttgcacaatcacggcaactgtttgtaaatatcttttcttctccgccagtatgtagacatgcacacccattcacaagtaagcccgcaaattcattttcacattttcctcttgggtttgtttttatcatgggtatcacattgcaggaagagatgctctaacttacaagaatggaattttctgactatcattgccctcttcaaggcctgattagtttgtagggtggatgggatacaatgcatggtctacaaggtccatgtcaccagccatgatctttaaacaacctcttgcactttctggcactgctgcaatggcccatggtggacacctctgctgtttgtccaaacttctgctaaatagagtagtgttggtatttgttgtgttgtgaactcctttgttgtcagagaagacttcagctcttcaggtttgcaagggcaagatgtaaagctaggactgaaaggattgggttttgtttttcggccggcttttttccattagtgcaaaaaacctgatgcaagggcagcaagataaacacaatttcttcattgacccagataagaacctgtagaaaagtgagagatgcccctaagttcctatttcatttatcctaaataatatcctgaataactactgatcagtttttttctatgtccagccttgcttcactttccaacctccaggccaaatattcattttgatattttacaaaatccttctggtttttacacagggcccttttgtgctgagaataaaaccagctattggaacagacctcactgctttgtagagtcagaagttgacctagagaatgggtagcaacaggtcctcagtttctctggagacacccccaatccttgggtgagtgttgaaacctgacaactgactgttagccttgtcatcatcctcactggagatggagatgttgcagtcggagcctcactccttctggggcactgtttcttctcatggcaaccattttgcctgcctggaaacagcctgttgcctttgctagggggcaaatacacacactagccaaggaagttggtccagcacatctctgaggtttctcccccatggacccatggagcgaattccctgagataaatgatcagaaagttggctgtctggtggtttaatactccataagagttacttcccttatagaaagtcatcctttggcatctagatttttctacaaatcaccttaactccctccctttctctttctcctggaaaacctcagcattgcatctccatgttgcacaacacagatcagattatctggtcactatagagatttgtatataaaaaaactacttttttgaggattttgtatattgtttttctatttgttttctacagcttgaggaaagagctggcaaactgtgaatctaacttgatcttgttgccagcagatatattttggcttcctggtaagagtctgtgttaccagggacaatatattgccctctgatcagtattgcaccctaaatccacaaattcctccagcccagtcttacatttttttaaacaaatcccctagcttgtttgctattatttataaagagcattagaaaatgtatttatagacctggatgttatatgtttaatattaatttagcctttaataatgttataggtttgtaactattcttcagaaattataaagaactcagtgtagactgaattaatctatttagtatctgtaattttgcagacatattttcttacagtattttctatgtaaccacacatgtagaattataactaattagagcacaagaagtttcttcagcaatttagagctaccaattgtttcttgactatatagtcacatttgacaaatttaagaacccagtctttagtgatgcaataaacaaaatgaaccattaagaacaaggaattgcttaaatcccttagctggtgaggatatacatctaaataattcatctttctaactcaaggaatggtgctgattttttaaatgtttgacaccaggccttgtttttccagctgagcattctcattttgcttttctctaagactatcaaagacaaggtattaatagtaggattattcctagatcagaatgtttcatacattcctaaaggtttatgtggaaattggcttaggaaaactttgagtagcagagactgaggatgagtgctagagatgaaatcaggacagatttgttgcagttaattcttgccaagcaaattagtggtaaatgtcacattgttatgtgaattgagcacatatttttaaagaaagtttacaaaaaatttttagaaccaactatgaggcaatactgtatcactgggggctgggagtgggggcttagaatcatactgaaattgtttaaaagcagcccaggtagtttctgtcctcaggtgaataacagactatataacttccccgaaaggtaaaacgatagccactgcagagacgaggtgtcttccttccaccaaatactttctgagatggtggtaggagtagtatttttaccgtggtttaaaaagtagtcagttacatagaaagtgtattggtatgtatttgaacctgctcttcattaaacaaacagattagatgtaccctcgactggcaataattgtatctattttcaagtacagctagctgtcaaagcatgaagctcttgtgtatacacactgacacttggttcacgcatgaagaacagtgcctatgcactttgtgtagctataatgtaggtatctaggtgtaatttcagtgaaatggtgtatagatgtattgtaatttaaatgtatatgttatttttggctattcatctaaatgcagtagacatgttgatcggtgttttgcaaacatttctttttccttcttagataactagtcgtgaatcatttctcctctttctcagtgtggcttgggaatatatatgagtgaagaatttatctgtgaatcctttgtactgatgattgtttgaaagtctgtgtgtgtccagcacctttgtaaatacacaattcagagcagggatgggctgggtgtgtgtcctggttcttagtgaaaggtcatctcatgtctgtttaatacatggtgaatgcaactgtggaacttttgattacctagacttaggtaggtttagaatgagaacatccatctacagtcctcctttgcttggtggattgggctcagaggaacaaaaagttagtctgactctgtgcatattagcatcatgtctttagagaaaggtcagcctctctggttgccaaatactcatcatgatgctcatgacttaaaggttctgaggagccttgtctcccttggatttttgagtcagggtacaggaaaaaacattgctgactaactaactgcaaatgcatctgcaggtgaaaccctacgaaagcacagttctggctataaacttcagagttctctgtaaaaaacttagagcactagaagcacaggaatagtgagtgtacagcttatgcggttgtagaggggcaactgatgaacacaggtcccacatatatgagggagtatgacgttctctacctaatatgttctgtgtgcatgttttgaatgattgaagatgggattaactaatgcaagtttacagttgcctcctaaaacacacattctgtataattatcgctaaatacaatgctgtgaggtctatagttcctgtaacccctttctcctccccaaggacagagaagaactagccatgtgctatagggaaccctgagtgccctactcttttcccaagaagggtaaagcctacaatatcatcagggggcatgaagcacattaatttgcagtggctgcttcatatgaggagatatggtggacaggctaatttttccttgaaaatgtggcttcttcaactcctttcaaatttaggatggaatacttcctgaaataaaactgggctttatgcaggattctctttgaaaattcttgtatgtccagaacaaaagataaaactaattgtattcctcacattcacaatccccattggtctgaagtcacgtagcacagagcatctatagcacatagtgtttaaagactaatgaatgcaaaaagataaaatcttcaactaatttttgaattgtttctcatatatgctactagaaaatgccttgttgatgaagcacattttgggtagttgaggtcttttgttttcgcctttagctttctaagctttcttacaatgtggactgattactgtaacatttcacgtgtaaaataactggatattctttatatactggaaataacctgtgaatccaatatttcactaagtgttttaacttttgtgtatatatctctcatcaataaatgtggatttcaattta

SEQ ID NO: 349809 - DNA, 5172 bp, Homo sapiens
attttcttatgattttccctaaaagaaaaccaaattttctactccacctcttcctttcctatcattccacttattgttgctgctttgctaacagccagcttagtaagccatcacacaagttagtgtgaggcttggttttaaaatagataacagagaatcttgattaaatagtatccaactttgtagcataacacagctaattcaggcaatgacatagagatgataagaaacaacatggtttggtagagggaacatttgatttagactctgcccatttttagctgtatgacttacataagtcattttgtgtccaagcctcattttctcccatatgaaaagtgaaggggttggattaaatgactaaaatccccttccagccctatgagcccaatgtattatgatctctgctttgtttccttcttaagaggcttcctactataaaatgtgacctatttacattttaagttgaagtagcccacaataatgaataatcaatttagatttttctcatctcctttgggagaaattaaattcaagcctctattcatttgatgttttacaacaagcttcaaagttggccatgttcattcacagtttgatattttgagacaccaataaaagttttttaataaaagttcccttgacttaaactcaccttcctaatagaagtagtgatttggctcacggaaaaatgtttccagagtcaacatgagaggactggatgaacctacagcctcactcaagctgttgcatcattgctgctgtagcaacagagccctctctgaatacccaaaacacacaattttctccaacaattctaattgcccacccagtatgggaatttgagagcctttggtgaataaccttgatcactcttttgaaatttggtgcaacacttgcacaatcacggcaactgtttgtaaatatcttttcttctccgccagtatgtagacatgcacacccattcacaagtaagcccgcaaattcattttcacattttcctcttgggtttgtttttatcatgggtatcacattgcaggaagagatgctctaacttacaagaatggaattttctgactatcattgccctcttcaaggcctgattagtttgtagggtggatgggatacaatgcatggtctacaaggtccatgtcaccagccatgatctttaaacaacctcttgcactttctggcactgctgcaatggcccatggtggacacctctgctgtttgtccaaacttctgctaaatagagtagtgttggtatttgttgtgttgtgaactcctttgttgtcagagaagacttcagctcttcaggtttgcaagggcaagatgtaaagctaggactgaaaggattgggttttgtttttcggccggcttttttccattagtgcaaaaaacctgatgcaagggcagcaagataaacacaatttcttcattgacccagataagaacctgtagaaaagtgagagatgcccctaagttcctatttcatttatcctaaataatatcctgaataactactgatcagtttttttctatgtccagccttgcttcactttccaacctccaggccaaatattcattttgatattttacaaaatccttctggtttttacacagggcccttttgtgctgagaataaaaccagctattggaacagacctcactgctttgtagagtcagaagttgacctagagaatgggtagcaacaggtcctcagtttctctggagacacccccaatccttgggtgagtgttgaaacctgacaactgactgttagccttgtcatcatcctcactggagatggagatgttgcagtcggagcctcactccttctggggcactgtttcttctcatggcaaccattttgcctgcctggaaacagcctgttgcctttgctagggggcaaatacacacactagccaaggaagttggtccagcacatctctgaggtttctcccccatggacccatggagcgaattccctgagataaatgatcagaaagttggctgtctggtggtttaatactccataagagttacttcccttatagaaagtcatcctttggcatctagatttttctacaaatcaccttaactccctccctttctctttctcctggaaaacctcagcattgcatctccatgttgcacaacacagatcagattatctggtcactatagagatttgtatataaaaaaactacttttttgaggattttgtatattgtttttctatttgttttctacagcttgaggaaagagctggcaaactgtgaatctaacttgatcttgttgccagcagatatattttggcttcctggtaagagtctgtgttaccagggacaatatattgccctctgatcagtattgcaccctaaatccacaaattcctccagcccagtcttacatttttttaaacaaatcccctagcttgtttgctattatttataaagagcattagaaaatgtatttatagacctggatgttatatgtttaatattaatttagcctttaataatgttataggtttgtaactattcttcagaaattataaagaactcagtgtagactgaattaatctatttagtatctgtaattttgcagacatattttcttacagtattttctatgtaaccacacatgtagaattataactaattagagcacaagaagtttcttcagcaatttagagctaccaattgtttcttgactatatagtcacatttgacaaatttaagaacccagtctttagtgatgcaataaacaaaatgaaccattaagaacaaggaattgcttaaatcccttagctggtgaggatatacatctaaataattcatctttctaactcaaggaatggtgctgattttttaaatgtttgacaccaggccttgtttttccagctgagcattctcattttgcttttctctaagactatcaaagacaaggtattaatagtaggattattcctagatcagaatgtttcatacattcctaaaggtttatgtggaaattggcttaggaaaactttgagtagcagagactgaggatgagtgctagagatgaaatcaggacagatttgttgcagttaattcttgccaagcaaattagtggtaaatgtcacattgttatgtgaattgagcacatatttttaaagaaagtttacaaaaaatttttagaaccaactatgaggcaatactgtatcactgggggctgggagtgggggcttagaatcatactgaaattgtttaaaagcagcccaggtagtttctgtcctcaggtgaataacagactatataacttccccgaaaggtaaaacgatagccactgcagagacgaggtgtcttccttccaccaaatactttctgagatggtggtaggagtagtatttttaccgtggtttattaaacaaacagattagatgtaccctcgactggcaataattgtatctattttcaagtacagctagctgtcaaagcatgaagctcttgtgtatacacactgacacttggttcacgcatgaagaacagtgcctatgcactttgtgtagctataatgtaggtatctaggtgtaatttcagtgaaatggtgtatagatgtattgtaatttaaatgtatatgttatttttggctattcatctaaatgcagtagacatgttgatcggtgttttgcaaacatttctttttccttcttagataactagtcgtgaatcatttctcctctttctcagtgtggcttgggaatatatatgagtgaagaatttatctgtgaatcctttgtactgatgattgtttgaaagtctgtgtgtgtccagcacctttgtaaatacacaattcagagcagggatgggctgggtgtgtgtcctggttcttagtgaaaggtcatctcatgtctgtttaatacatggtgaatgcaactgtggaacttttgattacctagacttaggtaggtttagaatgagaacatccatctacagtcctcctttgcttggtggattgggctcagaggaacaaaaagttagtctgactctgtgcatattagcatcatgtctttagagaaaggtcagcctctctggttgccaaatactcatcatgatgctcatgacttaaaggttctgaggagccttgtctcccttggatttttgagtcagggtacaggaaaaaacattgctgactaactaactgcaaatgcatctgcaggtgaaaccctacgaaagcacagttctggctataaacttcagagttctctgtaaaaaacttagagcactagaagcacaggaatagtgagtgtacagcttatgcggttgtagaggggcaactgatgaacacaggtcccacatatatgagggagtatgacgttctctacctaatatgttctgtgtgcatgttttgaatgattgaagatgggattaactaatgcaagtttacagttgcctcctaaaacacacattctgtataattatcgctaaatacaatgctgtgaggtctatagttcctgtaacccctttctcctccccaaggacagagaagaactagccatgtgctatagggaaccctgagtgccctactcttttcccaagaagggtaaagcctacaatatcatcagggggcatgaagcacattaatttgcagtggctgcttcatatgaggagatatggtggacaggctaatttttccttgaaaatgtggcttcttcaactcctttcaaatttaggatggaatacttcctgaaataaaactgggctttatgcaggattctctttgaaaattcttgtatgtccagaacaaaagataaaactaattgtattcctcacattcacaatccccattggtctgaagtcacgtagcacagagcatctatagcacatagtgtttaaagactaatgaatgcaaaaagataaaatcttcaactaatttttgaattgtttctcatatatgctactagaaaatgccttgttgatgaagcacattttgggtagttgaggtcttttgttttcgcctttagctttctaagctttcttacaatgtggactgattactgtaacatttcacgtgtaaaataactggatattctttatatactggaaataacctgtgaatccaatatttcactaagtgttttaacttttgtgtatatatctctcatcaataaatgtggatttcaattta

SEQ ID NO: 349810 - DNA, 3477 bp, Homo sapiens
cttcccggaattcccggggtctgacccacgtcttccttttgacgcgtgggctggagatggagatgttgcagtcggagcctcactccttctggggcactgtttcttctcatggcaaccattttgcctgcctggaaacagcctgttgcctttgctagggggcaaatacacacactagccaaggaagttggtccagcacatctctgaggtttctcccccatggacccatggagcgaattccctgagataaatgatcagaaagttggctgtctggtggtttaatactccataagagttacttcccttatagaaagtcatcctttggcatctagatttttctacaaatcaccttaactccctccctttctctttctcctggaaaacctcagcattgcatctccatgttgcacaacacagatcagattatctggtcactatagagatttgtatataaaaaaactacttttttgaggattttgtatattgtttttctatttgttttctacagcttgaggaaagagctggcaaactgtgaatctaacttgatcttgttgccagcagatatattttggcttcctggtaagagtctgtgttaccagggacaatatattgccctctgatcagtattgcaccctaaatccacaaattcctccagcccagtcttacatttttttaaacaaatcccctagcttgtttgctattatttataaagagcattagaaaatgtatttatagacctggatgttatatgtttaatattaatttagcctttaataatgttataggtttgtaactattcttcagaaattataaagaactcagtgtagactgaattaatctatttagtatctgtaattttgcagacatattttcttacagtattttctatgtaaccacacatgtagaattataactaattagagcacaagaagtttcttcagcaatttagagctaccaattgtttcttgactatatagtcacatttgacaaatttaagaacccagtctttagtgatgcaataaacaaaatgaaccattaagaacaaggaattgcttaaatcccttagctggtgaggatatacatctaaataattcatctttctaactcaaggaatggtgctgattttttaaatgtttgacaccaggccttgtttttccagctgagcattctcattttgcttttctctaagactatcaaagacaaggtattaatagtaggattattcctagatcagaatgtttcatacattcctaaaggtttatgtggaaattggcttaggaaaactttgagtagcagagactgaggatgagtgctagagatgaaatcaggacagatttgttgcagttaattcttgccaagcaaattagtggtaaatgtcacattgttatgtgaattgagcacatatttttaaagaaagtttacaaaaaatttttagaaccaactatgaggcaatactgtatcactgggggctgggagtgggggcttagaatcatactgaaattgtttaaaagcagcccaggtagtttctgtcctcaggtgaataacagactatataacttccccgaaaggtaaaacgatagccactgcagagacgaggtgtcttccttccaccaaatactttctgagatggtggtaggagtagtatttttaccgtggtttaaaaagtagtcagttacatagaaagtgtattggtatgtatttgaacctgctcttcattaaacaaacagattagatgtaccctcgactggcaataattgtatctattttcaagtacagctagctgtcaaagcatgaagctcttgtgtatacacactgacacttggttcacgcatgaagaacagtgcctatgcactttgtgtagctataatgtaggtatctaggtgtaatttcagtgaaatggtgtatagatgtattgtaatttaaatgtatatgttatttttggctattcatctaaatgcagtagacatgttgatcggtgttttgcaaacatttctttttccttcttagataactagtcgtgaatcatttctcctctttctcagtgtggcttgggaatatatatgagtgaagaatttatctgtgaatcctttgtactgatgattgtttgaaagtctgtgtgtgtccagcacctttgtaaatacacaattcagagcagggatgggctgggtgtgtgtcctggttcttagtgaaaggtcatctcatgtctgtttaatacatggtgaatgcaactgtggaacttttgattacctagacttaggtaggtttagaatgagaacatccatctacagtcctcctttgcttggtggattgggctcagaggaacaaaaagttagtctgactctgtgcatattagcatcatgtctttagagaaaggtcagcctctctggttgccaaatactcatcatgatgctcatgacttaaaggttctgaggagccttgtctcccttggatttttgagtcagggtacaggaaaaaacattgctgactaactaactgcaaatgcatctgcaggtgaaaccctacgaaagcacagttctggctataaacttcagagttctctgtaaaaaacttagagcactagaagcacaggaatagtgagtgtacagcttatgcggttgtagaggggcaactgatgaacacaggtcccacatatatgagggagtatgacgttctctacctaatatgttctgtgtgcatgttttgaatgattgaagatgggattaactaatgcaagtttacagttgcctcctaaaacacacattctgtataattatcgctaaatacaatgctgtgaggtctatagttcctgtaacccctttctcctccccaaggacagagaagaactagccatgtgctatagggaaccctgagtgccctactcttttcccaagaagggtaaagcctacaatatcatcagggggcatgaagcacattaatttgcagtggctgcttcatatgaggagatatggtggacaggctaatttttccttgaaaatgtggcttcttcaactcctttcaaatttaggatggaatacttcctgaaataaaactgggctttatgcaggattctctttgaaaattcttgtatgtccagaacaaaagataaaactaattgtattcctcacattcacaatccccattggtctgaagtcacgtagcacagagcatctatagcacatagtgtttaaagactaatgaatgcaaaaagataaaatcttcaactaatttttgaattgtttctcatatatgctactagaaaatgccttgttgatgaagcacattttgggtagttgaggtcttttgttttcgcctttagctttctaagctttcttacaatgtggactgattactgtaacatttcacgtgtaaaataactggatattctttatatactggaaataacctgtgaatccaatatttcactaagtgttttaacttttgtgtatatatctctcatcaataaatgtggatttcaattta

SEQ ID NO: 349811 - DNA, 5253 bp, Homo sapiens
attttcttatgattttccctaaaagaaaaccaaattttctactccacctcttcctttcctatcattccacttattgttgctgctttgctaacagccagcttagtaagccatcacacaagttagtgtgaggcttggttttaaaatagataacagagaatcttgattaaatagtatccaactttgtagcataacacagctaattcaggcaatgacatagagatgataagaaacaacatggtttggtagagggaacatttgatttagactctgcccatttttagctgtatgacttacataagtcattttgtgtccaagcctcattttctcccatatgaaaagtgaaggggttggattaaatgactaaaatccccttccagccctatgagcccaatgtattatgatctctgctttgtttccttcttaagaggcttcctactataaaatgtgacctatttacattttaagttgaagtagcccacaataatgaataatcaatttagatttttctcatctcctttgggagaaattaaattcaagcctctattcatttgatgttttacaacaagcttcaaagttggccatgttcattcacagtttgatattttgagacaccaataaaagttttttaataaaagttcccttgacttaaactcaccttcctaatagaagtagtgatttggctcacggaaaaatgtttccagagtcaacatgagaggactggatgaacctacagcctcactcaagctgttgcatcattgctgctgtagcaacagagccctctctgaatacccaaaacacacaattttctccaacaattctaattgcccacccagtatgggaatttgagagcctttggtgaataaccttgatcactcttttgaaatttggtgcaacacttgcacaatcacggcaactgtttgtaaatatcttttcttctccgccagtatgtagacatgcacacccattcacaagtaagcccgcaaattcattttcacattttcctcttgggtttgtttttatcatgggtatcacattgcaggaagagatgctctaacttacaagaatggaattttctgactatcattgccctcttcaaggcctgattagtttgtagggtggatgggatacaatgcatggtctacaaggtccatgtcaccagccatgatctttaaacaacctcttgcactttctggcactgctgcaatggcccatggtggacacctctgctgtttgtccaaacttctgctaaatagagtagtgttggtatttgttgtgttgtgaactcctttgttgtcagagaagacttcagctcttcaggtttgcaagggcaagatgtaaagctaggactgaaaggattgggttttgtttttcggccggcttttttccattagtgcaaaaaacctgatgcaagggcagcaagataaacacaatttcttcattgacccagataagaacctgtagaaaagtgagagatgcccctaagttcctatttcatttatcctaaataatatcctgaataactactgatcagtttttttctatgtccagccttgcttcactttccaacctccaggccaaatattcattttgatattttacaaaatccttctggtttttacacagggcccttttgtgctgagaataaaaccagctattggaacagacctcactgctttgtagagtcagaagttgacctagagaatgggtagcaacaggtcctcagtttctctggagacacccccaatccttgggtgagtgttgaaacctgacaactgactgttagccttgtcatcatcctcactggagatggagatgttgcagtcggagcctcactccttctggggcactgtttcttctcatggcaaccattttgcctgcctggaaacagcctgttgcctttgctagggggcaaatacacacactagccaaggaagttggtccagcacatctctgaggtttctcccccatggacccatggagcgaattccctgagataaatgatcagaaagttggctgtctggtggtttaatactccataagagttacttcccttatagaaagtcatcctttggcatctagatttttctacaaatcaccttaactccctccctttctctttctcctggaaaacctcagcattgcatctccatgttgcacaacacagatcagattatctggtcactatagagatttgtatataaaaaaactacttttttgaggattttgtatattgtttttctatttgttttctacagcttgaggaaagagctggcaaactgtgaatctaacttgatcttgttgccagcagatatattttggcttcctggtaagagtctgtgttaccagggacaatatattgccctctgatcagtattgcaccctaaatccacaaattcctccagcccagtcttacatttttttaaacaaatcccctagcttgtttgctattatttataaagagcattagaaaatgtatttatagacctggatgttatatgtttaatattaatttagcctttaataatgttataggtttgtaactattcttcagaaattataaagaactcagtgtagactgaattaatctatttagtatctgtaattttgcagacatattttcttacagtattttctatgtaaccacacatgtagaattataactaattagagcacaagaagtttcttcagcaatttagagctaccaattgtttcttgactatatagtcacatttgacaaatttaagaacccagtctttagtgatgcaataaacaaaatgaaccattaagaacaaggaattgcttaaatcccttagctggtgaggatatacatctaaataattcatctttctaactcaaggaatggtgctgattttttaaatgtttgacaccaggccttgtttttccagctgagcattctcattttgcttttctctaagactatcaaagacaaggtattaatagtaggattattcctagatcagaatgtttcatacattcctaaaggtttatgtggaaattggcttaggaaaactttgagtagcagagactgaggatgagtgctagagatgaaatcaggacagatttgttgcagttaattcttgccaagcaaattagtggtaaatgtcacattgttatgtgaattgagcacatatttttaaagaaagtttacaaaaaatttttagaaccaactatgaggcaatactgtatcactgggggctgggagtgggggcttagaatcatactgaaattgtttaaaagcagcccaggtagtttctgtcctcaggtgaataacagactatataacttccccgaaaggtaaaacgatagccactgcagagacgaggtgtcttccttccaccaaatactttctgagatggtggtaggagtagtatttttaccgtggtttaaaaagtagtcagttacatagaaagtgtattggtatgtatttgaacctgctcttcattaaacaaacagattagatgtaccctcgactggcaataattgtatctattttcaagtacagctagctgtcaaagcatgaagctcttgtgtatacacactgacacttggttcacgcatgaagaacagtgcctatgcactttgtgtagctataatgtaggtatctaggtgtaatttcagtgaaatggtgtatagatgtattgtaatttaaatgtatatgttatttttggctattcatctaaatgcagtagacatgttgatcggtgttttgcaaacatttctttttccttcttagataactagtcgtgaatcatttctcctctttctcagtgtggcttgggaatatatatgagtgaagaatttatctgtgaatcctttgtactgatgattgtttgaaagtctgtgtgtgtccagcacctttgtaaatacacaattcagagcagggatgggctgggtgtgtgtcctggttcttagtgaaaggtcatctcatgtctgtttaatacatggtgaatgcaactgtggaacttttgattacctagacttaggtaggtttagaatgagaacatccatctacagtcctcctttgcttggtggattgggctcagaggaacaaaaagttagtctgactctgtgcatattagcatcatgtctttagagaaaggtcagcctctctggttgccaaatactcatcatgatgctcatgacttaaaggttctgaggagccttgtctcccttggatttttgagtcagggtacaggaaaaaacattgctgactaactaactgcaaatgcatctgcaggtgaaaccctacgaaagcacagttctggctataaacttcagagttctctgtaaaaaacttagagcactagaagcacaggaatagtgagtgtacagcttatgcggttgtagaggggcaactgatgaacacaggtcccacatatatgagggagtatgacgttctctacctaatatgttctgtgtgcatgttttgaatgattgaagatgggattaactaatgcaagtttacagttgcctcctaaaacacacattctgtataattatcgctaaatacaatgctgtgaggtctatagttcctgtaacccctttctcctccccaaggacagagaagaactagccatgtgctatagggaaccctgagtgccctactcttttcccaagaagggtaaagcctacaatatcatcagggggcatgaagcacattaatttgcagtggctgcttcatatgaggagatatggtggacaggctaatttttccttgaaaatgtggcttcttcaactcctttcaaatttaggatggaatacttcctgaaataaaactgggctttatgcaggattctctttgaaaattcttgtatgtccagaacaaaagataaaactaattgtattcctcacattcacaatccccattggtctgaagtcacgtagcacagagcatctatagcacatagtgtttaaagactaatgaatgcaaaaagataaaatcttcaactaatttttgaattgtttctcatatatgctactagaaaatgccttgttgatgaagcacattttgggtagttgaggtcttttgttttcgcctttagctttctaagctttcttacaatgtggactgattactgtaacatttcacgtgtaaaataactggatattctttatatactggaaataacctgtgaatccaatatttcactaagtgttttaacttttgtgtatatatctctcatcaataaatgtggatttcaatttacaaaaaaaaaaacttgcccgcgttta

SEQ ID NO: 349812 - DNA, 5443 bp, Homo sapiens
attttcttatgattttccctaaaagaaaaccaaattttctactccacctcttcctttcctatcattccacttattgttgctgctttgctaacagccagcttagtaagccatcacacaagttagtgtgaggcttggttttaaaatagataacagagaatcttgattaaatagtatccaactttgtagcataacacagctaattcaggcaatgacatagagatgataagaaacaacatggtttggtagagggaacatttgatttagactctgcccatttttagctgtatgacttacataagtcattttgtgtccaagcctcattttctcccatatgaaaagtgaaggggttggattaaatgactaaaatccccttccagccctatgagcccaatgtattatgatctctgctttgtttccttcttaagaggcttcctactataaaatgtgacctatttacattttaagttgaagtagcccacaataatgaataatcaatttagatttttctcatctcctttgggagaaattaaattcaagcctctattcatttgatgttttacaacaagcttcaaagttggccatgttcattcacagtttgatattttgagacaccaataaaagttttttaataaaagttcccttgacttaaactcaccttcctaatagaagtagtgatttggctcacggaaaaatgtttccagagtcaacatgagaggactggatgaacctacagcctcactcaagctgttgcatcattgctgctgtagcaacagagccctctctgaatacccaaaacacacaattttctccaacaattctaattgcccacccagtatgggaatttgagagcctttggtgaataaccttgatcactcttttgaaatttggtgcaacacttgcacaatcacggcaactgtttgtaaatatcttttcttctccgccagtatgtagacatgcacacccattcacaagtaagcccgcaaattcattttcacattttcctcttgggtttgtttttatcatgggtatcacattgcaggaagagatgctctaacttacaagaatggaattttctgactatcattgccctcttcaaggcctgattagtttgtagggtggatgggatacaatgcatggtctacaaggtccatgtcaccagccatgatctttaaacaacctcttgcactttctggcactgctgcaatggcccatggtggacacctctgctgtttgtccaaacttctgctaaatagagtagtgttggtatttgttgtgttgtgaactcctttgttgtcagagaagacttcagctcttcaggtttgcaagggcaagatgtaaagctaggactgaaaggattgggttttgtttttcggccggcttttttccattagtgcaaaaaacctgatgcaagggcagcaagataaacacaatttcttcattgacccagataagaacctgtagaaaagtgagagatgcccctaagttcctatttcatttatcctaaataatatcctgaataactactgatcagtttttttctatgtccagccttgcttcactttccaacctccaggccaaatattcattttgatattttacaaaatccttctggtttttacacagggcccttttgtgctgagaataaaaccagctattggaacagacctcactgctttgtagagtcagaagttgacctagagaatgggtagcaacaggtcctcagtttctctggagacacccccaatccttgggtgagtgttgaaacctgacaactgactgttagccttgtcatcatcctcactggagatggagatgttgcagtcggagcctcactccttctggggcactgtttcttctcatggcaaccattttgcctgcctggaaacagcctgttgcctttgctagggggcaaatacacacactagccaaggaagttggtccagcacatctctgaggtttctcccccatggacccatggagcgaattccctgagataaatgatcagaaagttggctgtctggtggtttaatactccataagagttacttcccttatagaaagtcatcctttggcatctagatttttctacaaatcaccttaactccctccctttctctttctcctggaaaacctcagcattgcatctccatgttgcacaacacagatcagattatctggtcactatagagatttgtatataaaaaaactacttttttgaggattttgtatattgtttttctatttgttttctacagcttgaggaaagagctggcaaactgtgaatctaacttgatcttgttgccagcagatatattttggcttcctggtaagagtctgtgttaccagggacaatatattgccctctgatcagtattgcaccctaaatccacaaattcctccagcccagtcttacatttttttaaacaaatcccctagcttgtttgctattatttataaagagcattagaaaatgtatttatagacctggatgttatatgtttaatattaatttagcctttaataatgttataggtttgtaactattcttcagaaattataaagaactcagtgtagactgaattaatctatttagtatctgtaattttgcagacatattttcttacagtattttctatgtaaccacacatgtagaattataactaattagagcacaagaagtttcttcagcaatttagagctaccaattgtttcttgactatatagtcacatttgacaaatttaagaacccagtctttagtgatgcaataaacaaaatgaaccattaagaacaaggaattgcttaaatcccttagctggtgaggatatacatctaaataattcatctttctaactcaaggaatggtgctgattttttaaatgtttgacaccaggccttgtttttccagctgagcattctcattttgcttttctctaagactatcaaagacaaggtattaatagtaggattattcctagatcagaatgtttcatacattcctaaaggtttatgtggaaattggcttaggaaaactttgagtagcagagactgaggatgagtgctagagatgaaatcaggacagatttgttgcagttaattcttgccaagcaaattagtggtaaatgtcacattgttatgtgaattgagcacatatttttaaagaaagtttacaaaaaatttttagaaccaactatgaggcaatactgtatcactgggggctgggagtgggggcttagaatcatactgaaattgtttaaaagcagcccaggtagtttctgtcctcaggtgaataacagactatataacttccccgaaaggtaaaacgatagccactgcagagacgaggtgtcttccttccaccaaatactttctgagatggtggtaggagtagtatttttaccgtggtttaaaaagtagtcagttacatagaaagtgtattggtatgtatttgaacctgctcttcattaaacaaacagattagatgtaccctcgactggcaataattgtatctattttcaagtacagctagctgtcaaagcatgaagctcttgtgtatacacactgacacttggttcacgcatgaagaacagtgcctatgcactttgtgtagctataatgtaggtatctaggtgtaatttcagtgaaatggtgtatagatgtattgtaatttaaatgtatatgttatttttggctattcatctaaatgcagtagacatgttgatcggtgttttgcaaacatttctttttccttcttagataactagtcgtgaatcatttctcctctttctcagtgtggcttgggaatatatatgagtgaagaatttatctgtgaatcctttgtactgatgattgtttgaaagtctgtgtgtgtccagcacctttgtaaatacacaattcagagcagggatgggctgggtgtgtgtcctggttcttagtgaaaggtcatctcatgtctgtttaatacatggtgaatgcaactgtggaacttttgattacctagacttaggtaggtttagaatgagaacatccatctacagtcctcctttgcttggtggattgggctcagaggaacaaaaagttagtctgactctgtgcatattagcatcatgtctttagagaaaggtcagcctctctggttgccaaatactcatcatgatgctcatgacttaaaggttctgaggagccttgtctcccttggatttttgagtcagggtacaggaaaaaacattgctgactaactaactgcaaatgcatctgcaggtgaaaccctacgaaagcacagttctggctataaacttcagagttctctgtaaaaaacttagagcactagaagcacaggaatagtgagtgtacagcttatgcggttgtagaggggcaactgatgaacacaggtcccacatatatgagggagtatgacgttctctacctaatatgttctgtgtgcatgttttgaatgattgaagatgggattaactaatgcaagtttacagttgcctcctaaaacacacattctgtataattatcgctaaatacaatgctgtgaggtctatagttcctgtaacccctttctcctccccaaggacagagaagaactagccatgtgctatagggaaccctgagtgccctactcttttcccaagaagggtaaagcctacaatatcatcagggggcatgaagcacattaatttgcagtggctgcttcatatgaggagatatggtggacaggctaatttttccttgaaaatgtggcttcttcaactcctttcaaatttaggatggaatacttcctgaaataaaactgggctttatgcaggattctctttgaaaattcttgtatgtccagaacaaaagataaaactaattgtattcctcacattcacaatccccattggtctgaagtcacgtagcacagagcatctatagcacatagtgtttaaagactaatgaatgcaaaaagataaaatcttcaactaatttttgaattgtttctcatatatgctactagaaaatgccttgttgatgaagcacattttgggtagttgaggtcttttgttttcgcctttagctttctaagctttcttacaatgtggactgattactgtaacatttcacgtgtaaaataactggatattctttatatactggaaataacctgtgaatccaatatttcactaagtgttttaacttttgtgtatatatctctcatcaataaatgtggatttcaatttaaaaaaaaaaaaaaaaaaaaaaaaaaaaaaaaaaaaaaaaaaaaaaaaaaaaaaaaaaaaaaaaaaaaaaaaaaaaaaaaaaaaaaaaaaaaaaaaaaaaaaaaaattaatgggccgccttttaaaaacgtataaactggaaaacccttggggtacccaaattaaatggctttgaaaaaaatccccttttcccaagttgggaccgccccccccctct

SEQ ID NO: 349813 - DNA, 2188 bp, Homo sapiens
ctctctctctctctctatggctcacgctgtatctgtctctcgatatctctgagtctcagagactgaggatgagtgctagagatgaaatcaggacagatttgttgcagttaattcttgccaagcaaattagtggtaaatgtcacattgttatgtgaattgagcacatatttttaaagaaagtttacaaaaaatttttagaaccaactatgaggcaatactgtatcactgggggctgggagtgggggcttagaatcatactgaaattgtttaaaagcagcccaggtagtttctgtcctcaggtgaataacagactatataacttccccgaaaggtaaaacgatagccactgcagagacgaggtgtcttccttccaccaaatactttctgagatggtggtaggagtagtatttttaccgtggtttattaaacaaacagattagatgtaccctcgactggcaataattgtatctattttcaagtacagctagctgtcaaagcatgaagctcttgtgtatacacactgacacttggttcacgcatgaagaacagtgcctatgcactttgtgtagctataatgtaggtatctaggtgtaatttcagtgaaatggtgtatagatgtattgtaatttaaatgtatatgttatttttggctattcatctaaatgcagtagacatgttgatcggtgttttgcaaacatttctttttccttcttagataactagtcgtgaatcatttctcctctttctcagtgtggcttgggaatatatatgagtgaagaatttatctgtgaatcctttgtactgatgattgtttgaaagtctgtgtgtgtccagcacctttgtaaatacacaattcagagcagggatgggctgggtgtgtgtcctggttcttagtgaaaggtcatctcatgtctgtttaatacatggtgaatgcaactgtggaacttttgattacctagacttaggtaggtttagaatgagaacatccatctacagtcctcctttgcttggtggattgggctcagaggaacaaaaagttagtctgactctgtgcatattagcatcatgtctttagagaaaggtcagcctctctggttgccaaatactcatcatgatgctcatgacttaaaggttctgaggagccttgtctcccttggatttttgagtcagggtacaggaaaaaacattgctgactaactaactgcaaatgcatctgcaggtgaaaccctacgaaagcacagttctggctataaacttcagagttctctgtaaaaaacttagagcactagaagcacaggaatagtgagtgtacagcttatgcggttgtagaggggcaactgatgaacacaggtcccacatatatgagggagtatgacgttctctacctaatatgttctgtgtgcatgttttgaatgattgaagatgggattaactaatgcaagtttacagttgcctcctaaaacacacattctgtataattatcgctaaatacaatgctgtgaggtctatagttcctgtaacccctttctcctccccaaggacagagaagaactagccatgtgctatagggaaccctgagtgccctactcttttcccaagaagggtaaagcctacaatatcatcagggggcatgaagcacattaatttgcagtggctgcttcatatgaggagatatggtggacaggctaatttttccttgaaaatgtggcttcttcaactcctttcaaatttaggatggaatacttcctgaaataaaactgggctttatgcaggattctctttgaaaattcttgtatgtccagaacaaaagataaaactaattgtattcctcacattcacaatccccattggtctgaagtcacgtagcacagagcatctatagcacatagtgtttaaagactaatgaatgcaaaaagataaaatcttcaactaatttttgaattgtttctcatatatgctactagaaaatgccttgttgatgaagcacattttgggtagttgaggtcttttgttttcgcctttagctttctaagctttcttacaatgtggactgattactgtaacatttcacgtgtaaaataactggatattctttatatactggaaataacctgtgaatccaatatttcactaagtgttttaacttttgtgtatatatctctcatcaataaatgtggatttcaattta

SEQ ID NO: 349814 - DNA, 4549 bp, Homo sapiens
attttcttatgattttccctaaaagaaaaccaaattttctactccacctcttcctttcctatcattccacttattgttgctgctttgctaacagccagcttagtaagccatcacacaagttagtgtgaggcttggttttaaaatagataacagagaatcttgattaaatagtatccaactttgtagcataacacagctaattcaggcaatgacatagagatgataagaaacaacatggtttggtagagggaacatttgatttagactctgcccatttttagctgtatgacttacataagtcattttgtgtccaagcctcattttctcccatatgaaaagtgaaggggttggattaaatgactaaaatccccttccagccctatgagcccaatgtattatgatctctgctttgtttccttcttaagaggcttcctactataaaatgtgacctatttacattttaagttgaagtagcccacaataatgaataatcaatttagatttttctcatctcctttgggagaaattaaattcaagcctctattcatttgatgttttacaacaagcttcaaagttggccatgttcattcacagtttgatattttgagacaccaataaaagttttttaataaaagttcccttgacttaaactcaccttcctaatagaagtagtgatttggctcacggaaaaatgtttccagagtcaacatgagaggactggatgaacctacagcctcactcaagctgttgcatcattgctgctgtagcaacagagccctctctgaatacccaaaacacacaattttctccaacaattctaattgcccacccagtatgggaatttgagagcctttggtgaataaccttgatcactcttttgaaatttggtgcaacacttgcacaatcacggcaactgtttgtaaatatcttttcttctccgccagtatgtagacatgcacacccattcacaagtaagcccgcaaattcattttcacattttcctcttgggtttgtttttatcatgggtatcacattgcaggaagagatgctctaacttacaagaatggaattttctgactatcattgccctcttcaaggcctgattagtttgtagggtggatgggatacaatgcatggtctacaaggtccatgtcaccagccatgatctttaaacaacctcttgcactttctggcactgctgcaatggcccatggtggacacctctgctgtttgtccaaacttctgctaaatagagtagtgttggtatttgttgtgttgtgaactcctttgttgtcagagaagacttcagctcttcaggtttgcaagggcaagatgtaaagctaggactgaaaggattgggttttgtttttcggccggcttttttccattagtgcaaaaaacctgatgcaagggcagcaagataaacacaatttcttcattgacccagataagaacctgtagaaaagtgagagatgcccctaagttcctatttcatttatcctaaataatatcctgaataactactgatcagtttttttctatgtccagccttgcttcactttccaacctccaggccaaatattcattttgatattttacaaaatccttctggtttttacacagggcccttttgtgctgagaataaaaccagctattggaacagacctcactgctttgtagagtcagaagttgacctagagaatgggtagcaacaggtcctcagtttctctggagacacccccaatccttgggtgagtgttgaaacctgacaactgactgttagccttgtcatcatcctcactggagatggagatgttgcagtcggagcctcactccttctggggcactgtttcttctcatggcaaccattttgcctgcctggaaacagcctgttgcctttgctagggggcaaatacacacactagccaaggaagttggtccagcacatctctgaggtttctcccccatggacccatggagcgaattccctgagataaatgatcagaaagttggctgtctggtggtttaatactccataagagttacttcccttatagaaagtcatcctttggcatctagatttttctacaaatcaccttaactccctccctttctctttctcctggaaaacctcagcattgcatctccatgttgcacaacacagatcagattatctggtcactatagagatttgtatataaaaaaactacttttttgaggattttgtatattgtttttctatttgttttctacagcttgaggaaagagctggcaaactgtgaatctaacttgatcttgttgccagcagatatattttggcttcctggtaagagtctgtgttaccagggacaatatattgccctctgatcagtattgcaccctaaatccacaaattcctccagcccagtcttacatttttttaaacaaatcccctagcttgtttgctattatttataaagagcattagaaaatgtatttatagacctggatgttatatgtttaatattaatttagcctttaataatgttataggtttgtaactattcttcagaaattataaagaactcagtgtagactgaattaatctatttagtatctgtaattttgcagacatattttcttacagtattttctatgtaaccacacatgtagaattataactaattagagcacaagaagtttcttcagcaatttagagctaccaattgtttcttgactatatagtcacatttgacaaatttaagaacccagtctttagtgatgcaataaacaaaatgaaccattaagaacaaggaattgcttaaatcccttagctggtgaggatatacatctaaataattcatctttctaactcaaggaatggtgctgattttttaaatgtttgacaccaggccttgtttttccagctgagcattctcattttgcttttctctaagactatcaaagacaaggtattaatagtaggattattcctagatcagaatgtttcatacattcctaaaggtttatgtggaaattggcttaggaaaactttgagtagcagagactgaggatgagtgctagagatgaaatcaggacagatttgttgcagttaattcttgccaagcaaattagtggtaaatgtcacattgttatgtgaattgagcacatatttttaaagaaagtttacaaaaaatttttagaaccaactatgaggcaatactgtatcactgggggctgggagtgggggcttagaatcatactgaaattgtttaaaagcagcccaggtagtttctgtcctcaggtgaataacagactatataacttccccgaaaggtaaaacgatagccactgcagagacgaggtgtcttccttccaccaaatactttctgagatggtggtaggagtagtatttttaccgtggtttaaaaagtagtcagttacatagaaagtgtattggtatgtatttgaacctgctcttcattaaacaaacagattagatgtaccctcgactggcaataattgtatctattttcaagtacagctagctgtcaaagcatgaagctcttgtgtatacacactgacacttggttcacgcatgaagaacagtgcctatgcactttgtgtagctataatgtaggtatctaggtgtaatttcagtgaaatggtgtatagatgtattgtaatttaaatgtatatgttatttttggctattcatctaaatgcagtagacatgttgatcggtgttttgcaaacatttctttttccttcttagataactagtcgtgaatcatttctcctctttctcagtgtggcttgggaatatatatgagtgaagaatttatctgtgaatcctttgtactgatgattgtttgaaagtctgtgtgtgtccagcacctttgtaaatacacaattcagagcagggatgggctgggtgtgtgtcctggttcttagtgaaaggtcatctcatgtctgtttaatacatggtgaatgcaactgtggaacttttgattacctagacttaggtaggtttagaatgagaacatccatctacagtcctcctttgcttggtggattgggctcagaggaacaaaaagttagtctgactctgtgcatattagcatcatgtctttagagaaaggtcagcctctctggttgccaaatactcatcatgatgctcatgacttaaaggttctgaggagccttgtctcccttggatttttgagtcagggtacaggaaaaaacattgctgactaactaactgcaaatgcatctgcaggtgaaaccctacgaaagcacagttctggctataaacttcagagttctctgtaaaaaacttagagcactagaagcacaggaatagtgagtgtacagcttatgcggttgtagaggggcaactgatgaacacaggtcccacatatatgagggagtatgacgttctctacctaatatgttctgtgtgcatgttttgaatgattgaagatggaacttttgattacctagacttaggtaggtttagaatgagaacatccatctacagtcctcctttgcttggtggattgcgctcgta

SEQ ID NO: 349815 - DNA, 3536 bp, Homo sapiens
attttcttatgattttccctaaaagaaaaccaaattttctactccacctcttcctttcctatcattccacttattgttgctgctttgctaacagccagcttagtaagccatcacacaagttagtgtgaggcttggttttaaaatagataacagagaatcttgattaaatagtatccaactttgtagcataacacagctaattcaggcaatgacatagagatgataagaaacaacatggtttggtagagggaacatttgatttagactctgcccatttttagctgtatgacttacataagtcattttgtgtccaagcctcattttctcccatatgaaaagtgaaggggttggattaaatgactaaaatccccttccagccctatgagcccaatgtattatgatctctgctttgtttccttcttaagaggcttcctactataaaatgtgacctatttacattttaagttgaagtagcccacaataatgaataatcaatttagatttttctcatctcctttgggagaaattaaattcaagcctctattcatttgatgttttacaacaagcttcaaagttggccatgttcattcacagtttgatattttgagacaccaataaaagttttttaataaaagttcccttgacttaaactcaccttcctaatagaagtagtgatttggctcacggaaaaatgtttccagagtcaacatgagaggactggatgaacctacagcctcactcaagctgttgcatcattgctgctgtagcaacagagccctctctgaatacccaaaacacacaattttctccaacaattctaattgcccacccagtatgggaatttgagagcctttggtgaataaccttgatcactcttttgaaatttggtgcaacacttgcacaatcacggcaactgtttgtaaatatcttttcttctccgccagtatgtagacatgcacacccattcacaagtaagcccgcaaattcattttcacattttcctcttgggtttgtttttatcatgggtatcacattgcaggaagagatgctctaacttacaagaatggaattttctgactatcattgccctcttcaaggcctgattagtttgtagggtggatgggatacaatgcatggtctacaaggtccatgtcaccagccatgatctttaaacaacctcttgcactttctggcactgctgcaatggcccatggtggacacctctgctgtttgtccaaacttctgctaaatagagtagtgttggtatttgttgtgttgtgaactcctttgttgtcagagaagacttcagctcttcaggtttgcaagggcaagatgtaaagctaggactgaaaggattgggttttgtttttcggccggcttttttccattagtgcaaaaaacctgatgcaagggcagcaagataaacacaatttcttcattgacccagataagaacctgtagaaaagtgagagatgcccctaagttcctatttcatttatcctaaataatatcctgaataactactgatcagtttttttctatgtccagccttgcttcactttccaacctccaggccaaatattcattttgatattttacaaaatccttctggtttttacacagggcccttttgtgctgagaataaaaccagctattggaacagacctcactgctttgtagagtcagaagttgacctagagaatgggtagcaacaggtcctcagtttctctggagacacccccaatccttgggtgagtgttgaaacctgacaactgactgttagccttgtcatcatcctcactggagatggagatgttgcagtcggagcctcactccttctggggcactgtttcttctcatggcaaccattttgcctgcctggaaacagcctgttgcctttgctagggggcaaatacacacactagccaaggaagttggtccagcacatctctgaggtttctcccccatggacccatggagcgaattccctgagataaatgatcagaaagttggctgtctggtggtttaatactccataagagttacttcccttatagaaagtcatcctttggcatctagatttttctacaaatcaccttaactccctccctttctctttctcctggaaaacctcagcattgcatctccatgttgcacaacacagatcagattatctggtcactatagagatttgtatataaaaaaactacttttttgaggattttgtatattgtttttctatttgttttctacagcttgaggaaagagctggcaaactgtgaatctaacttgatcttgttgccagcagatatattttggcttcctggtaagagtctgtgttaccagggacaatatattgccctctgatcagtattgcaccctaaatccacaaattcctccagcccagtcttacatttttttaaacaaatcccctagcttgtttgctattatttataaagagcattagaaaatgtatttatagacctggatgttatatgtttaatattaatttagcctttaataatgttataggtttgtaactattcttcagaaattataaagaactcagtgtagactgaattaatctatttagtatctgtaattttgcagacatattttcttacagtattttctatgtaaccacacatgtagaattataactaattagagcacaagaagtttcttcagcaatttagagctaccaattgtttcttgactatatagtcacatttgacaaatttaagaacccagtctttagtgatgcaataaacaaaatgaaccattaagaacaaggaattgcttaaatcccttagctggtgaggatatacatctaaataattcatctttctaactcaaggaatggtgctgattttttaaatgtttgacaccaggccttgtttttccagctgagcattctcattttgcttttctctaagactatcaaagacaaggtattaatagtaggattattcctagatcagaatgtttcatacattcctaaaggtttatgtggaaattggcttaggaaaactttgagtagcagagactgaggatgagtgctagagatgaaatcaggacagatttgttgcagttaattcttgccaagcaaattagtggtaaatgtcacattgttatgtgaattgagcacatatttttaaagaaagtttacaaaaaatttttagaaccaactatgaggcaatactgtatcactgggggctgggagtgggggcttagaatcatactgaaattgtttaaaagcagcccaggtagtttctgtcctcaggtgaataacagactatataacttccccgaaaggtaaaacgatagccactgcagagacgaggtgtcttccttccaccaaatactttctgagatggtggtaggagtagtatttttaccgtggttttgtaacatttcacgtgtaaaataactggatattctttatatactggaaataacctgtgaatccaatatttcactaagtgttttaacttttgtgtatatatctctcatcaataaatgtggatttcaattta

SEQ ID NO: 349816 - DNA, 708 bp, Homo sapiens
tacaataaacatcaaggaatcaatgctcagaagactgcatgagacaccttcttcacaaggacagagaagaactagccatgtgctatagggaaccctgagtgccctactcttttcccaagaagggtaaagcctacaatatcatcagggggcatgaagcacattaatttgcagtggctgcttcatatgaggagatatggtggacaggctaatttttccttgaaaatgtggcttcttcaactcctttcaaatttaggatggaatacttcctgaaataaaactgggctttatgcaggattctctttgaaaattcttgtatgtccagaacaaaagataaaactaattgtattcctcacattcacaatccccattggtctgaagtcacgtagcacagagcatctatagcacatagtgtttaaagactaatgaatgcaaaaagataaaatcttcaactaatttttgaattgtttctcatatatgctactagaaaatgccttgttgatgaagcacattttgggtagttgaggtcttttgttttcgcctttagctttctaagctttcttacaatgtggactgattactgtaacatttcacgtgtaaaataactggatattctttatatactggaaataacctgtgaatccaatatttcactaagtgttttaacttttgtgtatatatctctcatcaataaatgtggatttcaattta

SEQ ID NO: 349817 - DNA, 371 bp, Homo sapiens
tccccgggccagtcggatgtggacgacttggaggctgatgatgacctgctggcggagctaaatgaggtccttggagaggagcagaaggcttcagagaccccacctcctgtggcccagccgaagcctgaggcccctcatccggggctggagaccaccttgcaggagaggctggcgctctatcagacagcaattgaaagcgccagacaagctggagacagcgccaagatgcggcgctacgatcgggggcttaaaacactggaaaacctgctcgcctccatccgtactggcccggggctagtacggatgtgcggtggctgggaggagaggggacaggaggacgaggctgcctctctgctccaaggaaggcactt

SEQ ID NO: 349818 - DNA, 2931 bp, Homo sapiens
agcggggcagacccggcgagcccagtggccgcgctccggtgcggcggcgcccgaggcccgaggcggaagtgggacggccaagcagggaagcgagggctcgggatcgacggccgcggggcgccgacgaggagtgcaggactcaggaagggcgagtgcgcggcgacagagcccggggaaggaggcagggcaaggccgggcttgggggcaggtggtccgggcatccagccttgaagatgcacaagaggaaaggacccccgggacccccgggcagaggcgccgcggccgcccgccagctgggcctgctggttgacctctccccagatggcctgatgatccctgaggacggggctaacgatgaagaactggaggctgagttcttggctttggtcgggggccagcccccagccctggagaagctcaaaggcaaaggtcccttgccgatggaggccattgagaagatggccagcctgtgcatgagagacccggatgaggatgaggaggaggggacggatgaggacgacttggaggctgatgatgacctgctggcggagctaaatgaggtccttggagaggagcagaaggcttcagagaccccacctcctgtggcccagccgaagcctgaggcccctcatccggggctggagaccaccttgcaggagaggctggcgctctatcagacagcaattgaaagcgccagacaagctggagacagcgccaagatgcggcgctacgatcgggggcttaaaacactggaaaacctgctcgcctccatccgtaagggcaatgccattgacgaagcggacatcccgccgccagtggccataggaaaaggcccggcgtccacgcctacctacagccctgcacccacccagccggcccctagaatcgcgtcagccccagagcccagggtcaccctggagggaccttctgccaccgccccagcctcatctccaggcttggctaagccccagatgcccccaggtccctgcagccctggccctctggcccagttgcagagccgccagcgcgactacaagctggctgccctccacgccaagcccagcagcagctggccttcctagagggccgcaagaagcagctcctgcaggccgcactgcgagccaagcagaaaaacgacgtggagggtgccaagatgcacctgcgccaagccaagggactggagcctatgctggaggcctcgcgcaatgggctgcctgtggacatcaccaaggtgccgcctgcccctgtcaacaaggacgactttgccctggtccagcggcctggcccgggtctgtctcaggaggccgcccggcgctatggtgaactcaccaagctcatacggcagcagcacgagatgtgcctgaaccactcaaaccaattcacccagctgggcaacatcactgaaaccaccaagtttgaaaagttggcggaggactgtaagcggagcatggacattctgaagcaagccttcgtccggggtctccccacgcccaccgcccgctttgagcaaaggaccttcagcgtcatcaagatcttccctgacctcagcagcaacgacatgctcctcttcatcgtgaagggcatcaacttgcccacacccccaggactgtcccctggcgatctggatgtctttgttcggtttgacttcccctatcccaacgtggaagaagctcagaaagacaagaccagtgtgatcaagaacacagactcccctgagttcaaggagcagttcaaactctgcatcaaccgcagccaccgtggcttccgaagggccatccagaccaagggcatcaagttcgaagtggttcacaagggggggctgttcaagactgaccgggtgctggggacagcccagctgaagctggatgcactggagatagcatgtgaggtccgggagatccttgaggtcctggatggtcgccggcccacaggggggcgactggaggtaatggtccggattcgggagccactgacagcccagcagttggagacgacgacagagaggtggctggtcattgaccctgtgccggcagctgtgcccacacaggttgctgggcccaaagggaaggcccctcctgtgcctgcccctgcaagggagtcagggaacagatcagcccggcccctgcatagcctcagtgtgctggcgtttgaccaagagcgtctggagcggaagatcctggccctcaggcaggcgcggcggccggtgcccccagaagtggcccagcagtaccaggacatcatgcaacgcagccagtggcagagggcacagctggagcaggggggtgtgggcatccgacgggaatacgcagcccagctggagcggcagctgcagttctacacggaggctgcccggcgcctgggcaacgatggcagcagggatgctgcaaaggaggcgctctataggcggaatctggtagagagtgagctgcagcggctccgcaggtgaggagcccatggggcgggcagcccccagaaagcgggcagcaggccccgataccgggaagagccgacacagccacgaaccagacaagcagacaatcagcggacaatcggttctggactcacccctcatccgggcccccagccccgccagagcctccgtggctgcgggtgttgggaaccatgcctgccagccagtatgtgcccctcacccaggcctggctgggccctggagagtcctgtttgcacagcccaggggtgtccggcctctggcccgccccggagcagggagggtggctggggccaagccccgagggcccctgcaagcactttacttcctgttcctccccagccttaaccccaaagccctcctgcaccccaaagaagccactgaggctggccgagccacactgtctccccaggggcgtcgacctggcccagctgggtccccagggccagcacatggaataaaatagccagggccacactcag

SEQ ID NO: 349819 - DNA, 3473 bp, Homo sapiens
  misc_feature (3319)..(3319): n is a, c, g, or t
agcggggcagacccggcgagcccagtggccgcgctccggtgcggcggcgcccgaggcccgaggcggaagtgggacggccaagcagggaagcgagggctcgggatcgacggccgcggggcgccgacgaggagtgcaggactcaggaagggcgagtgcgcggcgacagagcccggggaaggaggcagggcaaggccgggcttgggggcaggtggtccgggcatccagccttgaagatgcacaagaggaaaggacccccgggacccccgggcagaggcgccgcggccgcccgccagctgggcctgctggttgacctctccccagatggcctgatgatccctgaggacggggctaacgatgaagaactggaggctgagttcttggctttggtcgggggccagcccccagccctggagaagctcaaaggcaaaggtcccttgccgatggaggccattgagaagatggccagcctgtgcatgagagacccggatgaggatgaggaggaggggacggatgaggacgacttggaggctgatgatgacctgctggcggagctaaatgaggtccttggagaggagcagaaggcttcagagaccccacctcctgtggcccagccgaagcctgaggcccctcatccggggctggagaccaccttgcaggagaggctggcgctctatcagacagcaattgaaagcgccagacaagctggagacagcgccaagatgcggcgctacgatcgggggcttaaaacactggaaaacctgctcgcctccatccgtaagggcaatgccattgacgaagcggacatcccgccgccagtggccataggaaaaggcccggcgtccacgcctacctacagccctgcacccacccagccggcccctagaatcgcgtcagccccagagcccagggtcaccctggagggaccttctgccaccgccccagcctcatctccaggcttggctaagccccagatgcccccaggtccctgcagccctggccctctggcccagttgcagagccgccagcgcgactacaagctggctgccctccacgccaagcagcagggagataccactgctgccgctagacacttccgcgtggctaagagctttgatgctgtcttggaggccctgagccggggtgagcccgtggacctctcctgcctgccccctccacccgaccagctgcccccagacccaccgtcaccaccgtcgcagcctccgacccccgctacggcgccctccacaacagaggtgcccccacccccgaggaccctgctggaggcgctggagcagcggatggagcggtaccaggtggccgcagcccaggccaagagcaagggggaccagcggaaagctcgaatgcacgagcgcatcgtcaagcaataccaagatgccatccgagcccacaaggctggccgagccgtggatgtcgctgaattgcccgtgcccccaggcttccccccaatccagggcctggaggccaccaagcccacccagcagagtctggtgggtgtcctggagactgccatgaagctggccaaccaggatgaaggcccagaggatgaagaggatgaggtgcctaagaagcagaacagccctgtggcccccacagcccagcccaaagccccaccctcaagaactccccagtcgggatcagccccaacagccaaagcgccccccaaagccacatccaccagagcccagcagcagctggccttcctagagggccgcaagaagcagctcctgcaggccgcactgcgagccaagcagaaaaacgacgtggagggtgccaagatgcacctgcgccaagccaagggactggagcctatgctggaggcctcgcgcaatgggctgcctgtggacatcaccaaggtgccgcctgcccctgtcaacaaggacgactttgccctggtccagcggcctggcccgggtctgtctcaggaggccgcccggcgctatggtgaactcaccaagctcatacggcagcagcacgagatgtgcctgaaccactcaaaccaattcacccagctgggcaacatcactgaaaccaccaagtttgaaaagttggcggaggactgtaagcggagcatggacattctgaagcaagccttcgtccggggtctccccacgcccaccgcccgctttgagcaaaggaccttcagcgtcatcaagatcttccctgacctcagcagcaacgacatgctcctcttcatcgtgaagggcatcaacttgcccacacccccaggactgtcccctggcgatctggatgtctttgttcggtttgacttcccctatcccaacgtggaagaagctcagaaagacaagaccagtgtgatcaagaacacagactcccctgagttcaaggagcagttcaaactctgcatcaaccgcagccaccgtggcttccgaagggccatccagaccaagggcatcaagttcgaagtggttcacaaggggtgagctagagagagccatggccgctgggtgggctccaggggaggggagctcctctgaaccaaccatcctgtccccactatacacacatgcacacagggggctgttcaagactgaccgggtgctggggacagcccagctgaagctggatgcactggagatagcatgtgaggtccgggagatccttgaggtgagaggtggacattcatccgcgtgctccggtatggccatgctactcgttaacattattaaaacacttcctgccttgagccctctatgagcctgtctgttgacccagcccctcccctcagagcctcagacctccctactgcccagccctaaatacttgcagtaccccactccattatgatcaactggtatctcagccataccatgggctcatattttagaaaccactcttggccaggcatggtggctcatgcctgtaatcccagcactttgggaggctgaggcgggcagatcacgaggtcaggagatcgagaccatcctggctaacatggtgaaaccctgtttctactaaaatacaaaaaaattagccaggcatggtggcgggcgcctgtagtcccagctactcgggaggctgaggcaggagaatggcgtaagtaaacccaggaggcggagcttgcagtgagcccagattgcaccactgcactccagcctggacaacagagcgagactccgtctcaaaaaaaaaaaaaaaaattagtcaggtgcggtggcacacacccgtaatccccagctactcaggaggctgtggtacaagcccaggaggcagaggttgcaatgagccaagatcgtgccactttaaaggggacagctgggtccttggaggggaaagagcntccataggccggtttctcccagccttgggggcgaggcaaaccagaacggacctgggccacagaagtcgttgaggaccctctgtccttatcagaaacgactctgcctggatcagttgggaataagtcgcttgaattatccgcgttactctttttg

SEQ ID NO: 349820 - DNA, 2211 bp, Homo sapiens
aaagtgtttggtgagaattgcttgaaccgggaggcagaggttgcagtgagccaagatcgtgctactgcactccagcctggacgatacagtgatactctgtctcaaaaaagaaaaaaaagggagcccactaaatgaccactgttgtcaccatcagaccctgatccttggggactggactcatcacaggcgctacgaaatctctaacatcctctctcttcctctacagcagaacagccctgtggcccccacagcccagcccaaagccccaccctcaagaactccccagtcgggatcagccccaacagccaaagcgccccccaaagccacatccaccagagcccagcagcagctggccttcctagagggccgcaagaagcagctcctgcaggccgcactgcgagccaagcagaaaaacgacgtggagggtgccaagatgcacctgcgccaagccaagggactggagcctatgctggaggcctcgcgcaatgggctgcctgtggacatcaccaaggtgccgcctgcccctgtcaacaaggacgactttgccctggtccagcggcctggcccgggtctgtctcaggaggccgcccggcgctatggtgaactcaccaagctcatacggcagcagcacgagatgtgcctgaaccactcaaaccaattcacccagctgggcaacatcactgaaaccaccaagtttgaaaagttggcggaggactgtaagcggagcatggacattctgaagcaagccttcgtccggggtctccccacgcccaccgcccgctttgagcaaaggaccttcagcgtcatcaagatcttccctgacctcagcagcaacgacatgctcctcttcatcgtgaagggcatcaacttgcccacacccccaggactgtcccctggcgatctggatgtctttgttcggtttgacttcccctatcccaacgtggaagaagctcagaaagacaagaccagtgtgatcaagaacacagactcccctgagttcaaggagcagttcaaactctgcatcaaccgcagccaccgtggcttccgaagggccatccagaccaagggcatcaagttcgaagtggttcacaagggggggctgttcaagactgaccgggtgctggggacagcccagctgaagctggatgcactggagatagcatgtgaggtccgggagatccttgaggtcctggatggtcgccggcccacaggggggcgactggaggtaatggtccggattcgggagccactgacagcccagcagttggagacgacgacagagaggtggctggtcattgaccctgtgccggcagctgtgcccacacaggttgctgggcccaaagggaaggcccctcctgtgcctgcccctgcaagggagtcagggaacagatcagcccggcccctgcatagcctcagtgtgctggcgtttgaccaagagcgtctggagcggaagatcctggccctcaggcaggcgcggcggccggtgcccccagaagtggcccagcagtaccaggacatcatgcaacgcagccagtggcagagggcacagctggagcaggggggtgtgggcatccgacgggaatacgcagcccagctggagcggcagctgcagttctacacggaggctgcccggcgcctgggcaacgatggcagcagggatgctgcaaaggaggcgctctataggcggaatctggtagagagtgagctgcagcggctccgcaggtgaggagcccatggggcgggcagcccccagaaagcgggcagcaggccccgataccgggaagagccgacacagccacgaaccagacaagcagacaatcagcggacaatcggttctggactcacccctcatccgggcccccagccccgccagagcctccgtggctgcgggtgttgggaaccatgcctgccagccagtatgtgcccctcacccaggcctggctgggccctggagagtcctgtttgcacagcccaggggtgtccggcctctggcccgccccggagcagggagggtggctggggccaagccccgagggcccctgcaagcactttacttcctgttcctccccagccttaaccccaaagccctcctgcaccccaaagaagccactgaggctggccgagccacactgtctccccaggggcgtcgacctggcccagctgggtccccagggccagcacatggaataaaatagccagggccacactcag

SEQ ID NO: 349821 - DNA, 3419 bp, Homo sapiens
agcggggcagacccggcgagcccagtggccgcgctccggtgcggcggcgcccgaggcccgaggcggaagtgggacggccaagcagggaagcgagggctcgggatcgacggccgcggggcgccgacgaggagtgcaggactcaggaagggcgagtgcgcggcgacagagcccggggaaggaggcagggcaaggccgggcttgggggcaggtggtccgggcatccagccttgaagatgcacaagaggaaaggacccccgggacccccgggcagaggcgccgcggccgcccgccagctgggcctgctggttgacctctccccagatggcctgatgatccctgaggacggggctaacgatgaagaactggaggctgagttcttggctttggtcgggggccagcccccagccctggagaagctcaaaggcaaaggtcccttgccgatggaggccattgagaagatggccagcctgtgcatgagagacccggatgaggatgaggaggaggggacggatgaggacgacttggaggctgatgatgacctgctggcggagctaaatgaggtccttggagaggagcagaaggcttcagagaccccacctcctgtggcccagccgaagcctgaggcccctcatccggggctggagaccaccttgcaggagaggctggcgctctatcagacagcaattgaaagcgccagacaagctggagacagcgccaagatgcggcgctacgatcgggggcttaaaacactggaaaacctgctcgcctccatccgtaagggcaatgccattgacgaagcggacatcccgccgccagtggccataggaaaaggcccggcgtccacgcctacctacagccctgcacccacccagccggcccctagaatcgcgtcagccccagagcccagggtcaccctggagggaccttctgccaccgccccagcctcatctccaggcttggctaagccccagatgcccccaggtccctgcagccctggccctctggcccagttgcagagccgccagcgcgactacaagctggctgccctccacgccaagcagcagggagataccactgctgccgctagacacttccgcgtggctaagagctttgatgctgtcttggaggccctgagccggggtgagcccgtggacctctcctgcctgccccctccacccgaccagctgcccccagacccaccgtcaccaccgtcgcagcctccgacccccgctacggcgccctccacaacagaggtgcccccacccccgaggaccctgctggaggcgctggagcagcggatggagcggtaccaggtggccgcagcccaggccaagagcaagggggaccagcggaaagctcgaatgcacgagcgcatcgtcaagcaataccaagatgccatccgagcccacaaggctggccgagccgtggatgtcgctgaattgcccgtgcccccaggcttccccccaatccagggcctggaggccaccaagcccacccagcagagtctggtgggtgtcctggagactgccatgaagctggccaaccaggatgaaggcccagaggatgaagaggatgaggtgcctaagaagcagaacagccctgtggcccccacagcccagcccaaagccccaccctcaagaactccccagtcgggatcagccccaacagccaaagcgccccccaaagccacatccaccagagcccagcagcagctggccttcctagagggccgcaagaagcagctcctgcaggccgcactgcgagccaagcagaaaaacgacgtggagggtgccaagatgcacctgcgccaagccaagggactggagcctatgctggaggcctcgcgcaatgggctgcctgtggacatcaccaaggtgccgcctgcccctgtcaacaaggacgactttgccctggtccagcggcctggcccgggtctgtctcaggaggccgcccggcgctatggtgaactcaccaagctcatacggcagcagcacgagatgtgcctgaaccactcaaaccaattcacccagctgggcaacatcactgaaaccaccaagtttgaaaagttggcggaggactgtaagcggagcatggacattctgaagcaagccttcgtccggggtctccccacgcccaccgcccgctttgagcaaaggaccttcagcgtcatcaagatcttccctgacctcagcagcaacgacatgctcctcttcatcgtgaagggcatcaacttgcccacacccccaggactgtcccctggcgatctggatgtctttgttcggtttgacttcccctatcccaacgtggaagaagctcagaaagacaagaccagtgtgatcaagaacacagactcccctgagttcaaggagcagttcaaactctgcatcaaccgcagccaccgtggcttccgaagggccatccagaccaagggcatcaagttcgaagtggttcacaagggggggctgttcaagactgaccgggtgctggggacagcccagctgaagctggatgcactggagatagcatgtgaggtccgggagatccttgaggtcctggatggtcgccggcccacaggggggcgactggaggtaatggtccggattcgggagccactgacagcccagcagttggagacgacgacagagaggtggctggtcattgaccctgtgccggcagctgtgcccacacaggttgctgggcccaaagggaaggcccctcctgtgcctgcccctgcaagggagtcagggaacagatcagcccggcccctgcatagcctcagtgtgctggcgtttgaccaagagcgtctggagcggaagatcctggccctcaggcaggcgcggcggccggtgcccccagaagtggcccagcagtaccaggacatcatgcaacgcagccagtggcagagggcacagctggagcaggggggtgtgggcatccgacgggaatacgcagcccagctggagcggcagctgcagttctacacggaggctgcccggcgcctgggcaacgatggcagcagggatgctgcaaaggaggcgctctataggcggaatctggtagagagtgagctgcagcggctccgcaggtgaggagcccatggggcgggcagcccccagaaagcgggcagcaggccccgataccgggaagagccgacacagccacgaaccagacaagcagacaatcagcggacaatcggttctggactcacccctcatccgggcccccagccccgccagagcctccgtggctgcgggtgttgggaaccatgcctgccagccaccttaaccccaaagccctcctgcaccccaaagaagccactgaggctggccgagccacactgtctccccaggggcgtcgacctggcccagctgggtccccagggccagcacatggaataaaatagccagggccacactcag

SEQ ID NO: 349822 - DNA, 1421 bp, Homo sapiens
tgggccaaagccaggtcccaggccccctagatttcctgcctcctctctggtcataggaagaagctcagaaagacaagaccagtgtgatcaagaacacagactcccctgagttcaaggagcagttcaaactctgcatcaaccgcagccaccgtggcttccgaagggccatccagaccaagggcatcaagttcgaagtggttcacaaggggtgagctagagagagccatggccgctgggtgggctccaggggaggggagctcctctgaaccaaccatcctgtccccactatacacacatgcacacagggggctgttcaagactgaccgggtgctggggacagcccagctgaagctggatgcactggagatagcatgtgaggtccgggagatccttgaggtcctggatggtcgccggcccacaggggggcgactggaggtaatggtccggattcgggagccactgacagcccagcagttggagacgacgacagagaggtggctggtcattgaccctgtgccggcagctgtgcccacacaggttgctgggcccaaagggaaggcccctcctgtgcctgcccctgcaagggagtcagggaacagatcagcccggcccctgcatagcctcagtgtgctggcgtttgaccaagagcgtctggagcggaagatcctggccctcaggcaggcgcggcggccggtgcccccagaagtggcccagcagtaccaggacatcatgcaacgcagccagtggcagagggcacagctggagcaggggggtgtgggcatccgacgggaatacgcagcccagctggagcggcagctgcagttctacacggaggctgcccggcgcctgggcaacgatggcagcagggatgctgcaaaggaggcgctctataggcggaatctggtagagagtgagctgcagcggctccgcaggtgaggagcccatggggcgggcagcccccagaaagcgggcagcaggccccgataccgggaagagccgacacagccacgaaccagacaagcagacaatcagcggacaatcggttctggactcacccctcatccgggcccccagccccgccagagcctccgtggctgcgggtgttgggaaccatgcctgccagccagtatgtgcccctcacccaggcctggctgggccctggagagtcctgtttgcacagcccaggggtgtccggcctctggcccgccccggagcagggagggtggctggggccaagccccgagggcccctgcaagcactttacttcctgttcctccccagccttaaccccaaagccctcctgcaccccaaagaagccactgaggctggccgagccacactgtctccccaggggcgtcgacctggcccagctgggtccccagggccagcacatggaataaaatagccagggccacactcag

SEQ ID NO: 349823 - DNA, 1901 bp, Homo sapiens
agcggggcagacccggcgagcccagtggccgcgctccggtgcggcggcgcccgaggcccgaggcggaagtgggacggccaagcagggaagcgagggctcgggatcgacggccgcggggcgccgacgaggagtgcaggactcaggaagggcgagtgcgcggcgacagagcccggggaaggaggcagggcaaggccgggcttgggggcaggtggtccgggcatccagccttgaagatgcacaagaggaaaggacccccgggacccccgggcagaggcgccgcggccgcccgccagctgggcctgctggttgacctctccccagatggcctgatgatccctgaggacggggctaacgatgaagaactggaggctgagttcttggctttggtcgggggccagcccccagccctggagaagctcaaaggcaaaggtcccttgccgatggaggccattgagaagatggccagcctgtgcatgagagacccggatgaggatgaggaggaggggacggatgaggacgacttggaggctgatgatgacctgctggcggagctaaatgaggtccttggagaggagcagaaggcttcagagaccccacctcctgtggcccagccgaagcctgaggcccctcatccggggctggagaccaccttgcaggagaggctggcgctctatcagacagcaattgaaagcgccagacaagctggagacagcgccaagatgcggcgctacgatcgggggcttaaaacactggaaaacctgctcgcctccatccgtaagggcaatgccattgacgaagcggacatcccgccgccagtggccataggaaaaggcccggcgtccacgcctacctacagccctgcacccacccagccggcccctagaatcgcgtcagccccagagcccagggtcaccctggagggaccttctgccaccgccccagcctcatctccaggcttggctaagccccagatgcccccaggtccctgcagccctggccctctggcccagttgcagagccgccagcgcgactacaagctggctgccctccacgccaagcagcagggagataccactgctgccgctagacacttccgcgtggctaagagctttgatgctgtcttggaggccctgagccggggtgagcccgtggacctctcctgcctgccccctccacccgaccagctgcccccagacccaccgtcaccaccgtcgcagcctccgacccccgctacggcgccctccacaacagaggtgcccccacccccgaggaccctgctggaggcgctggagcagcggatggagcggtaccaggtggccgcagcccaggccaagagcaagggggaccagcggaaagctcgaatgcacgagcgcatcgtcaagcaataccaagatgccatccgagcccacaaggctggccgagccgtggatgtcgctgaattgcccgtgcccccaggcttccccccaatccagggcctggaggccaccaagcccacccagcagagtctggtgggtgtcctggagactgccatgaagctggccaaccaggatgaaggcccagaggatgaagaggatgaggtgcctaagaaggtttgagggttggggccgggcgcagtggctcacacctgtagtcccagcactttgggaatccaagatgggaggatcgcttgaggccaggagtttgagaccatcctgggccacacagtgagacccccgtctctacaaaaaaattttttaaaattagccaggcatggtgggactcacctgtagtccctgctacttgggagactgaggtgggaggatcacctgaactaaggagttcaaggctgcagtgagccatggtcatgccactgtacgccagtctgggtgacagagcaagacctcatctccaagacaattaaa

SEQ ID NO: 349824 - DNA, 3574 bp, Homo sapiens
agcggggcagacccggcgagcccagtggccgcgctccggtgcggcggcgcccgaggcccgaggcggaagtgggacggccaagcagggaagcgagggctcgggatcgacggccgcggggcgccgacgaggagtgcaggactcaggaagggcgagtgcgcggcgacagagcccggggaaggaggcagggcaaggccgggcttgggggcaggtggtccgggcatccagccttgaagatgcacaagaggaaaggacccccgggacccccgggcagaggcgccgcggccgcccgccagctgggcctgctggttgacctctccccagatggcctgatgatccctgaggacggggctaacgatgaagaactggaggctgagttcttggctttggtcgggggccagcccccagccctggagaagctcaaaggcaaaggtcccttgccgatggaggccattgagaagatggccagcctgtgcatgagagacccggatgaggatgaggaggaggggacggatgaggacgacttggaggctgatgatgacctgctggcggagctaaatgaggtccttggagaggagcagaaggcttcagagaccccacctcctgtggcccagccgaagcctgaggcccctcatccggggctggagaccaccttgcaggagaggctggcgctctatcagacagcaattgaaagcgccagacaagctggagacagcgccaagatgcggcgctacgatcgggggcttaaaacactggaaaacctgctcgcctccatccgtaagggcaatgccattgacgaagcggacatcccgccgccagtggccataggaaaaggcccggcgtccacgcctacctacagccctgcacccacccagccggcccctagaatcgcgtcagccccagagcccagggtcaccctggagggaccttctgccaccgccccagcctcatctccaggcttggctaagccccagatgcccccaggtccctgcagccctggccctctggcccagttgcagagccgccagcgcgactacaagctggctgccctccacgccaagcagcagggagataccactgctgccgctagacacttccgcgtggctaagagctttgatgctgtcttggaggccctgagccggggtgagcccgtggacctctcctgcctgccccctccacccgaccagctgcccccagacccaccgtcaccaccgtcgcagcctccgacccccgctacggcgccctccacaacagaggtgcccccacccccgaggaccctgctggaggcgctggagcagcggatggagcggtaccaggtggccgcagcccaggccaagagcaagggggaccagcggaaagctcgaatgcacgagcgcatcgtcaagcaataccaagatgccatccgagcccacaaggctggccgagccgtggatgtcgctgaattgcccgtgcccccaggcttccccccaatccagggcctggaggccaccaagcccacccagcagagtctggtgggtgtcctggagactgccatgaagctggccaaccaggatgaaggcccagaggatgaagaggatgaggtgcctaagaagcagaacagccctgtggcccccacagcccagcccaaagccccaccctcaagaactccccagtcgggatcagccccaacagccaaagcgccccccaaagccacatccaccagagcccagcagcagctggccttcctagagggccgcaagaagcagctcctgcaggccgcactgcgagccaagcagaaaaacgacgtggagggtgccaagatgcacctgcgccaagccaagggactggagcctatgctggaggcctcgcgcaatgggctgcctgtggacatcaccaaggtgccgcctgcccctgtcaacaaggacgactttgccctggtccagcggcctggcccgggtctgtctcaggaggccgcccggcgctatggtgaactcaccaagctcatacggcagcagcacgagatgtgcctgaaccactcaaaccaattcacccagctgggcaacatcactgaaaccaccaagtttgaaaagttggcggaggactgtaagcggagcatggacattctgaagcaagccttcgtccggggtctccccacgcccaccgcccgctttgagcaaaggaccttcagcgtcatcaagatcttccctgacctcagcagcaacgacatgctcctcttcatcgtgaagggcatcaacttgcccacacccccaggactgtcccctggcgatctggatgtctttgttcggtttgacttcccctatcccaacgtggaagaagctcagaaagacaagaccagtgtgatcaagaacacagactcccctgagttcaaggagcagttcaaactctgcatcaaccgcagccaccgtggcttccgaagggccatccagaccaagggcatcaagttcgaagtggttcacaagggggggctgttcaagactgaccgggtgctggggacagcccagctgaagctggatgcactggagatagcatgtgaggtccgggagatccttgaggtcctggatggtcgccggcccacaggggggcgactggaggtaatggtccggattcgggagccactgacagcccagcagttggagacgacgacagagaggtggctggtcattgaccctgtgccggcagctgtgcccacacaggttgctgggcccaaagggaaggcccctcctgtgcctgcccctgcaagggagtcagggaacagatcagcccggcccctgcatagcctcagtgtgctggcgtttgaccaagagcgtctggagcggaagatcctggccctcaggcaggcgcggcggccggtgcccccagaagtggcccagcagtaccaggacatcatgcaacgcagccagtggcagagggcacagctggagcaggggggtgtgggcatccgacgggaatacgcagcccagctggagcggcagctgcagttctacacggaggctgcccggcgcctgggcaacgatggcagcagggatgctgcaaaggaggcgctctataggcggaatctggtagagagtgagctgcagcggctccgcaggtgaggagcccatggggcgggcagcccccagaaagcgggcagcaggccccgataccgggaagagccgacacagccacgaaccagacaagcagacaatcagcggacaatcggttctggactcacccctcatccgggcccccagccccgccagagcctccgtggctgcgggtgttgggaaccatgcctgccagccagtatgtgcccctcacccaggcctggctgggccctggagagtcctgtttgcacagcccaggggtgtccggcctctggcccgccccggagcagggagggtggctggggccaagccccgagggcccctgcaagcactttacttcctgttcctccccagccttaaccccaaagccctcctgcaccccaaagaagccactgaggctggccgagccacactgtctccccaggggcgtcgacctggcccagctgggtccccagggccagcacatggaataaaatagccagggccacactcag

SEQ ID NO: 349825 - DNA, 2535 bp, Homo sapiens
agcggggcagacccggcgagcccagtggccgcgctccggtgcggcggcgcccgaggcccgaggcggaagtgggacggccaagcagggaagcgagggctcgggatcgacggccgcggggcgccgacgaggagtgcaggactcaggaagggcgagtgcgcggcgacagagcccggggaaggaggcagggcaaggccgggcttgggggcaggtggtccgggcatccagccttgaagatgcacaagaggaaaggacccccgggacccccgggcagaggcgccgcggccgcccgccagctgggcctgctggttgacctctccccagatggcctgatgatccctgaggacggggctaacgatgaagaactggaggctgagttcttggctttggtcgggggccagcccccagccctggagaagctcaaaggcaaaggtcccttgccgatggaggccattgagaagatggccagcctgtgcatgagagacccggatgaggatgaggaggaggggacggatgaggacgacttggaggctgatgatgacctgctggcggagctaaatgaggtccttggagaggagcagaaggcttcagagaccccacctcctgtggcccagccgaagcctgaggcccctcatccggggctggagaccaccttgcaggagaggctggcgctctatcagacagcaattgaaagcgccagacaagctggagacagcgccaagatgcggcgctacgatcgggggcttaaaacactggaaaacctgctcgcctccatccgtaagggcaatgccattgacgaagcggacatcccgccgccagtggccataggaaaaggcccggcgtccacgcctacctacagccctgcacccacccagccggcccctagaatcgcgtcagccccagagcccagggtcaccctggagggaccttctgccaccgccccagcctcatctccaggcttggctaagccccagatgcccccaggtccctgcagccctggccctctggcccagttgcagagccgccagcgcgactacaagctggctgccctccacgccaagcagcagggagataccactgctgccgctagacacttccgcgtggctaagagctttgatgctgtcttggaggccctgagccggggtgagcccgtggacctctcctgcctgccccctccacccgaccagctgcccccagacccaccgtcaccaccgtcgcagcctccgacccccgctacggcgccctccacaacagaggtgcccccacccccgaggaccctgctggaggcgctggagcagcggatggagcggtaccaggtggccgcagcccaggccaagagcaagggggaccagcggaaagctcgaatgcacgagcgcatcgtcaagcaataccaagatgccatccgagcccacaaggctggccgagccgtggatgtcgctgaattgcccgtgcccccaggcttccccccaatccagggcctggaggccaccaagcccacccagcagagtctggtgggtgtcctggagactgccatgaagctggccaaccaggatgaaggcccagaggatgaagaggatgaggtgcctaagaagcagaacagccctgtggcccccacagcccagcccaaagccccaccctcaagaactccccagtcgggatcagccccaacagccaaagcgccccccaaagccacatccaccagagcccagcagcagctggccttcctagagggccgcaagaagcagctcctgcaggccgcactgcgagccaagcagaaaaacgacgtggagggtgccaagatgcacctgcgccaagccaagggactggagcctatgctggaggcctcgcgcaatgggctgcctgtggacatcaccaaggtgccgcctgcccctgtcaacaaggacgactttgccctggtccagcggcctggcccgggtctgtctcaggaggccgcccggcgctatggtgaactcaccaagctcatacggcagcagcacgagatgtgcctgaaccactcaaaccaattcacccagctgggcaacatcactgaaaccaccaagtttgaaaagttggcggaggactgtaagcggagcatggacattctgaagcaagccttcgtccggggtctccccacgcccaccgcccgctttgagcaaaggaccttcagcgtcatcaagatcttccctgacctcagcagcaacgacatgctcctcttcatcgtgaagggcatcaacttgcccacacccccaggactgtcccctggcgatctggatgtctttgttcggtttgacttcccctatcccaacgtggaagaagctcagaaagacaagaccagtgtgatcaagaacacagactcccctgggcccctgcaagcactttacttcctgttcctccccagccttaaccccaaagccctcctgcaccccaaagaagccactgaggctggccgagccacactgtctccccaggggcgtcgacctggcccagctgggtccccagggccagcacatggaataaaatagccagggccacactcag

SEQ ID NO: 349826 - DNA, 569 bp, Homo sapiens
aaagtgtttggtgagaattgcttgaaccgggaggcagaggttgcagtgagccaagatcgtgctactgcactccagcctggacgatacagtgatactctgtctcaaaaaagaaaaaaaagggagcccactaaatgaccactgttgtcaccatcagaccctgatccttggggactggactcatcacaggcgctacgaaatctctaacatcctctctcttcctctacagcagaacagccctgtggcccccacagcccagcccaaagccccaccctcaagaactccccagtcgggatcagccccaacagccaaagcgccccccaaagccacatccaccagagcccagcagcagctggccttcctagagggccgcaagaagcagctcctgcaggccgcactgcgagccaagcagaaaaacgacgtggagggtgccaagatgcacctgcgccaagccaagggactggagcctatgctggaggcctcgcgcaatgggctgcctgtggacatcaccaagtgccgcctgccctgtcaacaaggagggctgcaaggaggctgacgttggtaccgactca

SEQ ID NO: 349827 - DNA, 1981 bp, Homo sapiens
tctttctttgggccaagcctccactgaggtgccaggatacagcagcaacctcagaccctaccctcggggctgacagggctggatcaacaatgcatcagtgaattaaaaggcacaggaggctgggcaccgtggctcacgcctgtaaacttttggaggccgagtgggaggatcgcttgagcccaggagttcgacaccagcctggataacatagaactccgtctcaaaaacaaacaaacaaacaaaaaaaacgttcccgactggcttccctgaggaacgtggcgtcccagtgagaccggatgggtgaggagcagccggcctgtgagtggtgggggaccgcgttcctatctcggagctgaagaagcgtggaagatgatctggcccaacatctctttgttctcagaggaagggccttccaagaccggggaggggcctgtgcgtgggtcccggtccgaaacgtgtctgggctgctgcgagagacagtcggtgaaggaagggaggggacatccgaagggtggcccgggaggccgggcgatggtgaggagggcgcctcctctccaccaaatcctccccatccatgcgggctagggacagaccctcccccgccaccctaggctggaaagtgaacgttctctgcacctctcccacctacagactaagtagggcacccggtttccgtgtcggcttcaccactgactcggaatgggatctacctttctctgagcctcacttttcccatctgaaaaatggaacttccgatcccgcactcccatcccactctggccccgggactctgggatacttagagattggcttttggtggggcggcgacaggactgtggccatgaaggccagggagtctgggtccccaactcggtcccattccctagagagattcgggcagcaaccggccccacaatgctcttgagaactacacttcgccgatatgcaaagaagaggaggcggttcctgctcgtctccgacgaggtgggcccgagcaggcctggggactacgactcccggcgtgctccgcagtccaaagccggaagagcgtggacccggaaccggatgtggcttgcggctcgggtggctgagcgcgcggggaaatggccacggggacagaccaggtggtgggactcggcctcgtcgccgttagcctgatcatcttcacctactacaccgcctgggtgattctcttgccattcatcgacagtcagcatgtcatccacaagtatttcctgccccgagcctatgctgtcgccatcccactggctgcaggcctcctgctgctcctgtttgtgggactgttcatctcctacgtgatgctgaagagcaagagagtgaccaagaaggctcagtgaaggtcccgcagggatgaggctgccagccccttctctgcttcccctccagcacagggaccaagtgggggagcctgcagaacctgtccaggcacagtggctcctcaagcctgcctgtcctgcagagtccccatggcatggagcttacacctgactgactggagccccctccccgactcccacttccagaagctaggagggagggatacctggaagactccggtcacctccttcttgctcagggcctaaaagatgctggtcctcccaacctcactctcagactccctgccaccttttcccctgggttctgccgtcttgcctcacttcccctcctgtcacatgctgacgttggacttagcaggttctaaggccacatgtgtgacctctctgacttctcttcctccaccaaggcagctttccttaccctgacacagccccagaccccacaaagccttctggacctggaaagcctggggaaggactgacagaccccaggaccagccctggggctcagggcagccaccccgggccgctgaccgactgacctctcctcacggaggcccagccccaaagccccagggctggcccgtttgggacagctgaccaataaacactgatggtgtgtt

SEQ ID NO: 349828 - DNA, 924 bp, Homo sapiens
tcggtcggtaccaggtagtgtcgtctttggctgagcgcgcggggaaatggccacggggacagaccaggtggtgggactcggcctcgtcgccgttagcctgatcatcttcacctactacaccgcctgggtgattctcttgccattcatcgacagtcagcatgtcatccacaagtatttcctgccccgagcctatgctgtcgccatcccactggctgcaggcctcctgctgctcctgtttgtgggactgttcatctcctacgtgatgctgaagagcaagagagtgaccaagaaggctcagtgaaggtcccgcagggatgaggctgccagccccttctctgcttcccctccagcacagggaccaagtgggggagcctgcagaacctgtccaggcacagtggctcctcaagcctgcctgtcctgcagagtccccatggcatggagcttacacctgactgactggagccccctccccgactcccacttccagaagctaggagggagggatacctggaagactccggtcacctccttcttgctcagggcctaaaagatgctggtcctcccaacctcactctcagactccctgccaccttttcccctgggttctgccgtcttgcctcacttcccctcctgtcacatgctgacgttggacttagcaggttctaaggccacatgtgtgacctctctgacttctcttcctccaccaaggcagctttccttaccctgacacagccccagaccccacaaagccttctggacctggaaagcctggggaaggactgacagaccccaggaccagccctggggctcagggcagccaccccgggccgctgaccgactgacctctcctcacggaggcccagccccaaagccccagggctggcccgtttgggacagctgaccaataaacactgatggtgtgtt

SEQ ID NO: 349829 - DNA, 2056 bp, Homo sapiens
tctttctttgggccaagcctccactgaggtgccaggatacagcagcaacctcagaccctaccctcggggctgacagggctggatcaacaatgcatcagtgaattaaaaggcacaggaggctgggcaccgtggctcacgcctgtaaacttttggaggccgagtgggaggatcgcttgagcccaggagttcgacaccagcctggataacatagaactccgtctcaaaaacaaacaaacaaacaaaaaaaacgttcccgactggcttccctgaggaacgtggcgtcccagtgagaccggatgggtgaggagcagccggcctgtgagtggtgggggaccgcgttcctatctcggagctgaagaagcgtggaagatgatctggcccaacatctctttgttctcagaggaagggccttccaagaccggggaggggcctgtgcgtgggtcccggtccgaaacgtgtctgggctgctgcgagagacagtcggtgaaggaagggaggggacatccgaagggtggcccgggaggccgggcgatggtgaggagggcgcctcctctccaccaaatcctccccatccatgcgggctagggacagaccctcccccgccaccctaggctggaaagtgaacgttctctgcacctctcccacctacagactaagtagggcacccggtttccgtgtcggcttcaccactgactcggaatgggatctacctttctctgagcctcacttttcccatctgaaaaatggaacttccgatcccgcactcccatcccactctggccccgggactctgggatacttagagattggcttttggtggggcggcgacaggactgtggccatgaaggccagggagtctgggtccccaactcggtcccattccctagagagattcgggcagcaaccggccccacaatgctcttgagaactacacttcgccgatatgcaaagaagaggaggcggttcctgctcgtctccgacgaggtgggcccgagcaggcctggggactacgactcccggcgtgctccgcagtccaaagccggaagagcgtggacccggaaccggatgtggcttgcggctcgggtggctgagcgcgcggggaaatggccacggggacagaccaggtggtgggactcggcctcgtcgccgttagcctgatcatcttcacctactacaccgcctgggtgattctcttgccattcatcgacagtcagcatgtcatccacaagtatttcctgccccgagcctatgctgtcgccatcccactggctgcaggcctcctgctgctcctgtttgtgggactgttcatctcctacgtgatgctgaagagcaagagagtgaccaagaaggctcagtgaaggtcccgcagggatgaggctgccagccccttctctgcttcccctccagcacagggaccaagtgggggagcctgcagaacctgtccaggcacagtggctcctcaagcctgcctgtcctgcagagtccccatggcatggagcttacacctgactgactggagccccctccccgactcccacttccagaagctaggagggagggatacctggaagactccggtcacctccttcttgctcagggcctaaaagatgctggtcctcccaacctcactctcagactccctgccaccttttcccctgggttctgccgtcttgcctcacttcccctcctgtcacatgctgacgttggacttagcaggttctaaggccacatgtgtgacctctctgacttctcttcctccaccaaggcagctttccttaccctgacacagccccagaccccacaaagccttctggacctggaaagcctggggaaggactgacagaccccaggaccagccctggggctcagggcagccaccccggcgtgacgatgactctctcagggccagcccaagccaggtggcgttggaagtgccaaaccgtgggtaaaaaaagcgggtcaaaatcgggcatccgtccttggaagccaaggggataagcgggggacgcggaatgcggtcgcaccggggggccaacggaagggggcggtaacaaag

SEQ ID NO: 349830 - DNA, 812 bp, Homo sapiens
gtgacagaccccaggaccagccctggggctcagggcagccaccccgggccgctgaccgactgacctctcctgctgctcctgtttgtgggactgttcatctcctacgtgatgctgaagagcaagagagtgaccaagaaggctcagtgaaggtcccgcagggatgaggctgccagccccttctctgcttcccctccagcacagggaccaagtgggggagcctgcagaacctgtccaggcacagtggctcctcaagcctgcctgtcctgcagagtccccatggcatggagcttacacctgactgactggagccccctccccgactcccacttccagaagctaggagggagggatacctggaagactccggtcacctccttcttgctcagggcctaaaagatgctggtcctcccaacctcactctcagactccctgccaccttttcccctgggttctgccgtcttgcctcacttcccctcctgtcacatgctgacgttggacttagcaggttctaaggccacatgtgtgacctctctgacttctcttcctccaccaaggcagctttccttaccctgacacagccccagaccccacaaagccttctggacctggaaagcctggggaaggactgacagagccccagggctggcccgtttgggacagctgaccaataaacactgatggtgtgttgtccaaaaaccataaaaaaaaccgggcgctctatgtcggggggggcacaagggttaaagggcctggttatgtccggccctttttttcacaggggatccgggggcccaagggggattatgaaccga

SEQ ID NO: 349831 - DNA, 3053 bp, Homo sapiens
tctttctttgggccaagcctccactgaggtgccaggatacagcagcaacctcagaccctaccctcggggctgacagggctggatcaacaatgcatcagtgaattaaaaggcacaggaggctgggcaccgtggctcacgcctgtaaacttttggaggccgagtgggaggatcgcttgagcccaggagttcgacaccagcctggataacatagaactccgtctcaaaaacaaacaaacaaacaaaaaaaacgttcccgactggcttccctgaggaacgtggcgtcccagtgagaccggatgggtgaggagcagccggcctgtgagtggtgggggaccgcgttcctatctcggagctgaagaagcgtggaagatgatctggcccaacatctctttgttctcagaggaagggccttccaagaccggggaggggcctgtgcgtgggtcccggtccgaaacgtgtctgggctgctgcgagagacagtcggtgaaggaagggaggggacatccgaagggtggcccgggaggccgggcgatggtgaggagggcgcctcctctccaccaaatcctccccatccatgcgggctagggacagaccctcccccgccaccctaggctggaaagtgaacgttctctgcacctctcccacctacagactaagtagggcacccggtttccgtgtcggcttcaccactgactcggaatgggatctacctttctctgagcctcacttttcccatctgaaaaatggaacttccgatcccgcactcccatcccactctggccccgggactctgggatacttagagattggcttttggtggggcggcgacaggactgtggccatgaaggccagggagtctgggtccccaactcggtcccattccctagagagattcgggcagcaaccggccccacaatgctcttgagaactacacttcgccgatatgcaaagaagaggaggcggttcctgctcgtctccgacgaggtgggcccgagcaggcctggggactacgactcccggcgtgctccgcagtccaaagccggaagagcgtggacccggaaccggatgtggcttgcggctcgggtggctgagcgcgcggggaaatggtgagattggcaccgtgtgccggagataggggcgtctgggggtggggtcccgggtctgctcaggagctggggcatgggcacttggaacggggattgctctcccgcccccactattgtacggacgacaacgcggaggcctagcattctctcccagcctagaaactgatccctagtcagccttctaccatctgttgaatgggaagcttagaccgtgatcgggccgcgacgccccgcttccattagtgcgccgaaatagagggtcacttcgtcagctgagacctcccttttctccaggccacggggacagaccaggtggtgggactcggcctcgtcgccgttagcctgatcatcttcacctactacaccgcctgggtgattctcttggtatgtcattctccccgtccgctgctcaccttccccgagccctggcaccgccagagcaactactatataggctctaggcacggcgctggcttcattgcctgcctcatctcttgaactctccagaacaactctatgaggaagatgccagtggtaccgcattttatagatgagatagctgaggctaggggagaaggatctggcccaagattgcatccttagccgctacacttataactctgtttccggcttgctttgacttttgggggagttctgttccttctgggttagcctgctgactcttaggcatggcaaacgccagtgatatttgtgaaggcctttaggatatttttttcttgtgggaaaacttgttggttattgcttaagaagtgcagtgtgtctggaagtgcagaacttggtatcctttagagaaaaaatattagtgaagaagccctggaggcccaggttgggagtcagtcgaggattcctcaagtaccatttgctaggctgtgaggtgccttagggcaggtctcttgtgccctgttctcttgtccccaccaccaacctatagcaggcaccaaagcaagtgcccggtaaataccaataagaaattaaggaaagaaacaaaccacgacacccaaatgccgtaatcttaaagaaaagcaaatgcagtcccagtcctctgaatgggtcagccccttagatggaggaggtgggacgtttgggcttgggggctcggcaaggcaagcaagacacaccagagctcttccctcgatgccagccattcatcgacagtcagcatgtcatccacaagtatttcctgccccgagcctatgctgtcgccatcccactggctgcaggcctcctgctgctcctgtttgtgggactgttcatctcctacgtgatgctgaagagcaagagagtgaccaagaaggctcagtgaaggtcccgcagggatgaggctgccagccccttctctgcttcccctccagcacagggaccaagtgggggagcctgcagaacctgtccaggcacagtggctcctcaagcctgcctgtcctgcagagtccccatggcatggagcttacacctgactgactggagccccctccccgactcccacttccagaagctaggagggagggatacctggaagactccggtcacctccttcttgctcagggcctaaaagatgctggtcctcccaacctcactctcagactccctgccaccttttcccctgggttctgccgtcttgcctcacttcccctcctgtcacatgctgacgttggacttagcaggttctaaggccacatgtgtgacctctctgacttctcttcctccaccaaggcagctttccttaccctgacacagccccagaccccacaaagccttctggacctggaaagcctggggaaggactgacagaccccaggaccagccctggggctcagggcagccaccccgggccgctgaccgactgacctctcctcacggaggcccagccccaaagccccagggctggcccgtttgggacagctgaccaataaacactgatggtgtgtt

SEQ ID NO: 349832 - DNA, 2929 bp, Homo sapiens
tctttctttgggccaagcctccactgaggtgccaggatacagcagcaacctcagaccctaccctcggggctgacagggctggatcaacaatgcatcagtgaattaaaaggcacaggaggctgggcaccgtggctcacgcctgtaaacttttggaggccgagtgggaggatcgcttgagcccaggagttcgacaccagcctggataacatagaactccgtctcaaaaacaaacaaacaaacaaaaaaaacgttcccgactggcttccctgaggaacgtggcgtcccagtgagaccggatgggtgaggagcagccggcctgtgagtggtgggggaccgcgttcctatctcggagctgaagaagcgtggaagatgatctggcccaacatctctttgttctcagaggaagggccttccaagaccggggaggggcctgtgcgtgggtcccggtccgaaacgtgtctgggctgctgcgagagacagtcggtgaaggaagggaggggacatccgaagggtggcccgggaggccgggcgatggtgaggagggcgcctcctctccaccaaatcctccccatccatgcgggctagggacagaccctcccccgccaccctaggctggaaagtgaacgttctctgcacctctcccacctacagactaagtagggcacccggtttccgtgtcggcttcaccactgactcggaatgggatctacctttctctgagcctcacttttcccatctgaaaaatggaacttccgatcccgcactcccatcccactctggccccgggactctgggatacttagagattggcttttggtggggcggcgacaggactgtggccatgaaggccagggagtctgggtccccaactcggtcccattccctagagagattcgggcagcaaccggccccacaatgctcttgagaactacacttcgccgatatgcaaagaagaggaggcggttcctgctcgtctccgacgaggtgggcccgagcaggcctggggactacgactcccggcgtgctccgcagtccaaagccggaagagcgtggacccggaaccggatgtggcttgcggctcgggtggctgagcgcgcggggaaatggccacggggacagaccaggtggtgggactcggcctcgtcgccgttagcctgatcatcttcacctactacaccgcctgggtgattctcttggtatgtcattctccccgtccgctgctcaccttccccgagccctggcaccgccagagcaactactatataggctctaggcacggcgctggcttcattgcctgcctcatctcttgaactctccagaacaactctatgaggaagatgccagtggtaccgcattttatagatgagatagctgaggctaggggagaaggatctggcccaagattgcatccttagccgctacacttataactctgtttccggcttgctttgacttttgggggagttctgttccttctgggttagcctgctgactcttaggcatggcaaacgccagtgatatttgtgaaggcctttaggatatttttttcttgtgggaaaacttgttggttattgcttaagaagtgcagtgtgtctggaagtgcagaacttggtatcctttagagaaaaaatattagtgaagaagccctggaggcccaggttgggagtcagtcgaggattcctcaagtaccatttgctaggctgtgaggtgccttagggcaggtctcttgtgccctgttctcttgtccccaccaccaacctatagcaggcaccaaagcaagtgcccggtaaataccaataagaaattaaggaaagaaacaaaccacgacacccaaatgccgtaatcttaaagaaaagcaaatgcagtcccagtcctctgaatgggtcagccccttagatggaggaggtgggacgtttgggcttgggggctcggcaaggcaagcaagacacaccagagctcttccctcgatgccagccattcatcgacagtcagcatgtcatccacaagtatttcctgccccgagcctatgctgtcgccatcccactggctgcaggcctcctgctgctcctgtttgtgggactgttcatctcctacgtgatgctgaagagcaagagagtgaccaagaaggctcagtgaaggtcccgcagggatgaggctgccagccccttctctgcttcccctccagcacagggaccaagtgggggagcctgcagaacctgtccaggcacagtggctcctcaagcctgcctgtcctgcagagtccccatggcatggagcttacacctgactgactggagccccctccccgactcccacttccagaagctaggagggagggatacctggaagactccggtcacctccttcttgctcagggcctaaaagatgctggtcctcccaacctcactctcagactccctgccaccttttcccctgggttctgccgtcttgcctcacttcccctcctgtcacatgctgacgttggacttagcaggttctaaggccacatgtgtgacctctctgacttctcttcctccaccaaggcagctttccttaccctgacacagccccagaccccacaaagccttctggacctggaaagcctggggaaggactgacagaccccaggaccagccctggggctcagggcagccaccccgggccgctgaccgactgacctctcctcacggaggcccagccccaaagccccagggctggcccgtttgggacagctgaccaataaacactgatggtgtgttaaacaacacacaacacacccccccacaaacaaccaatacaaaaaaaacagtcagccaccacaagggaccgtgcacgatcgcaagaggcccgaaacacgacacggcggaaaggcgacaccgaccacgcggatgcgcgaatgcgagcgaggcgcgagcagcacggagggaga

SEQ ID NO: 349833 - DNA, 2275 bp, Homo sapiens
tctttctttgggccaagcctccactgaggtgccaggatacagcagcaacctcagaccctaccctcggggctgacagggctggatcaacaatgcatcagtgaattaaaaggcacaggaggctgggcaccgtggctcacgcctgtaaacttttggaggccgagtgggaggatcgcttgagcccaggagttcgacaccagcctggataacatagaactccgtctcaaaaacaaacaaacaaacaaaaaaaacgttcccgactggcttccctgaggaacgtggcgtcccagtgagaccggatgggtgaggagcagccggcctgtgagtggtgggggaccgcgttcctatctcggagctgaagaagcgtggaagatgatctggcccaacatctctttgttctcagaggaagggccttccaagaccggggaggggcctgtgcgtgggtcccggtccgaaacgtgtctgggctgctgcgagagacagtcggtgaaggaagggaggggacatccgaagggtggcccgggaggccgggcgatggtgaggagggcgcctcctctccaccaaatcctccccatccatgcgggctagggacagaccctcccccgccaccctaggctggaaagtgaacgttctctgcacctctcccacctacagactaagtagggcacccggtttccgtgtcggcttcaccactgactcggaatgggatctacctttctctgagcctcacttttcccatctgaaaaatggaacttccgatcccgcactcccatcccactctggccccgggactctgggatacttagagattggcttttggtggggcggcgacaggactgtggccatgaaggccagggagtctgggtccccaactcggtcccattccctagagagattcgggcagcaaccggccccacaatgctcttgagaactacacttcgccgatatgcaaagaagaggaggcggttcctgctcgtctccgacgaggtgggcccgagcaggcctggggactacgactcccggcgtgctccgcagtccaaagccggaagagcgtggacccggaaccggatgtggcttgcggctcgggtggctgagcgcgcggggaaatggtgagattggcaccgtgtgccggagataggggcgtctgggggtggggtcccgggtctgctcaggagctggggcatgggcacttggaacggggattgctctcccgcccccactattgtacggacgacaacgcggaggcctagcattctctcccagcctagaaactgatccctagtcagccttctaccatctgttgaatgggaagcttagaccgtgatcgggccgcgacgccccgcttccattagtgcgccgaaatagagggtcacttcgtcagctgagacctcccttttctccaggccacggggacagaccaggtggtgggactcggcctcgtcgccgttagcctgatcatcttcacctactacaccgcctgggtgattctcttgccattcatcgacagtcagcatgtcatccacaagtatttcctgccccgagcctatgctgtcgccatcccactggctgcaggcctcctgctgctcctgtttgtgggactgttcatctcctacgtgatgctgaagagcaagagagtgaccaagaaggctcagtgaaggtcccgcagggatgaggctgccagccccttctctgcttcccctccagcacagggaccaagtgggggagcctgcagaacctgtccaggcacagtggctcctcaagcctgcctgtcctgcagagtccccatggcatggagcttacacctgactgactggagccccctccccgactcccacttccagaagctaggagggagggatacctggaagactccggtcacctccttcttgctcagggcctaaaagatgctggtcctcccaacctcactctcagactccctgccaccttttcccctgggttctgccgtcttgcctcacttcccctcctgtcacatgctgacgttggacttagcaggttctaaggccacatgtgtgacctctctgacttctcttcctccaccaaggcagctttccttaccctgacacagccccagaccccacaaagccttctggacctggaaagcctggggaaggactgacagaccccaggaccagccctggggctcagggcagccaccccgggccgctgaccgactgacctctcctcacggaggcccagccccaaagccccagggctggcccgtttgggacagctgaccaataaacactgatggtgtgtt

SEQ ID NO: 349834 - DNA, 2878 bp, Homo sapiens
tctttctttgggccaagcctccactgaggtgccaggatacagcagcaacctcagaccctaccctcggggctgacagggctggatcaacaatgcatcagtgaattaaaaggcacaggaggctgggcaccgtggctcacgcctgtaaacttttggaggccgagtgggaggatcgcttgagcccaggagttcgacaccagcctggataacatagaactccgtctcaaaaacaaacaaacaaacaaaaaaaacgttcccgactggcttccctgaggaacgtggcgtcccagtgagaccggatgggtgaggagcagccggcctgtgagtggtgggggaccgcgttcctatctcggagctgaagaagcgtggaagatgatctggcccaacatctctttgttctcagaggaagggccttccaagaccggggaggggcctgtgcgtgggtcccggtccgaaacgtgtctgggctgctgcgagagacagtcggtgaaggaagggaggggacatccgaagggtggcccgggaggccgggcgatggtgaggagggcgcctcctctccaccaaatcctccccatccatgcgggctagggacagaccctcccccgccaccctaggctggaaagtgaacgttctctgcacctctcccacctacagactaagtagggcacccggtttccgtgtcggcttcaccactgactcggaatgggatctacctttctctgagcctcacttttcccatctgaaaaatggaacttccgatcccgcactcccatcccactctggccccgggactctgggatacttagagattggcttttggtggggcggcgacaggactgtggccatgaaggccagggagtctgggtccccaactcggtcccattccctagagagattcgggcagcaaccggccccacaatgctcttgagaactacacttcgccgatatgcaaagaagaggaggcggttcctgctcgtctccgacgaggtgggcccgagcaggcctggggactacgactcccggcgtgctccgcagtccaaagccggaagagcgtggacccggaaccggatgtggcttgcggctcgggtggctgagcgcgcggggaaatggccacggggacagaccaggtggtgggactcggcctcgtcgccgttagcctgatcatcttcacctactacaccgcctgggtgattctcttggtatgtcattctccccgtccgctgctcaccttccccgagccctggcaccgccagagcaactactatataggctctaggcacggcgctggcttcattgcctgcctcatctcttgaactctccagaacaactctatgaggaagatgccagtggtaccgcattttatagatgagatagctgaggctaggggagaaggatctggcccaagattgcatccttagccgctacacttataactctgtttccggcttgctttgacttttgggggagttctgttccttctgggttagcctgctgactcttaggcatggcaaacgccagtgatatttgtgaaggcctttaggatatttttttcttgtgggaaaacttgttggttattgcttaagaagtgcagtgtgtctggaagtgcagaacttggtatcctttagagaaaaaatattagtgaagaagccctggaggcccaggttgggagtcagtcgaggattcctcaagtaccatttgctaggctgtgaggtgccttagggcaggtctcttgtgccctgttctcttgtccccaccaccaacctatagcaggcaccaaagcaagtgcccggtaaataccaataagaaattaaggaaagaaacaaaccacgacacccaaatgccgtaatcttaaagaaaagcaaatgcagtcccagtcctctgaatgggtcagccccttagatggaggaggtgggacgtttgggcttgggggctcggcaaggcaagcaagacacaccagagctcttccctcgatgccagccattcatcgacagtcagcatgtcatccacaagtatttcctgccccgagcctatgctgtcgccatcccactggctgcaggcctcctgctgctcctgtttgtgggactgttcatctcctacgtgatgctgaagagcaagagagtgaccaagaaggctcagtgaaggtcccgcagggatgaggctgccagccccttctctgcttcccctccagcacagggaccaagtgggggagcctgcagaacctgtccaggcacagtggctcctcaagcctgcctgtcctgcagagtccccatggcatggagcttacacctgactgactggagccccctccccgactcccacttccagaagctaggagggagggatacctggaagactccggtcacctccttcttgctcagggcctaaaagatgctggtcctcccaacctcactctcagactccctgccaccttttcccctgggttctgccgtcttgcctcacttcccctcctgtcacatgctgacgttggacttagcaggttctaaggccacatgtgtgacctctctgacttctcttcctccaccaaggcagctttccttaccctgacacagccccagaccccacaaagccttctggacctggaaagcctggggaaggactgacagaccccaggaccagccctggggctcagggcagccaccccgggccgctgaccgactgacctctcctcacggaggcccagccccaaagccccagggctggcccgtttgggacagctgaccaataaacactgatggtgtgttaaaaaattctcctgtagtttatgcaacctttaaccttgagggggggcccggtaccaaattcgccctattgggattagcattacatattcactggcctacggtttactacgttttgactg

SEQ ID NO: 349835 - DNA, 2676 bp, Homo sapiens
tctttctttgggccaagcctccactgaggtgccaggatacagcagcaacctcagaccctaccctcggggctgacagggctggatcaacaatgcatcagtgaattaaaaggcacaggaggctgggcaccgtggctcacgcctgtaaacttttggaggccgagtgggaggatcgcttgagcccaggagttcgacaccagcctggataacatagaactccgtctcaaaaacaaacaaacaaacaaaaaaaacgttcccgactggcttccctgaggaacgtggcgtcccagtgagaccggatgggtgaggagcagccggcctgtgagtggtgggggaccgcgttcctatctcggagctgaagaagcgtggaagatgatctggcccaacatctctttgttctcagaggaagggccttccaagaccggggaggggcctgtgcgtgggtcccggtccgaaacgtgtctgggctgctgcgagagacagtcggtgaaggaagggaggggacatccgaagggtggcccgggaggccgggcgatggtgaggagggcgcctcctctccaccaaatcctccccatccatgcgggctagggacagaccctcccccgccaccctaggctggaaagtgaacgttctctgcacctctcccacctacagactaagtagggcacccggtttccgtgtcggcttcaccactgactcggaatgggatctacctttctctgagcctcacttttcccatctgaaaaatggaacttccgatcccgcactcccatcccactctggccccgggactctgggatacttagagattggcttttggtggggcggcgacaggactgtggccatgaaggccagggagtctgggtccccaactcggtcccattccctagagagattcgggcagcaaccggccccacaatgctcttgagaactacacttcgccgatatgcaaagaagaggaggcggttcctgctcgtctccgacgaggtgggcccgagcaggcctggggactacgactcccggcgtgctccgcagtccaaagccggaagagcgtggacccggaaccggatgtggcttgcggctcgggtggctgagcgcgcggggaaatggccacggggacagaccaggtggtgggactcggcctcgtcgccgttagcctgatcatcttcacctactacaccgcctgggtgattctcttggtatgtcattctccccgtccgctgctcaccttccccgagccctggcaccgccagagcaactactatataggctctaggcacggcgctggcttcattgcctgcctcatctcttgaactctccagaacaactctatgaggaagatgccagtggtaccgcattttatagatgagatagctgaggctaggggagaaggatctggcccaagattgcatccttagccgctacacttataactctgtttccggcttgctttgacttttgggggagttctgttccttctgggttagcctgctgactcttaggcatggcaaacgccagtgatatttgtgaaggcctttaggatatttttttcttgtgggaaaacttgttggttattgcttaagaagtgcagtgtgtctggaagtgcagaacttggtatcctttagagaaaaaatattagtgaagaagccctggaggcccaggttgggagtcagtcgaggattcctcaagtaccatttgctaggctgtgaggtgccttagggcaggtctcttgtgccctgttctcttgtccccaccaccaacctatagcaggcaccaaagcaagtgcccggtaaataccaataagaaattaaggaaagaaacaaaccacgacacccaaatgccgtaatcttaaagaaaagcaaatgcagtcccagtcctctgaatgggtcagccccttagatggaggaggtgggacgtttgggcttgggggctcggcaaggcaagcaagacacaccagagctcttccctcgatgccagccattcatcgacagtcagcatgtcatccacaagtatttcctgccccgagcctatgctgtcgccatcccactggctgcaggcctcctgctgctcctgtttgtgggactgttcatctcctacgtgatgctgaagagcaagagagtgaccaagaaggctcagtgaaggtcccgcagggatgaggctgccagccccttctctgcttcccctccagcacagggaccaagtgggggagcctgcagaacctgtccaggcacagtggctcctcaagcctgcctgtcctgcagagtccccatggcatggagcttacacctgactgactggagccccctccccgactcccacttccagaagctaggagggagggatacctggaagactccggtcacctccttcttgctcagggcctaaaagatgctggtcctcccaacctcactctcagactccctgccaccttttcccctgggttctgccgtcttgcctcacttcccctcctgtcacatgctgacgttggacttagcaggttctaaggccacatgtgtgacctctctgacttctcttcctccaccaaggcagctttccttaccctgacacagccccagaccccacaaagccttctggacctggaaagcctggggaaggactgacagagccccagggctggcccgtttgggacagctgaccaataaacactgatggtgtgtt

SEQ ID NO: 349836 - DNA, 2627 bp, Homo sapiens
tctttctttgggccaagcctccactgaggtgccaggatacagcagcaacctcagaccctaccctcggggctgacagggctggatcaacaatgcatcagtgaattaaaaggcacaggaggctgggcaccgtggctcacgcctgtaaacttttggaggccgagtgggaggatcgcttgagcccaggagttcgacaccagcctggataacatagaactccgtctcaaaaacaaacaaacaaacaaaaaaaacgttcccgactggcttccctgaggaacgtggcgtcccagtgagaccggatgggtgaggagcagccggcctgtgagtggtgggggaccgcgttcctatctcggagctgaagaagcgtggaagatgatctggcccaacatctctttgttctcagaggaagggccttccaagaccggggaggggcctgtgcgtgggtcccggtccgaaacgtgtctgggctgctgcgagagacagtcggtgaaggaagggaggggacatccgaagggtggcccgggaggccgggcgatggtgaggagggcgcctcctctccaccaaatcctccccatccatgcgggctagggacagaccctcccccgccaccctaggctggaaagtgaacgttctctgcacctctcccacctacagactaagtagggcacccggtttccgtgtcggcttcaccactgactcggaatgggatctacctttctctgagcctcacttttcccatctgaaaaatggaacttccgatcccgcactcccatcccactctggccccgggactctgggatacttagagattggcttttggtggggcggcgacaggactgtggccatgaaggccagggagtctgggtccccaactcggtcccattccctagagagattcgggcagcaaccggccccacaatgctcttgagaactacacttcgccgatatgcaaagaagaggaggcggttcctgctcgtctccgacgaggtgggcccgagcaggcctggggactacgactcccggcgtgctccgcagtccaaagccggaagagcgtggacccggaaccggatgtggcttgcggctcgggtggctgagcgcgcggggaaatggccacggggacagaccaggtggtgggactcggcctcgtcgccgttagcctgatcatcttcacctactacaccgcctgggtgattctcttggtatgtcattctccccgtccgctgctcaccttccccgagccctggcaccgccagagcaactactatataggctctaggcacggcgctggcttcattgcctgcctcatctcttgaactctccagaacaactctatgaggaagatgccagtggtaccgcattttatagatgagatagctgaggctaggggagaaggatctggcccaagattgcatccttagccgctacacttataactctgtttccggcttgctttgacttttgggggagttctgttccttctgggttagcctgctgactcttaggcatggcaaacgccagtgatatttgtgaaggcctttaggatatttttttcttgtgggaaaacttgttggttattgcttaagaagtgcagtgtgtctggaagtgcagaacttggtatcctttagagaaaaaatattagtgaagaagccctggaggcccaggttgggagtcagtcgaggattcctcaagtaccatttgctaggctgtgaggtgccttagggcaggtctcttgtgccctgttctcttgtccccaccaccaacctatagcaggcaccaaagcaagtgcccggtaaataccaataagaaattaaggaaagaaacaaaccacgacacccaaatgccgtaatcttaaagaaaagcaaatgcagtcccagtcctctgaatgggtcagccccttagatggaggaggtgggacgtttgggcttgggggctcggcaaggcaagcaagacacaccagagctcttccctcgatgccagccattcatcgacagtcagcatgtcatccacaagtatttcctgccccgagcctatgctgtcgccatcccactggctgcaggcctcctgctgctcctgtttgtgggactgttcatctcctacgtgatgctgaagagcaagagagtgaccaagaaggctcagtgaaggtcccgcagggatgaggctgccagccccttctctgcttcccctccagcacagggaccaagtgggggagcctgcagaacctgtccaggcacagtggctcctcaagcctgcctgtcctgcagagtccccatggcatggagcttacacctgactgactggagccccctccccgactcccacttccagaagctaggagggagggatacctggaagactccggtcacctccttcttgctcagggcctaaaagatgctggtcctcccaacctcactctcagactccctgccaccttttcccctgggttctgccgtcttgcctcacttcccctcctgtcacatgctgacgttggacttagcaggttctaaggccacatgtgtgacctctctgacttctcttcctccaccaaggcagctttccttaccctgacacagccccaggccccagggctggcccgtttgggacagctgaccaataaacactgatggtgtgtt

SEQ ID NO: 349837 - DNA, 1809 bp, Homo sapiens
tctttctttgggccaagcctccactgaggtgccaggatacagcagcaacctcagaccctaccctcggggctgacagggctggatcaacaatgcatcagtgaattaaaaggcacaggaggctgggcaccgtggctcacgcctgtaaacttttggaggccgagtgggaggatcgcttgagcccaggagttcgacaccagcctggataacatagaactccgtctcaaaaacaaacaaacaaacaaaaaaaacgttcccgactggcttccctgaggaacgtggcgtcccagtgagaccggatgggtgaggagcagccggcctgtgagtggtgggggaccgcgttcctatctcggagctgaagaagcgtggaagatgatctggcccaacatctctttgttctcagaggaagggccttccaagaccggggaggggcctgtgcgtgggtcccggtccgaaacgtgtctgggctgctgcgagagacagtcggtgaaggaagggaggggacatccgaagggtggcccgggaggccgggcgatggtgaggagggcgcctcctctccaccaaatcctccccatccatgcgggctagggacagaccctcccccgccaccctaggctggaaagtgaacgttctctgcacctctcccacctacagactaagtagggcacccggtttccgtgtcggcttcaccactgactcggaatgggatctacctttctctgagcctcacttttcccatctgaaaaatggaacttccgatcccgcactcccatcccactctggccccgggactctgggatacttagagattggcttttggtggggcggcgacaggactgtggccatgaaggccagggagtctgggtccccaactcggtcccattccctagagagattcgggcagcaaccggccccacaatgctcttgagaactacacttcgccgatatgcaaagaagaggaggcggttcctgctcgtctccgacgaggtgggcccgagcaggcctggggactacgactcccggcgtgctccgcagtccaaagccggaagagcgtggacccggaaccggatgtggcttgcggctcgggtggctgagcgcgcggggaaatggtgagattggcaccgtgtgccggagataggggcgtctgggggtggggtcccgggtctgctcaggagctggggcatgggcacttggaacggggattgctctcccgcccccactattgtacggacgacaacgcggaggcctagcattctctcccagcctagaaactgatccctagtcagccttctaccatctgttgaatgggaagcttagaccgtgatcgggccgcgacgccccgcttccattagtgcgccgaaatagagggtcacttcgtcagctgagacctcccttttctccaggccacggggacagaccaggtggtgggactcggcctcgtcgccgttagcctgatcatcttcacctactacaccgcctgggtgattctcttgccattcatcgacagtcagcatgtcatccacaagtatttcctgccccgagcctatgctgtcgccatcccactggctgcaggcctcctgctgctcctgtttgtgggcagctttccttaccctgacacagccccagaccccacaaagccttctggacctggaaagcctggggaaggactgacagaccccaggaccagccctggggctcagggcagccaccccgggccgctgaccgactgacctctcctcacggaggcccagccccaaagccccagggctggcccgtttgggacagctgaccaataaacactgatggtgtgtt

SEQ ID NO: 349838 - DNA, 3701 bp, Homo sapiens
tctttctttgggccaagcctccactgaggtgccaggatacagcagcaacctcagaccctaccctcggggctgacagggctggatcaacaatgcatcagtgaattaaaaggcacaggaggctgggcaccgtggctcacgcctgtaaacttttggaggccgagtgggaggatcgcttgagcccaggagttcgacaccagcctggataacatagaactccgtctcaaaaacaaacaaacaaacaaaaaaaacgttcccgactggcttccctgaggaacgtggcgtcccagtgagaccggatgggtgaggagcagccggcctgtgagtggtgggggaccgcgttcctatctcggagctgaagaagcgtggaagatgatctggcccaacatctctttgttctcagaggaagggccttccaagaccggggaggggcctgtgcgtgggtcccggtccgaaacgtgtctgggctgctgcgagagacagtcggtgaaggaagggaggggacatccgaagggtggcccgggaggccgggcgatggtgaggagggcgcctcctctccaccaaatcctccccatccatgcgggctagggacagaccctcccccgccaccctaggctggaaagtgaacgttctctgcacctctcccacctacagactaagtagggcacccggtttccgtgtcggcttcaccactgactcggaatgggatctacctttctctgagcctcacttttcccatctgaaaaatggaacttccgatcccgcactcccatcccactctggccccgggactctgggatacttagagattggcttttggtggggcggcgacaggactgtggccatgaaggccagggagtctgggtccccaactcggtcccattccctagagagattcgggcagcaaccggccccacaatgctcttgagaactacacttcgccgatatgcaaagaagaggaggcggttcctgctcgtctccgacgaggtgggcccgagcaggcctggggactacgactcccggcgtgctccgcagtccaaagccggaagagcgtggacccggaaccggatgtggcttgcggctcgggtggctgagcgcgcggggaaatggccacggggacagaccaggtggtgggactcggcctcgtcgccgttagcctgatcatcttcacctactacaccgcctgggtgattctcttggtatgtcattctccccgtccgctgctcaccttccccgagccctggcaccgccagagcaactactatataggctctaggcacggcgctggcttcattgcctgcctcatctcttgaactctccagaacaactctatgaggaagatgccagtggtaccgcattttatagatgagatagctgaggctaggggagaaggatctggcccaagattgcatccttagccgctacacttataactctgtttccggcttgctttgacttttgggggagttctgttccttctgggttagcctgctgactcttaggcatggcaaacgccagtgatatttgtgaaggcctttaggatatttttttcttgtgggaaaacttgttggttattgcttaagaagtgcagtgtgtctggaagtgcagaacttggtatcctttagagaaaaaatattagtgaagaagccctggaggcccaggttgggagtcagtcgaggattcctcaagtaccatttgctaggctgtgaggtgccttagggcaggtctcttgtgccctgttctcttgtccccaccaccaacctatagcaggcaccaaagcaagtgcccggtaaataccaataagaaattaaggaaagaaacaaaccacgacacccaaatgccgtaatcttaaagaaaagcaaatgcagtcccagtcctctgaatgggtcagccccttagatggaggaggtgggacgtttgggcttgggggctcggcaaggcaagcaagacacaccagagctcttccctcgatgccagccattcatcgacagtcagcatgtcatccacaagtatttcctgccccgagcctatgctgtcgccatcccactggctgcaggcctcctgctgctcctgtttgtgggtaagtcatcacctcctccccttgaccctgggcagggtttcgggaagaccccacctctgaacatgcttccacactttggcggtgctggaagctgcttgccccgaactcacccgtggggttttcctgttcatccttcgaggctgccagtcagtaacctctgggtttcctggtgccccaggctttttggactccaatgacctgtctacctctttcctgccccaaccccatcatcactctgctcacacctcagtcaccctcttgtcaccctggcttctaattcctgcacctctctctctcatggcttcctagggatggggactgtgtctccatcattactgcacatctagaacaggctgtggcactgaggctgtgctcagaaagtcatttggatgagtcagtcaacagccgggtgcctggatgatgggtggatggatgggtgggtgggtgaggtgtaggaggaggtgggtaggtatgtaggtgggcagacaagtggttgaccgggtgatcgatagatgggtggatcttgttccccttggaatctgaaacactaaatgcagcatcttgcttgaggcaggcactcagttggtgtttgttgagtgaatgtgagtagacatatgccttgacgaatgactagggagataagcaggttccctggaggatggttgggtaggttcacagccctgtgtgtgggtggctctgctgtgtcatgccctggcctcccagcagccctgagcttagatcttatgtggcctttctggtctgtgtatcccaggactgttcatctcctacgtgatgctgaagagcaagagagtgaccaagaaggctcagtgaaggtcccgcagggatgaggctgccagccccttctctgcttcccctccagcacagggaccaagtgggggagcctgcagaacctgtccaggcacagtggctcctcaagcctgcctgtcctgcagagtccccatggcatggagcttacacctgactgactggagccccctccccgactcccacttccagaagctaggagggagggatacctggaagactccggtcacctccttcttgctcagggcctaaaagatgctggtcctcccaacctcactctcagactccctgccaccttttcccctgggttctgccgtcttgcctcacttcccctcctgtcacatgctgacgttggacttagcaggttctaaggccacatgtgtgacctctctgacttctcttcctccaccaaggcagctttccttaccctgacacagccccagaccccacaaagccttctggacctggaaagcctggggaaggactgacagaccccaggaccagccctggggctcagggcagccaccccgggccgctgaccgactgacctctcctcacggaggcccagccccaaagccccagggctggcccgtttgggacagctgaccaataaacactgatggtgtgttaaacaacacacaacacacccccccacaaacaaccaatacaaaaaaaacagtcagccaccacaagggaccgtgcacgatcgcaagaggcccgaaacacgacacggcggaaaggcgacaccgaccacgcggatgcgcgaatgcgagcgaggcgcgagcagcacggagggaga

SEQ ID NO: 349839 - DNA, 3103 bp, Homo sapiens
tctttctttgggccaagcctccactgaggtgccaggatacagcagcaacctcagaccctaccctcggggctgacagggctggatcaacaatgcatcagtgaattaaaaggcacaggaggctgggcaccgtggctcacgcctgtaaacttttggaggccgagtgggaggatcgcttgagcccaggagttcgacaccagcctggataacatagaactccgtctcaaaaacaaacaaacaaacaaaaaaaacgttcccgactggcttccctgaggaacgtggcgtcccagtgagaccggatgggtgaggagcagccggcctgtgagtggtgggggaccgcgttcctatctcggagctgaagaagcgtggaagatgatctggcccaacatctctttgttctcagaggaagggccttccaagaccggggaggggcctgtgcgtgggtcccggtccgaaacgtgtctgggctgctgcgagagacagtcggtgaaggaagggaggggacatccgaagggtggcccgggaggccgggcgatggtgaggagggcgcctcctctccaccaaatcctccccatccatgcgggctagggacagaccctcccccgccaccctaggctggaaagtgaacgttctctgcacctctcccacctacagactaagtagggcacccggtttccgtgtcggcttcaccactgactcggaatgggatctacctttctctgagcctcacttttcccatctgaaaaatggaacttccgatcccgcactcccatcccactctggccccgggactctgggatacttagagattggcttttggtggggcggcgacaggactgtggccatgaaggccagggagtctgggtccccaactcggtcccattccctagagagattcgggcagcaaccggccccacaatgctcttgagaactacacttcgccgatatgcaaagaagaggaggcggttcctgctcgtctccgacgaggtgggcccgagcaggcctggggactacgactcccggcgtgctccgcagtccaaagccggaagagcgtggacccggaaccggatgtggcttgcggctcgggtggctgagcgcgcggggaaatggccacggggacagaccaggtggtgggactcggcctcgtcgccgttagcctgatcatcttcacctactacaccgcctgggtgattctcttggtatgtcattctccccgtccgctgctcaccttccccgagccctggcaccgccagagcaactactatataggctctaggcacggcgctggcttcattgcctgcctcatctcttgaactctccagaacaactctatgaggaagatgccagtggtaccgcattttatagatgagatagctgaggctaggggagaaggatctggcccaagattgcatccttagccgctacacttataactctgtttccggcttgctttgacttttgggggagttctgttccttctgggttagcctgctgactcttaggcatggcaaacgccagtgatatttgtgaaggcctttaggatatttttttcttgtgggaaaacttgttggttattgcttaagaagtgcagtgtgtctggaagtgcagaacttggtatcctttagagaaaaaatattagtgaagaagccctggaggcccaggttgggagtcagtcgaggattcctcaagtaccatttgctaggctgtgaggtgccttagggcaggtctcttgtgccctgttctcttgtccccaccaccaacctatagcaggcaccaaagcaagtgcccggtaaataccaataagaaattaaggaaagaaacaaaccacgacacccaaatgccgtaatcttaaagaaaagcaaatgcagtcccagtcctctgaatgggtcagccccttagatggaggaggtgggacgtttgggcttgggggctcggcaaggcaagcaagacacaccagagctcttccctcgatgccagccattcatcgacagtcagcatgtcatccacaagtatttcctgccccgagcctatgctgtcgccatcccactggctgcaggcctcctgctgctcctgtttgtgggactgttcatctcctacgtgatgctgaagagcaagagagtgaccaagaaggctcagtgaaggtcccgcagggatgaggctgccagccccttctctgcttcccctccagcacagggaccaagtgggggagcctgcagaacctgtccaggcacagtggctcctcaagcctgcctgtcctgcagagtccccatggcatggagcttacacctgactgactggagccccctccccgactcccacttccagaagctaggagggagggatacctggaagactccggtcacctccttcttgctcagggcctaaaagatgctggtcctcccaacctcactctcagactccctgccaccttttcccctgggttctgccgtcttgcctcacttcccctcctgtcacatgctgacgttggacttagcaggttctaaggccacatgtgtgacctctctgacttctcttcctccaccaaggcagctttccttaccctgacacagccccagaccccacaaagccttctggacctggaaagcctggggaaggactgacagaccccaggaccagccctggggtgtcatgggcaagccgagcgccggggtcgcattacctgatcctgagcgtctatgaatcactgagatgcgcctcaagtcccgcaataatgtaccaagtggtgatggacactgtggaggggatctagcattgagcgaattagagagcacgtgaatgggcgcctgttaaccaatataggatgccgacacgtgaaaataccacgcggggtcacatatcagatcaaggcgtggaggagacgtcacacataggcgatcacaagagacaagggagagaaacgggacccaagggatgggtagggaacgtacgcgcacattcggtcaggccggataaagaccgtggataccattctttcagacccgtaacttaacaacaacggaccatgggagattgcaattcctcaattgaggtaatggtcgcatcacatcacccagatcacgggtggactacaccatttaccacacaa

SEQ ID NO: 349840 - DNA, 2923 bp, Homo sapiens
tctttctttgggccaagcctccactgaggtgccaggatacagcagcaacctcagaccctaccctcggggctgacagggctggatcaacaatgcatcagtgaattaaaaggcacaggaggctgggcaccgtggctcacgcctgtaaacttttggaggccgagtgggaggatcgcttgagcccaggagttcgacaccagcctggataacatagaactccgtctcaaaaacaaacaaacaaacaaaaaaaacgttcccgactggcttccctgaggaacgtggcgtcccagtgagaccggatgggtgaggagcagccggcctgtgagtggtgggggaccgcgttcctatctcggagctgaagaagcgtggaagatgatctggcccaacatctctttgttctcagaggaagggccttccaagaccggggaggggcctgtgcgtgggtcccggtccgaaacgtgtctgggctgctgcgagagacagtcggtgaaggaagggaggggacatccgaagggtggcccgggaggccgggcgatggtgaggagggcgcctcctctccaccaaatcctccccatccatgcgggctagggacagaccctcccccgccaccctaggctggaaagtgaacgttctctgcacctctcccacctacagactaagtagggcacccggtttccgtgtcggcttcaccactgactcggaatgggatctacctttctctgagcctcacttttcccatctgaaaaatggaacttccgatcccgcactcccatcccactctggccccgggactctgggatacttagagattggcttttggtggggcggcgacaggactgtggccatgaaggccagggagtctgggtccccaactcggtcccattccctagagagattcgggcagcaaccggccccacaatgctcttgagaactacacttcgccgatatgcaaagaagaggaggcggttcctgctcgtctccgacgaggtgggcccgagcaggcctggggactacgactcccggcgtgctccgcagtccaaagccggaagagcgtggacccggaaccggatgtggcttgcggctcgggtggctgagcgcgcggggaaatggccacggggacagaccaggtggtgggactcggcctcgtcgccgttagcctgatcatcttcacctactacaccgcctgggtgattctcttgccattcatcgacagtcagcatgtcatccacaagtatttcctgccccgagcctatgctgtcgccatcccactggctgcaggcctcctgctgctcctgtttgtgggtaagtcatcacctcctccccttgaccctgggcagggtttcgggaagaccccacctctgaacatgcttccacactttggcggtgctggaagctgcttgccccgaactcacccgtggggttttcctgttcatccttcgaggctgccagtcagtaacctctgggtttcctggtgccccaggctttttggactccaatgacctgtctacctctttcctgccccaaccccatcatcactctgctcacacctcagtcaccctcttgtcaccctggcttctaattcctgcacctctctctctcatggcttcctagggatggggactgtgtctccatcattactgcacatctagaacaggctgtggcactgaggctgtgctcagaaagtcatttggatgagtcagtcaacagccgggtgcctggatgatgggtggatggatgggtgggtgggtgaggtgtaggaggaggtgggtaggtatgtaggtgggcagacaagtggttgaccgggtgatcgatagatgggtggatcttgttccccttggaatctgaaacactaaatgcagcatcttgcttgaggcaggcactcagttggtgtttgttgagtgaatgtgagtagacatatgccttgacgaatgactagggagataagcaggttccctggaggatggttgggtaggttcacagccctgtgtgtgggtggctctgctgtgtcatgccctggcctcccagcagccctgagcttagatcttatgtggcctttctggtctgtgtatcccaggactgttcatctcctacgtgatgctgaagagcaagagagtgaccaagaaggctcagtgaaggtcccgcagggatgaggctgccagccccttctctgcttcccctccagcacagggaccaagtgggggagcctgcagaacctgtccaggcacagtggctcctcaagcctgcctgtcctgcagagtccccatggcatggagcttacacctgactgactggagccccctccccgactcccacttccagaagctaggagggagggatacctggaagactccggtcacctccttcttgctcagggcctaaaagatgctggtcctcccaacctcactctcagactccctgccaccttttcccctgggttctgccgtcttgcctcacttcccctcctgtcacatgctgacgttggacttagcaggttctaaggccacatgtgtgacctctctgacttctcttcctccaccaaggcagctttccttaccctgacacagccccagaccccacaaagccttctggacctggaaagcctggggaaggactgacagaccccaggaccagccctggggctcagggcagccaccccgggccgctgaccgactgacctctcctcacggaggcccagccccaaagccccagggctggcccgtttgggacagctgaccaataaacactgatggtgtgttaaacaacacacaacacacccccccacaaacaaccaatacaaaaaaaacagtcagccaccacaagggaccgtgcacgatcgcaagaggcccgaaacacgacacggcggaaaggcgacaccgaccacgcggatgcgcgaatgcgagcgaggcgcgagcagcacggagggaga

SEQ ID NO: 349841 - DNA, 2190 bp, Homo sapiens
gctacaaggagggtcgacccaggtgccactgccccctcagcactcaccatggcgactccccagagcctgcagcaagcagcacccgccccgcgcgtagcctcccgcggtcatgtgacgctgcggcccctccaagccccgccctctctagccccgcccccgggccctacaggcggctcattgattggcctacttctaggaacccgagtctcgcgtgcttattggccctgtcacttaacgctagatggacggacctgagcgccagccaatctcaccacagcgtgcgagagtgggcggagcagtgcagggcagtggggatcgcccggcggcaggcaggagacaacaggagggaaaggcagtgtgtgatgagtttgtcaagaaggaatggaaggagggggagccgacaagtccacgttcaccgcatctgcgttggcgattgcgctattgatgcgcatgcgcaaaaggaagaccctgattggtttgtgggacggtctcaacgtcctgtcctaaccaatccagatgcgccgggggtggggcctggctctcactggccggtgcagcctttgcgcgcgggtttcgttgacccgcggcgttcacgggaattgttcgctttagtgccggcgccatggggtcggagctgatcgggcgcctagccccgcgcctgggcctcgccgagcccgacatgctgaggaaagcagaggagtacttgcgcctgtcccgggtgaagtgtgtcggcctctccgcacgcaccacggagaccagcagtgcagtcatgtgcctggaccttgcagcttcctggatgaagtgccccttggacagggcttatttaattaaactttctggtttgaacaaggagacatatcagagctgtcttaaatcttttgagtgtttactgggcctgaattcaaatattggaataagagacctagctgtacagtttagctgtatagaagcagtgaacatggcttcaaagatactaaaaagctatgagtccagtcttccccagacacagcaagtggatcttgacttatccaggccacttttcacttctgctgcactgctttcagcatgcaagattctaaagctgaaagtggataaaaacaaaatggtagccacatccggtgtaaaaaaagctatatttgatcgactgtgtaaacaactagagaagattggacagcaggtcgacagagaacctggagatgtagctactccaccacggaagagaaagaagatagtggttgaagccccagcaaaggaaatggagaaggtagaggagatgccacataaaccacagaaagatgaagatctgacacaggattatgaagaatggaaaagaaaaattttggaaaatgctgccagtgctcaaaaggctacagcagagtgatttcagcttccaaactggtatacattccaaactgatagtacattgccatctccaggaagacttgacggctttgggattttgtttaaacttttataataaggatcctaagactgttgcctttaaatagcaaagcagcctacctggaggctaagtctgggcagtgggctggcccctggtgtgagcattagaccagccacagtgcctgattggtatagccttatgtgctttcctacaaaatggaattggaggccgggcgcagtggctcacgcctgtaatcccagcactttgggaggccaaggtgggtggatcacctgaggtcaggagctcgagaccagcctggccaacatggtgaaaccccatctctactaaaaatacaaaaattagccaggtgtgatggtgcatgcctgtaatcccagctcctcagtaggctgagacaggagcatcacttgaacgtgggaggcagaggttgcagtgagccgagattgcaccaccgcactccagcctgggtgacagagcgagacttatctcataaataaatagatagatactccagcctgggtgacagagcgagacttatagatagatagatagatagatggatagatagatagatagatagatagatagataaacggaattggagccattttgctttaagtgaatggcagtcccttgtcttattcagaatataaaattcagtctgaatggcatcttacagattttacttcaatttttgtgtacggtattttttatttgactaaatcaatatattgtacagcctaagttaataaatgttatttatatatgca

SEQ ID NO: 349842 - DNA, 791 bp, Homo sapiens
cagttttccaagcaatcagtaatggaagtaacatcgttattgggtaattaagaatatggctggtctggcacagtggcttattcctgtaatcccagcactttgggaggctgaggcgggaggattgcttgagcccatgagtgcgagaccagcctgggcagctacagctaggtatttgtcttaaacctgggcatggtctgatgggaagtccctagttgtataacaagtcagctggttggctgtttgtgattggctggggattatttttgtctttcggaggttcttttcccccgacaaaagaaatgtttccaagttaggttccagtttgcttataagagctttagctacaaagacaatctcaggcaaatggctgcattattgttttaataccacctactggctatgtgattttttggtttttttgtttgtttgtttgattttggttttttggtttctctttttcgagattgcaccaccgcactccagcctgggtgacagagcgagacttatctcataaataaatagatagatactccagcctgggtgacagagcgagacttatagatagatagatagatagatggatagatagatagatagatagatagatagataaacggaattggagccattttgctttaagtgaatggcagtcccttgtcttattcagaatataaaattcagtctgaatggcatcttacagattttacttcaatttttgtgtacggtattttttatttgactaaatcaatatattgtacagcctaagttaataaatgttatttatatatgca

SEQ ID NO: 349843 - DNA, 2249 bp, Homo sapiens
gctacaaggagggtcgacccaggtgccactgccccctcagcactcaccatggcgactccccagagcctgcagcaagcagcacccgccccgcgcgtagcctcccgcggtcatgtgacgctgcggcccctccaagccccgccctctctagccccgcccccgggccctacaggcggctcattgattggcctacttctaggaacccgagtctcgcgtgcttattggccctgtcacttaacgctagatggacggacctgagcgccagccaatctcaccacagcgtgcgagagtgggcggagcagtgcagggcagtggggatcgcccggcggcaggcaggagacaacaggagggaaaggcagtgtgtgatgagtttgtcaagaaggaatggaaggagggggagccgacaagtccacgttcaccgcatctgcgttggcgattgcgctattgatgcgcatgcgcaaaaggaagaccctgattggtttgtgggacggtctcaacgtcctgtcctaaccaatccagatgcgccgggggtggggcctggctctcactggccggtgcagcctttgcgcgcgggtttcgttgacccgcggcgttcacgggaattgttcgctttagtgccggcgccatggggtcggagctgatcgggcgcctagccccgcgcctgggcctcgccgagcccgacatgctgaggtgagttcggccgcgcaagaccagggctgggcttccgcctcgcggccctgggccctcaggaaagcagaggagtacttgcgcctgtcccgggtgaagtgtgtcggcctctccgcacgcaccacggagaccagcagtgcagtcatgtgcctggaccttgcagcttcctggatgaagtgccccttggacagggcttatttaattaaactttctggtttgaacaaggagacatatcagagctgtcttaaatcttttgagtgtttactgggcctgaattcaaatattggaataagagacctagctgtacagtttagctgtatagaagcagtgaacatggcttcaaagatactaaaaagctatgagtccagtcttccccagacacagcaagtggatcttgacttatccaggccacttttcacttctgctgcactgctttcagcatgcaagattctaaagctgaaagtggataaaaacaaaatggtagccacatccggtgtaaaaaaagctatatttgatcgactgtgtaaacaactagagaagattggacagcaggtcgacagagaacctggagatgtagctactccaccacggaagagaaagaagatagtggttgaagccccagcaaaggaaatggagaaggtagaggagatgccacataaaccacagaaagatgaagatctgacacaggattatgaagaatggaaaagaaaaattttggaaaatgctgccagtgctcaaaaggctacagcagagtgatttcagcttccaaactggtatacattccaaactgatagtacattgccatctccaggaagacttgacggctttgggattttgtttaaacttttataataaggatcctaagactgttgcctttaaatagcaaagcagcctacctggaggctaagtctgggcagtgggctggcccctggtgtgagcattagaccagccacagtgcctgattggtatagccttatgtgctttcctacaaaatggaattggaggccgggcgcagtggctcacgcctgtaatcccagcactttgggaggccaaggtgggtggatcacctgaggtcaggagctcgagaccagcctggccaacatggtgaaaccccatctctactaaaaatacaaaaattagccaggtgtgatggtgcatgcctgtaatcccagctcctcagtaggctgagacaggagcatcacttgaacgtgggaggcagaggttgcagtgagccgagattgcaccaccgcactccagcctgggtgacagagcgagacttatctcataaataaatagatagatactccagcctgggtgacagagcgagacttatagatagatagatagatagatggatagatagatagatagatagatagatagataaacggaattggagccattttgctttaagtgaatggcagtcccttgtcttattcagaatataaaattcagtctgaatggcatcttacagattttacttcaatttttgtgtacggtattttttatttgactaaatcaatatattgtacagcctaagttaataaatgttatttatatatgca

SEQ ID NO: 349844 - DNA, 1267 bp, Homo sapiens
aggtacatacctaggagtattaattggcatttatggaaaacatctcttcaattcaacaaaagtatgtgcatatacggagggagtgcagctgatattgtagaaaacagtgagaatagtcaactctacttttgaaaccatattacgctgagattctaaagctgaaagtggataaaaacaaaatggtagccacatccggtgtaaaaaaagctatatttgatcgactgtgtaaacaactagagaagattggacagcaggtcgacagagaacctggagatgtagctactccaccacggaagagaaagaagatagtggttgaagccccagcaaaggaaatggagaaggtagaggagatgccacataaaccacagaaagatgaagatctgacacaggattatgaagaatggaaaagaaaaattttggaaaatgctgccagtgctcaaaaggctacagcagagtgatttcagcttccaaactggtatacattccaaactgatagtacattgccatctccaggaagacttgacggctttgggattttgtttaaacttttataataaggatcctaagactgttgcctttaaatagcaaagcagcctacctggaggctaagtctgggcagtgggctggcccctggtgtgagcattagaccagccacagtgcctgattggtatagccttatgtgctttcctacaaaatggaattggaggccgggcgcagtggctcacgcctgtaatcccagcactttgggaggccaaggtgggtggatcacctgaggtcaggagctcgagaccagcctggccaacatggtgaaaccccatctctactaaaaatacaaaaattagccaggtgtgatggtgcatgcctgtaatcccagctcctcagtaggctgagacaggagcatcacttgaacgtgggaggcagaggttgcagtgagccgagattgcaccaccgcactccagcctgggtgacagagcgagacttatctcataaataaatagatagatactccagcctgggtgacagagcgagacttatagatagatagatagatagatggatagatagatagatagatagatagatagataaacggaattggagccattttgctttaagtgaatggcagtcccttgtcttattcagaatataaaattcagtctgaatggcatcttacagattttacttcaatttttgtgtacggtattttttatttgactaaatcaatatattgtacagcctaagttaataaatgttatttatatatgca

SEQ ID NO: 349845 - DNA, 808 bp, Homo sapiens
  misc_feature (27)..(27): n is a, c, g, or t
  misc_feature (30)..(30): n is a, c, g, or t
ctgtccggaggattcctggctgtcatnagnttgatagtacattgccatctccaggaagacttgacggctttgggattttgtttaaacttttataataaggatcctaagactgttgcctttaaatagcaaagcagcctacctggaggctaagtctgggcagtgggctggcccctggtgtgagcattagaccagccacagtgcctgattggtatagccttatgtgctttcctacaaaatggaattggaggccgggcgcagtggctcacgcctgtaatcccagcactttgggaggccaaggtgggtggatcacctgaggtcaggagctcgagaccagcctggccaacatggtgaaaccccatctctactaaaaatacaaaaattagccaggtgtgatggtgcatgcctgtaatcccagctcctcagtaggctgagacaggagcatcacttgaacgtgggaggcagaggttgcagtgagccgagattgcaccaccgcactccagcctgggtgacagagcgagacttatctcataaataaatagatagatactccagcctgggtgacagagcgagacttatagatagatagatagatagatggatagatagatagatagatagatagatagataaacggaattggagccattttgctttaagtgaatggcagtcccttgtcttattcagaatataaaattcagtctgaatggcatcttacagattttacttcaatttttgtgtacggtattttttatttgactaaatcaatatattgtacagcctaagttaataaatgttatttatatatgca

SEQ ID NO: 349846 - DNA, 356 bp, Homo sapiens
caactctacttttgaaaccatattacgctgagtaagaaaaggtcttgacaggtctattctgaagaaaaagtttattttgtgtttgtaattagtggttgctgtggagtcttattaggaaagtttattttcagggtggggtggggttgttacattcctgtaatataaatatcctgtgagttaaaatgagtggaacaaaaaagtcctatgattgtcattcattaaattaatctgagatttactaaagagttctaaaagtcatgaagcactacagcaaatgtcttttatgtgccccttttgttataaaatagatcccatgtgcattttaactctcagtccaataaacaactaaacaactt

SEQ ID NO: 349847 - DNA, 533 bp, Homo sapiens
ttctctccttccttttcccaataaattacacgttagcacctttgtataaacacaagtaaccatctgtgtgtttcctgtggttttttactgcctattttgactatattaatattgtgttataattttaaatcatctgtgcatatgcatgactgcctgcctttgcatagtttgaactctttgaaagcagtacttcctcagcctgacatgattaccagttttttgactaaatgaagctaaacctttaggtagagtgacttgccacaaaattaattttgaaaagttatactgcttattaaacaagtgtttaagggtactaatatatagaacttaaggtttttatgatttgtgtatgtgtttttcctttcacaggcttatttaattaaactttctggtttgaacaaggagacatatcagagctgtcttaaatcttttgagtgtttactgggcctgaattcaaatattggaataagagacctagctgtacagtttagctgtatagaagcagtgaacatggcttcaaagatactaaaaag

SEQ ID NO: 349848 - DNA, 2512 bp, Homo sapiens
gctacaaggagggtcgacccaggtgccactgccccctcagcactcaccatggcgactccccagagcctgcagcaagcagcacccgccccgcgcgtagcctcccgcggtcatgtgacgctgcggcccctccaagccccgccctctctagccccgcccccgggccctacaggcggctcattgattggcctacttctaggaacccgagtctcgcgtgcttattggccctgtcacttaacgctagatggacggacctgagcgccagccaatctcaccacagcgtgcgagagtgggcggagcagtgcagggcagtggggatcgcccggcggcaggcaggagacaacaggagggaaaggcagtgtgtgatgagtttgtcaagaaggaatggaaggagggggagccgacaagtccacgttcaccgcatctgcgttggcgattgcgctattgatgcgcatgcgcaaaaggaagaccctgattggtttgtgggacggtctcaacgtcctgtcctaaccaatccagatgcgccgggggtggggcctggctctcactggccggtgcagcctttgcgcgcgggtttcgttgacccgcggcgttcacgggaattgttcgctttagtgccggcgccatggggtcggagctgatcgggcgcctagccccgcgcctgggcctcgccgagcccgacatgctgaggaaagcagaggagtacttgcgcctgtcccgggtgaagtgtgtcggcctctccgcacgcaccacggagaccagcagtgcagtcatgtgcctggaccttgcagcttcctggatgaagtgccccttggacagggcttatttaattaaactttctggtttgaacaaggagacatatcagagctgtcttaaatcttttgagtgtttactgggcctgaattcaaatattggaataagagacctagctgtacagtttagctgtatagaagcagtgaacatggcttcaaagatactaaaaagctatgagtccagtcttccccagacacagcaagtggatcttgacttatccaggccacttttcacttctgctgcactgctttcagcatgcaagattctaaagctgaaagtggataaaaacaaaatggtagccacatccggtgtaaaaaaagctatatttgatcgactgtgtaaacaactagagaagattggacagcaggtcgacagagaacctggagatgtagctactccaccacggaagagaaagaagatagtggttgaagccccagcaaaggaaatggagaaggtagaggagatgccacataaaccacagaaagatgaagatctgacacaggattatgaagaatggaaaagaaaaattttggaaaatgctgccagtgctcaaaaggctacagcagagtgatttcagcttccaaactggtatacattccaaactgatagtacattgccatctccaggaagacttgacggctttgggattttgtttaaacttttataataaggatcctaagactgttgcctttaaatagcaaagcagcctacctggaggctaagtctgggcagtgggctggcccctggtgtgagcattagaccagccacagtgcctgattggtatagccttatgtgctttcctacaaaatggaattggaggccgggcgcagtggctcacgcctgtaatcccagcactttgggaggccaaggtgggtggatcacctgaggtcaggagctcgagaccagcctggccaacatggtgaaaccccatctctactaaaaatacaaaaattagccaggtgtgatggtgcatgcctgtaatcccagctcctcagtaggctgagacaggagcatcacttgaacgtgggaggcagaggttgcagtgagccgagattgcaccaccgcactccagcctgggtgacagagcgagacttatctcataaataaatagatagatactccagcctgggtgacagagcgagacttatagatagatagatagatagatggatagatagatagatagatagatagatagataaacggaattggagccattttgctttaagtgaatggcagtcccttgtcttattcagaatataaaattcagtctgaatggcatcttacagattttacttcaatttttgtgtacggtattttttatttgactaaatcaatatattgtacagcctaagttaataaatgttatttatatatgcaaaaaaaaaaaaaaaaaaaaaaaacttgtgggggcgcagggccacggaaaaatttaccagacacaacgggtggggggcggcccagaggtaatgggacaagggccacggtgcccaaaggaacctgggccaaacaggcggggttcacaaaaaaacgccgggaccggcgtccgacacccgagggttcgggtgcagatcacacagggcagcgactactccccccgaggcgggagaaaagcagcaagagcgagagcaggagaacgcccggcaacgacacagaccacagcacacgagaagacgcggagcggcgagagacagaagaacag

SEQ ID NO: 349849 - DNA, 1708 bp, Homo sapiens
aagcatttgagcacagtgatgtttggagtcagtgctggttctgtcttcctctcaccagaggatatgaccttcattcccagccccagataaacgagccacaggagttaggcttagtgtgaagctaaccaggctgtattcattgtttaccaacgtgttgagcaaacttctgaataagttgtagcgaacacactgcccttttaaccaggaaagcagaggagtacttgcgcctgtcccgggtgaagtgtgtcggcctctccgcacgcaccacggagaccagcagtgcagtcatgtgcctggaccttgcagcttcctggatgaagtgccccttggacagggcttatttaattaaactttctggtttgaacaaggagacatatcagagctgtcttaaatcttttgagtgtttactgggcctgaattcaaatattggaataagagacctagctgtacagtttagctgtatagaagcagtgaacatggcttcaaagatactaaaaagctatgagtccagtcttccccagacacagcaagtggatcttgacttatccaggccacttttcacttctgctgcactgctttcagcatgcaagattctaaagctgaaagtggataaaaacaaaatggtagccacatccggtgtaaaaaaagctatatttgatcgactgtgtaaacaactagagaagattggacagcaggtcgacagagaacctggagatgtagctactccaccacggaagagaaagaagatagtggttgaagccccagcaaaggaaatggagaaggtagaggagatgccacataaaccacagaaagatgaagatctgacacaggattatgaagaatggaaaagaaaaattttggaaaatgctgccagtgctcaaaaggctacagcagagtgatttcagcttccaaactggtatacattccaaactgatagtacattgccatctccaggaagacttgacggctttgggattttgtttaaacttttataataaggatcctaagactgttgcctttaaatagcaaagcagcctacctggaggctaagtctgggcagtgggctggcccctggtgtgagcattagaccagccacagtgcctgattggtatagccttatgtgctttcctacaaaatggaattggaggccgggcgcagtggctcacgcctgtaatcccagcactttgggaggccaaggtgggtggatcacctgaggtcaggagctcgagaccagcctggccaacatggtgaaaccccatctctactaaaaatacaaaaattagccaggtgtgatggtgcatgcctgtaatcccagctcctcagtaggctgagacaggagcatcacttgaacgtgggaggcagaggttgcagtgagccgagattgcaccaccgcactccagcctgggtgacagagcgagacttatctcataaataaatagatagatactccagcctgggtgacagagcgagacttatagatagatagatagatagatggatagatagatagatagatagatagatagataaacggaattggagccattttgctttaagtgaatggcagtcccttgtcttattcagaatataaaattcagtctgaatggcatcttacagattttacttcaatttttgtgtacggtattttttatttgactaaatcaatatattgtacagcctaagttaataaatgttatttatatatgca

SEQ ID NO: 349850 - DNA, 2553 bp, Homo sapiens
  misc_feature (1741)..(1741): n is a, c, g, or t
  misc_feature (1744)..(1744): n is a, c, g, or t
  misc_feature (1768)..(1768): n is a, c, g, or t
  misc_feature (1893)..(1893): n is a, c, g, or t
  misc_feature (2260)..(2260): n is a, c, g, or t
  misc_feature (2401)..(2401): n is a, c, g, or t
  misc_feature (2450)..(2450): n is a, c, g, or t
  misc_feature (2460)..(2460): n is a, c, g, or t
  misc_feature (2521)..(2521): n is a, c, g, or t
gctacaaggagggtcgacccaggtgccactgccccctcagcactcaccatggcgactccccagagcctgcagcaagcagcacccgccccgcgcgtagcctcccgcggtcatgtgacgctgcggcccctccaagccccgccctctctagccccgcccccgggccctacaggcggctcattgattggcctacttctaggaacccgagtctcgcgtgcttattggccctgtcacttaacgctagatggacggacctgagcgccagccaatctcaccacagcgtgcgagagtgggcggagcagtgcagggcagtggggatcgcccggcggcaggcaggagacaacaggagggaaaggcagtgtgtgatgagtttgtcaagaaggaatggaaggagggggagccgacaagtccacgttcaccgcatctgcgttggcgattgcgctattgatgcgcatgcgcaaaaggaagaccctgattggtttgtgggacggtctcaacgtcctgtcctaaccaatccagatgcgccgggggtggggcctggctctcactggccggtgcagcctttgcgcgcgggtttcgttgacccgcggcgttcacgggaattgttcgctttagtgccggcgccatggggtcggagctgatcgggcgcctagccccgcgcctgggcctcgccgagcccgacatgctgaggaaagcagaggagtacttgcgcctgtcccgggtgaagtgtgtcggcctctccgcacgcaccacggagaccagcagtgcagtcatgtgcctggaccttgcagcttcctggatgaagtgccccttggacagggcttatttaattaaactttctggtttgaacaaggagacatatcagagctgtcttaaatcttttgagtgtttactgggcctgaattcaaatattggaataagagacctagctgtacagtttagctgtatagaagcagtgaacatggcttcaaagatactaaaaagctatgagtccagtcttccccagacacagcaagtggatcttgacttatccaggccacttttcacttctgctgcactgctttcagcatgcaagtaggtatttcattaaacattcagaaaagttaccaatttacaagtgggtttttcatccccaaggaatacttctaacttagttgatatcaattcagagcatattttcccctagaaataatattaggaatattggccaagtgactatattcccagtttatcccataatgtagctaacaacttggaactagtgttgccagaattccactagcaaatagcagctgtatatatatgctgggaattctgatttcagtctgccttttgtaagagatgatatctgtcattaaaacagtcttcacatgtgatttttctgctcatattttttaaaaagtactggttgggccaggcgtggtggctcccgcctgtaatcccaacactgggaggcagaggcaggaggactgcttgaggcaaggagttcaagactagcctagacagcataataagaccccaatctcttaagaaaaaaaaaaaaaattagctgggtgtcagcacatgcctccagtcctggcttctcagctactcgggaggctgaagctgaaggctcactggagcctaggagttcttggttatagtgagctatggtcacgctactacactgcagcctaggcaacacagcaacactgtctcttttttttttttttttttttttacattttttttatttttatttttnttnttttttttttaatttatttttttnttgataattcttgggtgtttctcacagagggggatttggcagggtcatgggacaatagtggagggaaggtcagcagataaacaagtgaacaaaggtctctggttttcctaggcagaggaccctgnggccttccgcagtgtttgtgtccctgattacttgagattagggattggtgatgactcttaacgagcatgctgccttcaagcatctgtttaacaaagcacatcttgcaccgcccttaatccatttaaccctgagtggacacagcacatgtttcagagagcacagggttgggggtaaggtcacagatcaacaggatcccaaggcagaagaatttttcttagtgcagaacaaaatgaaaagtctcccatgtctacttctttctacacagacacggcaaccatccgatttctcaatcttttccccacctttcccgcctttctattccacaaagctgccattgtcatcctggcccgttctcaatgagctgtngggcatacctcccagacggggtggtggccgggcagaggggctcctcacttcccagtaggggcggccgggcagaggcgcccctcacctcccggacggggcggctggccgggcgggggggctgaccccccccacctccttccnggacggggcggctggccgggcggggggctgacccccccacctccctccnggacggggcngctggccgggcagaggggctcctcacttcccagtaggggcggccggggcggctggccgggnggggggctgacccccccacaacactgtctctt

SEQ ID NO: 349851 - DNA, 2007 bp, Homo sapiens
cctttgcgcgccgggttaatgggcggtaatttggtacccttgggtgcactttgttttgcccctgttcatttgaatgcaaatgggtgacccgggcccgactaggtgcttattaaattgcagttttcccccctgccttttccggaatgcagacttagaggagagaggctgcgccctggcccagcctggctcggctcagctccgcgcgccatggcaagctcggcttccctggagaccatggtgcccccggcctgcccgcgcgccggagcgtcgccggccacttccaagacactggccttttccatcgagcgcatcatggccaagacgtcggagccccgtgcgccctttgagccccggcctggagcgctagaggcggacggcagccagggcaagaaactgctcaacctctgctcgccgctgccctgtatgatccccctccagcccctaggctacgaggtgccgtcaaagacactgctcagttactcggagctctggaaaagcagcctccgggcgggcggcggcggaggcggcggcggcggtggcggcggcggcggcgggggggccccagtgtgcggcgccagcggcttgtgcaaaaccaactgtggcgtgtgctgcaaggccgagctgggcctggcgccgtccgcgctgcccgcgggcagggtcatcaagccgcaggtcatcaaccaggctgtggggctgccggccagcggctcgctctactacttcaactacctggactcgaccgcgtacccgccgtctgagctcctcagcggccacctcttcccgtctggcctcctcaatgcgcaggcccccgccgccctggctgctcaccccaagctctttctgctggagaacgccaagctggccggcctggctgcggacaagttcccccacccggctccctatccccataaggagcgcttgccggcgccgctggagcaggtactgaaggaaaactcggccctgactgccgagcgcggaggcgtcaagggccacagcaagctgccaggaggctccgcagatggcaagcccaaaaacttcacctgcgaggtgtgcggcaaggtgtttaacgctcactataatctcacccgccacatgccggtccacaccggagccagaccgttcgtgtgcaaagtctgcggcaaaggctttcgccaggccagcacgctctgcaggcacaaaattatccacacccaggaaaagccacataaatgcaaccagtgcggcaaagcgttcaaccgcagctccacgctcaacacgcatatccgcatccacgcgggctacaagcccttcgtctgcgaattttgcggcaaaggctttcaccaaaaagggaactacaagaaccacaagctgacccacagcggcgagaagcagtacaaatgtaccatctgcaacaaggccttccaccaggtctacaacctaaccttccatatgcacacccacaacgacaagaagcctttcacgtgcgccacttgcggcaaagggttttgcagaaactttgacttaaagaaacatgtgcgcaaactccacgacagcgtgggccctgctgccccctccgcaaaggacctgactaggacagtgcagagctgagagctactgccttgcccttccttccctccctgtaccacctgaaaacagatcacacatataaacttatttctaaaattaaaagaaaaaaaaactatagcagagaggctaaaatctatttatcgaaaccagcatatttttggaaagctaaatgtttcctcgatgactggcagcaaactcgtggcccccacctttgtatattcaggaaacttatttaaatccagtgcgccgaaacgtatttaattccaggcctccgcttctcctggggcagccagttttaaccccagcctgtcaccgtgagcgccccagaagagcgcggcgcccctagccatctttatacagccatgtaaatcctcctgtacaagcgaacacggaatatatacatatataactcaataaacagaatcattagtgcgcgttttt

SEQ ID NO: 349852 - DNA, 710 bp, Homo sapiens
agtcggtttattcaacgaatgcctgtggagcagtttcgaggtgcacccaccactagaatttgaacatcctaagaacaggtatttttgtctctgctttgctgatgtatcctcagcaaccggaactgcctgacatctgatcctttctgtgagacaccaggctgttgaggaagaatctatggcaacattgtatctattaatatacagcttctgtatttatcaggcccagttctggtgatgatttcacttttgacagaagctgtccctcaaaagcaaacatgcaatagaagaaacagatctcagtaagtagcttattttccttacaaacactactgaaatttcttattaatgctcctaattttcccattatgcactgcagcgtgagtatggctccagaggctgcacctaataacttccttgagctctaatgattattggtatcttttactaatgtgtatctgttctaaactacacaaaagcatacaaagccatctccctcttttaaaaacttgaaaatgtgggtatcacctttaattaaatattttaaatttctctctccaaatcagatttatctatgtgtgggagtttagatagtcccaagacttttgctaatacagtatttccaatttaatcttaagtagaaaaatgtatgtaattaagagatttattataaaacatttggcaaagaaggaaagaaaacagtaactatgtag

SEQ ID NO: 349853 - DNA, 665 bp, Homo sapiens
aaaagttcgtgaggtgtagtcgcggcaaccaggaggtgcacccaccactagaatttgaacatcctaagaacaggtatttttgtctctgctttgctgatgtatcctcagcaaccggaactgcctgacatctgatcctttctgtgagacaccaggctgttgaggaagaatctatggcaacattgtatctattaatatacagcttctgtatttatcaggcccagttctggtgatgatttcacttttgacagaagctgtccctcaaaagcaaacatgcaatagaagaaacagatctcaatgccatccatctgcagttgtgacaagcaaaaaagtctccagacatggccaaatgtcccctggggggcaaaatcacccccaattgagaactactgctctaaactcttgatggtcctttggaaagccatcccttgttcggcttcagtccaaggtttcgatggcaatggtactgatcctacttctgagctccagagttaaatataagacctaggcctgacaagaatgttccatccttttggccaccagacgactccggggtatggacaaatgacagaagtcagtaataagagatgccatgctgggacttaagtggaactattagagaagaaagattcccttcgcactggggtggagacatgtaagtctaccat

SEQ ID NO: 349854 - DNA, 3400 bp, Homo sapiens
tcgagtcggcaatatacagcttctgtatttatcaggcccagttctggtgatgatttcacttttgacagaagctgtccctcaaaagcaaacatgcaatagaagaaacagatctcaatggagtctcactctgtcacccaggatggagtacagtggcgtgatctcggctcactgcaagctccgcctcctgggttcatgccattctcctgccttagcctcccgagtagctgggactacaggcgcctgccaccacgcccggctaatttttgtatttttagtagagacagggtttcaccgcattagccaggatggtctcgatctcctgacctcgtgatccgcccgcctcagcctcccaaagtgctgggattacaggcgtgagtcactgtgcccagccaagtttagtattttttgtagagacagagtttcaccatgttggccaggctggtcttgcactcatggcctcaagtgatccacctgcctcggcctccgaaagtgccgggattacaggcgtaagccactgtgcctggccttaaatgggtaaatttcatatggtatatgaattatatttcactaaaactttaagaaaacattatacagtactgttcaaattttaagtggtccaatttaaatgcactattgtatacaattctatgtaatgtccttaccatggtatatgttaactataaatatctatgcccctacccttagtatcaaagcatatattatatgccagtgagccaagccccacatgtctgtgaaatgtggtcttctagccatagaagtagcttgtgctcctagggtattccttgaggctctgtatgaagaatgtccatttgtttgagtccctaacctacagaatattcctgaccatggaaatgtgatagataggagtaagcacatggaccaaaaggcctggaggctcatcatttaaggtacaagccaattatgtagtctttgaaagaatgctttgaaattcagcttgcttgattcaattcccaatattttcatttgtattaaaagatttggcccttacaggttaaaaacaatgtcagtgtaaccaagtgacattcaaattttggcttcccaacatgtgatatgacatcacttcatgtgaaaatagcgaagctccaaacattttctttcagtcaccttattaagctcgctgagccctgacagcctaatgaaaggctaagggggaagaaaatgtcccaacttctacactgttgaagatgggctaatgagaggttagcttgcaagaatcattctttcttggcatcctgcttctgactgcttggctttcagcttatacccagcatgaaaatttaatttcctcgcagttgaaggtagtttaaagcttattactcacatgctaaaatgttgatgtatctgtttttgtgcttgttttctggatgattggaatgctctgcagtgatgttcatatcagcagtacagcgctggacttcctagtgaagaaaacagcaagattatagacacagtttagaaacaaaggaacaccatatacatttaaaggcataaagtatttactcactccctggccacagccaccgttaccttctcaatcccaacttcggatataattattgatatatttataacgagtttatgaagaatgtgaaaaaggtataaagatttcattatttactatttcatcaatcatctacttttttctagtttttgacctagtccctgagatgtaaaacaatatctctttttgaatacatcatagtctatgggtgagaaaaatattcaaaaagatagtcaaacatgatgaatacaaaagaggcctgagaaagctctgatgggagcacagaacagaggaaggctttagacaggtgaaaaaatttacctaagtcttaaaggaagaaagggaatttctaagaagtataatctctaccatgatttgcaatatgcttacaggccttatagcctcattttataattgtgagggtgcattgactctaaagactcagtgctgaaataaccctaataacagcccaactaatggtcatatctcatatatacagtcttgacaaattatttgtgaactctagtattttaaaagttatccttctttggaaaaatagcagtagcagaaataacactcttatcctaccttggccgtggatttaaacgtcatccattagcctaatacaacgttgctgaaaagccaaatttttctacactatatgcttcaaacccaagaaagtactggagctgactaataagggaagtcattagcagtacacagctgctacaaagagcctgaacaaagtaacacaaaattatcaggagaaatgttttacacagaacagatgtagcagagtttagaagcatgcagactttttttttccacaaaggagttgcctagtaattatgcatgttttccatagtatttacattaaacataatgaaaacaatgaactggttgtcttttatattcacaaagtacttccccagggagaagtacacttcttctctagaaggaggaagttactgtactcaaagaatttaaggtataaaagcaaagaatttctgtgtgttcaaagaaacagtattcaatgactctccaattgttggacactgtaaattgaagtttccataattatagtccttcccagctgtccatttaaaaaaaaaaaaaaaagccccacaggcattaattcaatccacctttctgggaaagtgtgtttaatgacagttcttaccctttccttactcttactaaactccaatatattctgttctaacatagtttataacctatggtttggaaaacactggtttaaggagctttaaggctgccctttggctcttctctaaaatgagataataaagtgtgatcacaaatcagtctacgtaagaacatgagcaatgctagccaaacttagcacgttgggacctgccttttgaaactgccttataagctctgagccatgctcttttgaagagtttcaagggcagacaacttttgaaaatggatttgaaacaagttagtcttttgttttcgggttttgaaggtcacacctttggcatgtacttctttagggttgagttgttcaggtatcttatgctgagagattttggcttttagtaccttagtctgagatttactttgtttattgatttttttttcctgttgtatagatctgaccaccctagctatggactgaagttggagcctcttttctaatataatgcaattgaccaagactgcttgggagcagctgtcagtattgtttaaagctgtcattcaatatggccaaactctttgttatctaaaaccccttgtctgatctgttgcctctgtttcacttttccaattagatgaatgacagaaacaaaaaatcgtaataaatattgtcaaatctgattttaatagaac

SEQ ID NO: 349855 - DNA, 4811 bp, Homo sapiens
ggcggtggtggcggcggccggcaggcgcgggggaacacaggggccgctacgggagccgcgccgccgcccatgtcattccacttcaagtgacttcatgtgatgtcagctgaatgtaaaagacagtgatctcacgcggaggggaagatgtttgccatcaaaatgtgacagaagagacacgctgcatggctcggaacgcatctccttggtggtgggggaaagagacttagaggagagaggctgcgccctggcccagcctggctcggctcagctccgcgcgccatggcaagctcggcttccctggagaccatggtgcccccggcctgcccgcgcgccggagcgtcgccggccacttccaagacactggccttttccatcgagcgcatcatggccaagacgtcggagccccgtgcgccctttgagccccggcctggagcgctagaggcggacggcagccagggcaagaaactgctcaacctctgctcgccgctgccctgtatgatccccctccagcccctaggctacgaggtgccgtcaaagacactgctcagttactcggagctctggaaaagcagcctccgggcgggcggcggcggaggcggcggcggcggtggcggcggcggcggcgggggggccccagtgtgcggcgccagcggcttgtgcaaaaccaactgtggcgtgtgctgcaaggccgagctgggcctggcgccgtccgcgctgcccgcgggcagggtcatcaagccgcaggtcatcaaccaggctgtggggctgccggccagcggctcgctctactacttcaactacctggactcgaccgcgtacccgccgtctgagctcctcagcggccacctcttcccgtctggcctcctcaatgcgcaggcccccgccgccctggctgctcaccccaagctctttctgctggagaacgccaagctggccggcctggctgcggacaagttcccccacccggctccctatccccataaggagcgcttgccggcgccgctggagcaggtactgaaggaaaactcggccctgactgccgagcgcggaggcgtcaagggccacagcaagctgccaggaggctccgcagatggcaagcccaaaaacttcacctgcgaggtgtgcggcaaggtgtttaacgctcactataatctcacccgccacatgccggtccacaccggagccagaccgttcgtgtgcaaagtctgcggcaaaggctttcgccaggccagcacgctctgcaggcacaaaattatccacacccaggtgcacccaccactagaatttgaacatcctaagaacaggtatttttgtctctgctttgctgatgtatcctcagcaaccggaactgcctgacatctgatcctttctgtgagacaccaggctgttgaggaagaatctatggcaacattgtatctattaatatacagcttctgtatttatcaggcccagttctggtgatgatttcacttttgacagaagctgtccctcaaaagcaaacatgcaatagaagaaacagatctcaatggagtctcactctgtcacccaggatggagtacagtggcgtgatctcggctcactgcaagctccgcctcctgggttcatgccattctcctgccttagcctcccgagtagctgggactacaggcgcctgccaccacgcccggctaatttttgtatttttagtagagacagggtttcaccgcattagccaggatggtctcgatctcctgacctcgtgatccgcccgcctcagcctcccaaagtgctgggattacaggcgtgagtcactgtgcccagccaagtttagtattttttgtagagacagagtttcaccatgttggccaggctggtcttgcactcatggcctcaagtgatccacctgcctcggcctccgaaagtgccgggattacaggcgtaagccactgtgcctggccttaaatgggtaaatttcatatggtatatgaattatatttcactaaaactttaagaaaacattatacagtactgttcaaattttaagtggtccaatttaaatgcactattgtatacaattctatgtaatgtccttaccatggtatatgttaactataaatatctatgcccctacccttagtatcaaagcatatattatatgccagtgagccaagccccacatgtctgtgaaatgtggtcttctagccatagaagtagcttgtgctcctagggtattccttgaggctctgtatgaagaatgtccatttgtttgagtccctaacctacagaatattcctgaccatggaaatgtgatagataggagtaagcacatggaccaaaaggcctggaggctcatcatttaaggtacaagccaattatgtagtctttgaaagaatgctttgaaattcagcttgcttgattcaattcccaatattttcatttgtattaaaagatttggcccttacaggttaaaaacaatgtcagtgtaaccaagtgacattcaaattttggcttcccaacatgtgatatgacatcacttcatgtgaaaatagcgaagctccaaacattttctttcagtcaccttattaagctcgctgagccctgacagcctaatgaaaggctaagggggaagaaaatgtcccaacttctacactgttgaagatgggctaatgagaggttagcttgcaagaatcattctttcttggcatcctgcttctgactgcttggctttcagcttatacccagcatgaaaatttaatttcctcgcagttgaaggtagtttaaagcttattactcacatgctaaaatgttgatgtatctgtttttgtgcttgttttctggatgattggaatgctctgcagtgatgttcatatcagcagtacagcgctggacttcctagtgaagaaaacagcaagattatagacacagtttagaaacaaaggaacaccatatacatttaaaggcataaagtatttactcactccctggccacagccaccgttaccttctcaatcccaacttcggatataattattgatatatttataacgagtttatgaagaatgtgaaaaaggtataaagatttcattatttactatttcatcaatcatctacttttttctagtttttgacctagtccctgagatgtaaaacaatatctctttttgaatacatcatagtctatgggtgagaaaaatattcaaaaagatagtcaaacatgatgaatacaaaagaggcctgagaaagctctgatgggagcacagaacagaggaaggctttagacaggtgaaaaaatttacctaagtcttaaaggaagaaagggaatttctaagaagtataatctctaccatgatttgcaatatgcttacaggccttatagcctcattttataattgtgagggtgcattgactctaaagactcagtgctgaaataaccctaataacagcccaactaatggtcatatctcatatatacagtcttgacaaattatttgtgaactctagtattttaaaagttatccttctttggaaaaatagcagtagcagaaataacactcttatcctaccttggccgtggatttaaacgtcatccattagcctaatacaacgttgctgaaaagccaaatttttctacactatatgcttcaaacccaagaaagtactggagctgactaataagggaagtcattagcagtacacagctgctacaaagagcctgaacaaagtaacacaaaattatcaggagaaatgttttacacagaacagatgtagcagagtttagaagcatgcagactttttttttccacaaaggagttgcctagtaattatgcatgttttccatagtatttacattaaacataatgaaaacaatgaactggttgtcttttatattcacaaagtacttccccagggagaagtacacttcttctctagaaggaggaagttactgtactcaaagaatttaaggtataaaagcaaagaatttctgtgtgttcaaagaaacagtattcaatgactctccaattgttggacactgtaaattgaagtttccataattatagtccttcccagctgtccatttaaaaaaaaaaaaaaaagccccacaggcattaattcaatccacctttctgggaaagtgtgtttaatgacagttcttaccctttccttactcttactaaactccaatatattctgttctaacatagtttataacctatggtttggaaaacactggtttaaggagctttaaggctgccctttggctcttctctaaaatgagataataaagtgtgatcacaaatcagtctacgtaagaacatgagcaatgctagccaaacttagcacgttgggacctgccttttgaaactgccttataagctctgagccatgctcttttgaagagtttcaagggcagacaacttttgaaaatggatttgaaacaagttagtcttttgttttcgggttttgaaggtcacacctttggcatgtacttctttagggttgagttgttcaggtatcttatgctgagagattttggcttttagtaccttagtctgagatttactttgtttattgatttttttttcctgttgtatagatctgaccaccctagctatggactgaagttggagcctcttttctaatataatgcaattgaccaagactgcttgggagcagctgtcagtattgtttaaagctgtcattcaatatggccaaactctttgttatctaaaaccccttgtctgatctgttgcctctgtttcacttttccaattagatgaatgacagaaacaaaaaatcgtaataaatattgtcaaatctgattttaatagaac

SEQ ID NO: 349856 - DNA, 1790 bp, Homo sapiens
ggcggtggtggcggcggccggcaggcgcgggggaacacaggggccgctacgggagccgcgccgccgcccatgtcattccacttcaagtgacttcatgtgatgtcagctgaatgtaaaagacagtgatctcacgcggaggggaagatgtttgccatcaaaatgtgacagaagagacacgctgcatggctcggaacgcatctccttggtggtgggggaaagagacttagaggagagaggctgcgccctggcccagcctggctcggctcagctccgcgcgccatggcaagctcggcttccctggagaccatggtgcccccggcctgcccgcgcgccggagcgtcgccggccacttccaagacactggccttttccatcgagcgcatcatggccaagacgtcggagccccgtgcgccctttgagccccggcctggagcgctagaggcggacggcagccagggcaagaaactgctcaacctctgctcgccgctgccctgtatgatccccctccagcccctaggctacgaggtgccgtcaaagacactgctcagttactcggagctctggaaaagcagcctccgggcgggcggcggcggaggcggcggcggcggtggcggcggcggcggcgggggggccccagtgtgcggcgccagcggcttgtgcaaaaccaactgtggcgtgtgctgcaaggccgagctgggcctggcgccgtccgcgctgcccgcgggcagggtcatcaagccgcaggtcatcaaccaggctgtggggctgccggccagcggctcgctctactacttcaactacctggactcgaccgcgtacccgccgtctgagctcctcagcggccacctcttcccgtctggcctcctcaatgcgcaggcccccgccgccctggctgctcaccccaagctctttctgctggagaacgccaagctggccggcctggctgcggacaagttcccccacccggctccctatccccataaggagcgcttgccggcgccgctggagcaggtactgaaggaaaactcggccctgactgccgagcgcggaggcgtcaagggccacagcaagctgccaggaggctccgcagatggcaagcccaaaaacttcacctgcgaggtgtgcggcaaggtgtttaacgctcactataatctcacccgccacatgccggtccacaccggagccagaccgttcgtgtgcaaagtctgcggcaaaggctttcgccaggccagcacgctctgcaggcacaaaattatccacacccaggtgcacccaccactagaatttgaacatcctaagaacaggtatttttgtctctgctttgctgatgtatcctcagcaaccggaactgcctgacatctgatcctttctgtgagacaccaggctgttgaggaagaatctatggcaacattgtatctattaatatacagcttctgtatttatcaggcccagttctggtgatgatttcacttttgacagaagctgtccctcaaaagcaaacatgcaatagaagaaacagatctcaatgccatccatctgcagttgtgacaagcaaaaaagtctccagacatggccaaatgtcccctggggggcaaaatcacccccaattgagaactactgctctaaactaagcagtcttggtatcctgaagctggagcaaaatgcgacaaagtgaagaagttcctactgactgggcacacagtcaaatgcatgtcaccaagactgggggttcagtcacatgctgttcttccttgattaaaaaactcattaatctgactatcataaaggca

SEQ ID NO: 349857 - DNA, 3759 bp, Homo sapiens
aaaagttcgtgaggtgtagtcgcggcaaccaggaggtgggcgtgtggtaacgcggcgcggggacgggtggcttgaaagggtctttatgaaccctagggaaaggccgtctggtgcacccaccactagaatttgaacatcctaagaacaggtatttttgtctctgctttgctgatgtatcctcagcaaccggaactgcctgacatctgatcctttctgtgagacaccaggctgttgaggaagaatctatggcaacattgtatctattaatatacagcttctgtatttatcaggcccagttctggtgatgatttcacttttgacagaagctgtccctcaaaagcaaacatgcaatagaagaaacagatctcaatgccatccatctgcagttgtgacaagcaaaaaagtctccagacatggccaaatgtcccctggggggcaaaatcacccccaattgagaactactgctctaaactatggagtctcactctgtcacccaggatggagtacagtggcgtgatctcggctcactgcaagctccgcctcctgggttcatgccattctcctgccttagcctcccgagtagctgggactacaggcgcctgccaccacgcccggctaatttttgtatttttagtagagacagggtttcaccgcattagccaggatggtctcgatctcctgacctcgtgatccgcccgcctcagcctcccaaagtgctgggattacaggcgtgagtcactgtgcccagccaagtttagtattttttgtagagacagagtttcaccatgttggccaggctggtcttgcactcatggcctcaagtgatccacctgcctcggcctccgaaagtgccgggattacaggcgtaagccactgtgcctggccttaaatgggtaaatttcatatggtatatgaattatatttcactaaaactttaagaaaacattatacagtactgttcaaattttaagtggtccaatttaaatgcactattgtatacaattctatgtaatgtccttaccatggtatatgttaactataaatatctatgcccctacccttagtatcaaagcatatattatatgccagtgagccaagccccacatgtctgtgaaatgtggtcttctagccatagaagtagcttgtgctcctagggtattccttgaggctctgtatgaagaatgtccatttgtttgagtccctaacctacagaatattcctgaccatggaaatgtgatagataggagtaagcacatggaccaaaaggcctggaggctcatcatttaaggtacaagccaattatgtagtctttgaaagaatgctttgaaattcagcttgcttgattcaattcccaatattttcatttgtattaaaagatttggcccttacaggttaaaaacaatgtcagtgtaaccaagtgacattcaaattttggcttcccaacatgtgatatgacatcacttcatgtgaaaatagcgaagctccaaacattttctttcagtcaccttattaagctcgctgagccctgacagcctaatgaaaggctaagggggaagaaaatgtcccaacttctacactgttgaagatgggctaatgagaggttagcttgcaagaatcattctttcttggcatcctgcttctgactgcttggctttcagcttatacccagcatgaaaatttaatttcctcgcagttgaaggtagtttaaagcttattactcacatgctaaaatgttgatgtatctgtttttgtgcttgttttctggatgattggaatgctctgcagtgatgttcatatcagcagtacagcgctggacttcctagtgaagaaaacagcaagattatagacacagtttagaaacaaaggaacaccatatacatttaaaggcataaagtatttactcactccctggccacagccaccgttaccttctcaatcccaacttcggatataattattgatatatttataacgagtttatgaagaatgtgaaaaaggtataaagatttcattatttactatttcatcaatcatctacttttttctagtttttgacctagtccctgagatgtaaaacaatatctctttttgaatacatcatagtctatgggtgagaaaaatattcaaaaagatagtcaaacatgatgaatacaaaagaggcctgagaaagctctgatgggagcacagaacagaggaaggctttagacaggtgaaaaaatttacctaagtcttaaaggaagaaagggaatttctaagaagtataatctctaccatgatttgcaatatgcttacaggccttatagcctcattttataattgtgagggtgcattgactctaaagactcagtgctgaaataaccctaataacagcccaactaatggtcatatctcatatatacagtcttgacaaattatttgtgaactctagtattttaaaagttatccttctttggaaaaatagcagtagcagaaataacactcttatcctaccttggccgtggatttaaacgtcatccattagcctaatacaacgttgctgaaaagccaaatttttctacactatatgcttcaaacccaagaaagtactggagctgactaataagggaagtcattagcagtacacagctgctacaaagagcctgaacaaagtaacacaaaattatcaggagaaatgttttacacagaacagatgtagcagagtttagaagcatgcagactttttttttccacaaaggagttgcctagtaattatgcatgttttccatagtatttacattaaacataatgaaaacaatgaactggttgtcttttatattcacaaagtacttccccagggagaagtacacttcttctctagaaggaggaagttactgtactcaaagaatttaaggtataaaagcaaagaatttctgtgtgttcaaagaaacagtattcaatgactctccaattgttggacactgtaaattgaagtttccataattatagtccttcccagctgtccatttaaaaaaaaaaaaaaaagccccacaggcattaattcaatccacctttctgggaaagtgtgtttaatgacagttcttaccctttccttactcttactaaactccaatatattctgttctaacatagtttataacctatggtttggaaaacactggtttaaggagctttaaggctgccctttggctcttctctaaaatgagataataaagtgtgatcacaaatcagtctacgtaagaacatgagcaatgctagccaaacttagcacgttgggacctgccttttgaaactgccttataagctctgagccatgctcttttgaagagtttcaagggcagacaacttttgaaaatggatttgaaacaagttagtcttttgttttcgggttttgaaggtcacacctttggcatgtacttctttagggttgagttgttcaggtatcttatgctgagagattttggcttttagtaccttagtctgagatttactttgtttattgatttttttttcctgttgtatagatctgaccaccctagctatggactgaagttggagcctcttttctaatataatgcaattgaccaagactgcttgggagcagctgtcagtattgtttaaagctgtcattcaatatggccaaactctttgttatctaaaaccccttgtctgatctgttgcctctgtttcacttttccaattagatgaatgacagaaacaaaaaatcgtaataaatattgtcaaatctgattttaatagaac

SEQ ID NO: 349858 - DNA, 515 bp, Homo sapiens
gtgctgatcatcattaatgtttaatgcatacccagatggcatgacagcagccagcgtggcctttttgttgaagttaattgacataaaaagtaaataaaaccctattcttcctaacaggcccagttctggtgatgatttcacttttgacagaagctgtccctcaaaagcaaacatgcaatagaagaaacagatctcagtaagtagcttattttccttacaaacactactgaaatttcttattaatgctcctaattttcccattatgcactgcagcgtgagtatggctccagaggctgcacctaataacttccttgagctctaatgattattggtatcttttactaatgtgtatctgttctaaactacacaaaagcatacaaagccatctccctcttttaaaaacttgaaaatgtgggtatcacctttaattaaatattttaaatttctctctccaaatcagatttatctatgtgtgggagtttagatagtcccaagacttttgctaatacagtatt

SEQ ID NO: 349859 - DNA, 1630 bp, Homo sapiens
cctttgcgcgccgggttaatgggcggtaatttggtacccttgggtgcactttgttttgcccctgttcatttgaatgcaaatgggtgacccgggcccgactaggtgcttattaaattgcagttttcccccctgccttttccggaatgcagacttagaggagagaggctgcgccctggcccagcctggctcggctcagctccgcgcgccatggcaagctcggcttccctggagaccatggtgcccccggcctgcccgcgcgccggagcgtcgccggccacttccaagacactggccttttccatcgagcgcatcatggccaagacgtcggagccccgtgcgccctttgagccccggcctggagcgctagaggcggacggcagccagggcaagaaactgctcaacctctgctcgccgctgccctgtatgatccccctccagcccctaggctacgaggtgccgtcaaagacactgctcagttactcggagctctggaaaagcagcctccgggcgggcggcggcggaggcggcggcggcggtggcggcggcggcggcgggggggccccagtgtgcggcgccagcggcttgtgcaaaaccaactgtggcgtgtgctgcaaggccgagctgggcctggcgccgtccgcgctgcccgcgggcagggtcatcaagccgcaggtcatcaaccaggctgtggggctgccggccagcggctcgctctactacttcaactacctggactcgaccgcgtacccgccgtctgagctcctcagcggccacctcttcccgtctggcctcctcaatgcgcaggcccccgccgccctggctgctcaccccaagctctttctgctggagaacgccaagctggccggcctggctgcggacaagttcccccacccggctccctatccccataaggagcgcttgccggcgccgctggagcaggtactgaaggaaaactcggccctgactgccgagcgcggaggcgtcaagggccacagcaagctgccaggaggctccgcagatggcaagcccaaaaacttcacctgcgaggtgtgcggcaaggtgtttaacgctcactataatctcacccgccacttgcggcaaagggttttgcagaaactttgacttaaagaaacatgtgcgcaaactccacgacagcgtgggccctgctgccccctccgcaaaggacctgactaggacagtgcagagctgagagctactgccttgcccttccttccctccctgtaccacctgaaaacagatcacacatataaacttatttctaaaattaaaagaaaaaaaaactatagcagagaggctaaaatctatttatcgaaaccagcatatttttggaaagctaaatgtttcctcgatgactggcagcaaactcgtggcccccacctttgtatattcaggaaacttatttaaatccagtgcgccgaaacgtatttaattccaggcctccgcttctcctggggcagccagttttaaccccagcctgtcaccgtgagcgccccagaagagcgcggcgcccctagccatctttatacagccatgtaaatcctcctgtacaagcgaacacggaatatatacatatataactcaataaacagaatcattagtgcgcgttttt

SEQ ID NO: 349860 - DNA, 1934 bp, Homo sapiens
cccgggtcgaccacgcgtccgagaagagacacgctgcatggctcggaacgcatctccttggtggtgggggaaagagacttagaggagagaggctgcgccctggcccagcctggctcggctcagctccgcgcgccatggcaagctcggcttccctggagaccatggtgcccccggcctgcccgcgcgccggagcgtcgccggccacttccaagacactggccttttccatcgagcgcatcatggccaagacgtcggagccccgtgcgccctttgagccccggcctggagcgctagaggcggacggcagccagggcaagaaactgctcaacctctgctcgccgctgccctgtatgatccccctccagcccctaggctacgaggtgccgtcaaagacactgctcagttactcggagctctggaaaagcagcctccgggcgggcggcggcggaggcggcggcggcggtggcggcggcggcggcgggggggccccagtgtgcggcgccagcggcttgtgcaaaaccaactgtggcgtgtgctgcaaggccgagctgggcctggcgccgtccgcgctgcccgcgggcagggtcatcaagccgcaggtcatcaaccaggctgtggggctgccggccagcggctcgctctactacttcaactacctggactcgaccgcgtacccgccgtctgagctcctcagcggccacctcttcccgtctggcctcctcaatgcgcaggcccccgccgccctggctgctcaccccaagctctttctgctggagaacgccaagctggccggcctggctgcggacaagttcccccacccggctccctatccccataaggagcgcttgccggcgccgctggagcaggtactgaaggaaaactcggccctgactgccgagcgcggaggcgtcaagggccacagcaagctgccaggaggctccgcagatggcaagcccaaaaacttcacctgcgaggtgtgcggcaaggtgtttaacgctcactataatctcacccgccacatgccggtccacaccggagccagaccgttcgtgtgcaaagtctgcggcaaaggctttcgccaggccagcacgctctgcaggcacaaaattatccacacccaggaaaagccacataaatgcaaccagtgcggcaaagcgttcaaccgcagctccacgctcaacacgcatatccgcatccacgcgggctacaagcccttcgtctgcgaattttgcggcaaaggctttcaccaaaaagggaactacaagaaccacaagctgacccacagcggcgagaagcagtacaaatgtaccatctgcaacaaggccttccaccaggtctacaacctaaccttccatatgcacacccacaacgacaagaagcctttcacgtgcgccacttgcggcaaagggttttgcagaaactttgacttaaagaaacatgtgcgcaaactccacgacagcgtgggccctgctgccccctccgcaaaggacctgactaggacagtgcagagctgagagctactgccttgcccttccttccctccctgtaccacctgaaaacagatcacacatataaacttatttctaaaattaaaagaaaaaaaaactatagcagagaggctaaaatctatttatcgaaaccagcatatttttggaaagctaaatgtttcctcgatgactggcagcaaactcgtggcccccacctttgtatattcaggaaacttatttaaatccagtgcgccgaaacgtatttaattccaggcctccgcttctcctggggcagccagttttaaccccagcctgtcaccgtgagcgccccagaagagcgcggcgcccctagccatctttatacagccatgtaaatcctcctgtacaagcgaacacggaatatatacatatataactcaataaacagaatcattagtgcgcgttttt

SEQ ID NO: 349861 - DNA, 3287 bp, Homo sapiens
ggcggtggtggcggcggccggcaggcgcgggggaacacaggggccgctacgggagccgcgccgccgcccatgtcattccacttcaagtgacttcatgtgatgtcagctgaatgtaaaagacagtgatctcacgcggaggggaagatgtttgccatcaaaatgtgacagaagagacacgctgcatggctcggaacgcatctccttggtggtgggggaaagagacttagaggagagaggctgcgccctggcccagcctggctcggctcagctccgcgcgccatggcaagctcggcttccctggagaccatggtgcccccggcctgcccgcgcgccggagcgtcgccggccacttccaagacactggccttttccatcgagcgcatcatggccaagacgtcggagccccgtgcgccctttgagccccggcctggagcgctagaggcggacggcagccagggcaagaaactgctcaacctctgctcgccgctgccctgtatgatccccctccagcccctaggctacgaggtgccgtcaaagacactgctcagttactcggagctctggaaaagcagcctccgggcgggcggcggcggaggcggcggcggcggtggcggcggcggcggcgggggggccccagtgtgcggcgccagcggcttgtgcaaaaccaactgtggcgtgtgctgcaaggccgagctgggcctggcgccgtccgcgctgcccgcgggcagggtcatcaagccgcaggtcatcaaccaggctgtggggctgccggccagcggctcgctctactacttcaactacctggactcgaccgcgtacccgccgtctgagctcctcagcggccacctcttcccgtctggcctcctcaatgcgcaggcccccgccgccctggctgctcaccccaagctctttctgctggagaacgccaagctggccggcctggctgcggacaagttcccccacccggctccctatccccataaggagcgcttgccggcgccgctggagcaggtactgaaggaaaactcggccctgactgccgagcgcggaggcgtcaagggccacagcaagctgccaggaggctccgcagatggcaagcccaaaaacttcacctgcgaggtgtgcggcaaggtgtttaacgctcactataatctcacccgccacatgccggtccacaccggagccagaccgttcgtgtgcaaagtctgcggcaaaggctttcgccaggccagcacgctctgcaggcacaaaattatccacacccaggtgcacccaccactagaatttgaacatcctaagaacaggtatttttgtctctgctttgctgatgtatcctcagcaaccggaactgcctgacatctgatcctttctgtgagacaccaggctgttgaggaagaatctatggcaacattgtatctattaatatacagcttctgtatttatcaggcccagttctggtgatgatttcacttttgacagaagctgtccctcaaaagcaaacatgcaatagaagaaacagatctcaatggagtctcactctgtcacccaggatggagtacagtggcgtgatctcggctcactgcaagctccgcctcctgggttcatgccattctcctgccttagcctcccgagtagctgggactacaggcgcctgccaccacgcccggctaatttttgtatttttagtagagacagggtttcaccgcattagccaggatggtctcgatctcctgacctcgtgatccgcccgcctcagcctcccaaagtgctgggattacaggcgtgagtcactgtgcccagccaagtttagtattttttgtagagacagagtttcaccatgttggccaggctggtcttgcactcatggcctcaagtgatccacctgcctcggcctccgaaagtgccgggattacaggcgtaagccactgtgcctggccttaaatgggtaaatttcatatggtatatgaattatatttcactaaaactttaagaaaacattatacagtactgttcaaattttaagtggtccaatttaaatgcactattgtatacaattctatgtaatgtccttaccatggtatatgttaactataaatatctatgcccctacccttagtatcaaagcatatattatatgccagtgagccaagccccacatgtctgtgaaatgtggtcttctagccatagaagtagcttgtgctcctagggtattccttgaggctctgtatgaagaatgtccatttgtttgagtccctaacctacagaatattcctgaccatggaaatgtgatagataggagtaagcacatggaccaaaaggcctggaggctcatcatttaaggtacaagccaattatgtagtctttgaaagaatgctttgaaattcagcttgcttgattcaattcccaatattttcatttgtattaaaagatttggcccttacaggttaaaaacaatgtcagtgtaaccaagtgacattcaaattttggcttcccaacatgtgatatgacatcacttcatgtgaaaatagcgaagctccaaacattttctttcagtcaccttattaagctcgctgagccctgacagcctaatgaaaggctaagggggaagaaaatgtcccaacttctacactgttgaagatgggctaatgagaggttagcttgcaagaatcattctttcttggcatcctgcttctgactgcttggctttcagcttatacccagcatgaaaatttaatttcctcgcagttgaaggtagtttaaagcttattactcacatgctaaaatgttgatgtatctgtttttgtgcttgttttctggatgattggaatgctctgcagtgatgttcatatcagcagtacagcgctggacttcctagtgaagaaaacagcaagattatagacacagtttagaaacaaaggaacaccatatacatttaaaggcataaagtatttactcactccctggccacagccaccgttaccttctcaatcccaacttcggatataattattgatatatttataacgagtttatgaagaatgtgaaaaagatctgaccaccctagctatggactgaagttggagcctcttttctaatataatgcaattgaccaagactgcttgggagcagctgtcagtattgtttaaagctgtcattcaatatggccaaactctttgttatctaaaaccccttgtctgatctgttgcctctgtttcacttttccaattagatgaatgacagaaacaaaaaatcgtaataaatattgtcaaatctgattttaatagaac

SEQ ID NO: 349862 - DNA, 3684 bp, Homo sapiens
aaaagttcgtgaggtgtagtcgcggcaaccaggaggtgcacccaccactagaatttgaacatcctaagaacaggtatttttgtctctgctttgctgatgtatcctcagcaaccggaactgcctgacatctgatcctttctgtgagacaccaggctgttgaggaagaatctatggcaacattgtatctattaatatacagcttctgtatttatcaggcccagttctggtgatgatttcacttttgacagaagctgtccctcaaaagcaaacatgcaatagaagaaacagatctcaatgccatccatctgcagttgtgacaagcaaaaaagtctccagacatggccaaatgtcccctggggggcaaaatcacccccaattgagaactactgctctaaactatggagtctcactctgtcacccaggatggagtacagtggcgtgatctcggctcactgcaagctccgcctcctgggttcatgccattctcctgccttagcctcccgagtagctgggactacaggcgcctgccaccacgcccggctaatttttgtatttttagtagagacagggtttcaccgcattagccaggatggtctcgatctcctgacctcgtgatccgcccgcctcagcctcccaaagtgctgggattacaggcgtgagtcactgtgcccagccaagtttagtattttttgtagagacagagtttcaccatgttggccaggctggtcttgcactcatggcctcaagtgatccacctgcctcggcctccgaaagtgccgggattacaggcgtaagccactgtgcctggccttaaatgggtaaatttcatatggtatatgaattatatttcactaaaactttaagaaaacattatacagtactgttcaaattttaagtggtccaatttaaatgcactattgtatacaattctatgtaatgtccttaccatggtatatgttaactataaatatctatgcccctacccttagtatcaaagcatatattatatgccagtgagccaagccccacatgtctgtgaaatgtggtcttctagccatagaagtagcttgtgctcctagggtattccttgaggctctgtatgaagaatgtccatttgtttgagtccctaacctacagaatattcctgaccatggaaatgtgatagataggagtaagcacatggaccaaaaggcctggaggctcatcatttaaggtacaagccaattatgtagtctttgaaagaatgctttgaaattcagcttgcttgattcaattcccaatattttcatttgtattaaaagatttggcccttacaggttaaaaacaatgtcagtgtaaccaagtgacattcaaattttggcttcccaacatgtgatatgacatcacttcatgtgaaaatagcgaagctccaaacattttctttcagtcaccttattaagctcgctgagccctgacagcctaatgaaaggctaagggggaagaaaatgtcccaacttctacactgttgaagatgggctaatgagaggttagcttgcaagaatcattctttcttggcatcctgcttctgactgcttggctttcagcttatacccagcatgaaaatttaatttcctcgcagttgaaggtagtttaaagcttattactcacatgctaaaatgttgatgtatctgtttttgtgcttgttttctggatgattggaatgctctgcagtgatgttcatatcagcagtacagcgctggacttcctagtgaagaaaacagcaagattatagacacagtttagaaacaaaggaacaccatatacatttaaaggcataaagtatttactcactccctggccacagccaccgttaccttctcaatcccaacttcggatataattattgatatatttataacgagtttatgaagaatgtgaaaaaggtataaagatttcattatttactatttcatcaatcatctacttttttctagtttttgacctagtccctgagatgtaaaacaatatctctttttgaatacatcatagtctatgggtgagaaaaatattcaaaaagatagtcaaacatgatgaatacaaaagaggcctgagaaagctctgatgggagcacagaacagaggaaggctttagacaggtgaaaaaatttacctaagtcttaaaggaagaaagggaatttctaagaagtataatctctaccatgatttgcaatatgcttacaggccttatagcctcattttataattgtgagggtgcattgactctaaagactcagtgctgaaataaccctaataacagcccaactaatggtcatatctcatatatacagtcttgacaaattatttgtgaactctagtattttaaaagttatccttctttggaaaaatagcagtagcagaaataacactcttatcctaccttggccgtggatttaaacgtcatccattagcctaatacaacgttgctgaaaagccaaatttttctacactatatgcttcaaacccaagaaagtactggagctgactaataagggaagtcattagcagtacacagctgctacaaagagcctgaacaaagtaacacaaaattatcaggagaaatgttttacacagaacagatgtagcagagtttagaagcatgcagactttttttttccacaaaggagttgcctagtaattatgcatgttttccatagtatttacattaaacataatgaaaacaatgaactggttgtcttttatattcacaaagtacttccccagggagaagtacacttcttctctagaaggaggaagttactgtactcaaagaatttaaggtataaaagcaaagaatttctgtgtgttcaaagaaacagtattcaatgactctccaattgttggacactgtaaattgaagtttccataattatagtccttcccagctgtccatttaaaaaaaaaaaaaaaagccccacaggcattaattcaatccacctttctgggaaagtgtgtttaatgacagttcttaccctttccttactcttactaaactccaatatattctgttctaacatagtttataacctatggtttggaaaacactggtttaaggagctttaaggctgccctttggctcttctctaaaatgagataataaagtgtgatcacaaatcagtctacgtaagaacatgagcaatgctagccaaacttagcacgttgggacctgccttttgaaactgccttataagctctgagccatgctcttttgaagagtttcaagggcagacaacttttgaaaatggatttgaaacaagttagtcttttgttttcgggttttgaaggtcacacctttggcatgtacttctttagggttgagttgttcaggtatcttatgctgagagattttggcttttagtaccttagtctgagatttactttgtttattgatttttttttcctgttgtatagatctgaccaccctagctatggactgaagttggagcctcttttctaatataatgcaattgaccaagactgcttgggagcagctgtcagtattgtttaaagctgtcattcaatatggccaaactctttgttatctaaaaccccttgtctgatctgttgcctctgtttcacttttccaattagatgaatgacagaaacaaaaaatcgtaataaatattgtcaaatctgattttaatagaac

SEQ ID NO: 349863 - DNA, 1936 bp, Homo sapiens
ggcggtggtggcggcggccggcaggcgcgggggaacacaggggccgctacgggagccgcgccgccgcccatgtcattccacttcaagtgacttcatgtgatgtcagctgaatgtaaaagacagtgatctcacgcggaggggaagatgtttgccatcaaaatgtgacagaagagacacgctgcatggctcggaacgcatctccttggtggtgggggaaagagacttagaggagagaggctgcgccctggcccagcctggctcggctcagctccgcgcgccatggcaagctcggcttccctggagaccatggtgcccccggcctgcccgcgcgccggagcgtcgccggccacttccaagacactggccttttccatcgagcgcatcatggccaagacgtcggagccccgtgcgccctttgagccccggcctggagcgctagaggcggacggcagccagggcaagaaactgctcaacctctgctcgccgctgccctgtatgatccccctccagcccctaggctacgaggtgccgtcaaagacactgctcagttactcggagctctggaaaagcagcctccgggcgggcggcggcggaggcggcggcggcggtggcggcggcggcggcgggggggccccagtgtgcggcgccagcggcttgtgcaaaaccaactgtggcgtgtgctgcaaggccgagctgggcctggcgccgtccgcgctgcccgcgggcagggtcatcaagccgcaggtcatcaaccaggctgtggggctgccggccagcggctcgctctactacttcaactacctggactcgaccgcgtacccgccgtctgagctcctcagcggccacctcttcccgtctggcctcctcaatgcgcaggcccccgccgccctggctgctcaccccaagctctttctgctggagaacgccaagctggccggcctggctgcggacaagttcccccacccggctccctatccccataaggagcgcttgccggcgccgctggagcaggtactgaaggaaaactcggccctgactgccgagcgcggaggcgtcaagggccacagcaagctgccaggaggctccgcagatggcaagcccaaaaacttcacctgcgaggtgtgcggcaaggtgtttaacgctcactataatctcacccgccacatgccggtccacaccggagccagaccgttcgtgtgcaaagtctgcggcaaaggctttcgccaggccagcacgctctgcaggcacaaaattatccacacccaggtgcacccaccactagaatttgaacatcctaagaacaggtatttttgtctctgctttgctgatgtatcctcagcaaccggaactgcctgacatctgatcctttctgtgagacaccaggctgttgaggaagaatctatggcaacattgtatctattaatatacagcttctgtatttatcaggcccagttctggtgatgatttcacttttgacagaagctgtccctcaaaagcaaacatgcaatagaagaaacagatctcagtaagtagcttattttccttacaaacactactgaaatttcttattaatgctcctaattttcccattatgcactgcagcgtgagtatggctccagaggctgcacctaataacttccttgagctctaatgattattggtatcttttactaatgtgtatctgttctaaactacacaaaagcatacaaagccatctccctcttttaaaaacttgaaaatgtgggtatcacctttaattaaatattttaaatttctctctccaaatcagatttatctatgtgtgggagtttagatagtcccaagacttttgctaatacagtatttccaatttaatcttaagtagaaaaatgtatgtaattaagagatttattataaaacatttggcaaagaaggaaagaaaacagtaactatgtag

SEQ ID NO: 349864 - DNA, 162 bp, Homo sapiens
gtaaataggttcatcactgtgaagatttctggacattctgccaccaccttggtctacaagtggcattcccaaagcctgaagctatctttggcacctgtaaaacgccagcctttccctccatgcctacccaaagtggtaggtccagagatgtcttgatcatct

SEQ ID NO: 349865 - DNA, 433 bp, Homo sapiens
gcagactggagctggctgtggattttatttctcaggagaaggaggtgggagctggagagagtgacccgtgcatctttccagcttttccttggccacctgggtggcatgggagctgggagtcagagttctgctgagctgtaggaccaaaggccactggctccgctgcacctgcggactgagacacccacctgctgagtgagacccagcctctgcgtgcttaggggtcccctgctacagggcattgaggtgaggtccgcctttgcccagtgtgagagcgctgctttcagagctttgagaaggctgttatcatttgtttctttttgaacttgccacctccccacttagagaatatttctggggacagagtttcgtaactcctgccgcatagttggtgcctgctctcgactacattaaatctattttcagtgcccct

SEQ ID NO: 349866 - DNA, 343 bp, Homo sapiens
taggttatgggcacgccacgtgtggtcctttcccagctgtcagtgttctcccggctgaaatagactttagcatttttggatgcagcacaacttcctagcctggaaaagccatattctcaacaattattgtgtaaatttaagaggtacagttgtaataataacccttgtccctatgcctcctacctttgcacagccatttctttggcctagaatgtccttctctgccttgactccagagcatgcttcttcctgagacttatatcttactgcagctgagctgaccctatcttcttacagtccccttcaatttgagagtttttttttttttttttttttttttttt

SEQ ID NO: 349867 - DNA, 294 bp, Homo sapiens
ctctggcagagtaaatgttctctacttttgagtcagaccagtgaaggccaaccttcgtcttaggaagaagttgtggtgccaacataagctttggagccaaacagacttagttcaactaccagcctttacctagtttttggtgctcccattgactagtctgcggcaacagatgagttaaaggagatgttgggtgtgtatcctaacacactgcacaggctgtgttgcagaatagtcagtaaatgtccattttctttcttcacatacaccttcttctttctgcaccaataatttaag

SEQ ID NO: 349868 - DNA, 2277 bp, Homo sapiens
agcggaagtggagggagggggtgaaaatggcgcccagctcgaaatcggagcggaacagcggggctgggagcggcggcggcggccccgggggagccggagggaagcgggcagcagggcggcggcgggagcacgtcctcaagcagctggagcgggtcaagatcagcggacagctctcccctcgcctcttccggaagctgcctccccgggtgtgcgtgtccctcaagaacattgtggatgaggacttcctctatgcaggacatatcttcctgggcttttccaaatgcggccgctacgtcctctcctacaccagcagcagtggggatgacgacttctccttctacatctaccatctgtactggtgggagttcaacgttcacagcaagctcaagctggtccggcaggttcggctattccaggacgaggagatctacagcgacctgtacctgaccgtatgcgagtggcccagcgacgcctccaaggtcatcgtcttcggcttcaacacccgctcggccaacgggatgctcatgaacatgatgatgatgagtgacgagaaccaccgtgacatctacgtcagcaccgtggccgtgccaccgccaggccgctgtgctgcttgccaggatgccagccgagcccacccaggagacccgaatgcacagtgcctacggcatggcttcatgctgcacaccaagtaccaggtggtctaccccttccccaccttccagcccgccttccagctcaagaaggaccaggtggtgctgctcaacaccagctactccctggtggcctgcgccgtctccgtccactcggcaggtgacaggagtttctgccaaatcctgtatgaccacagcacctgccccctggcgcctgccagcccccctgagccccagagcccagagctgccccctgccctccccagcttctgccctgaggcggccccagcccgttcttctgggtctcctgagccctcgcccgccattgccaaagccaaggagtttgtggctgacatcttccgccgggccaaagaggccaagggcggggtccctgaggaagcccggcctgccctgtgcccaggaccctctggcagccgctgccgtgcgcactctgagcccctagccctgtgtggagagacggcaccccgggacagcccccctgcctcggaggcacctgcctccgagcctggctatgtcaactacaccaagctgtactatgtgctggagtccggagaggggacggagccggaggatgagttggaggacgacaagatctccctgcccttcgtggtgactgatcttcgtggccgcaacctgcggcccatgcgggagcggactgctgtccagggccagtacctgacagtggagcagctcacactagacttcgaatatgttatcaatgaggtcatccgccacgacgctacctggggccatcagttctgttctttcagcgactatgacatcgtcattctggaggtctgcccagaaaccaaccaggtcctcatcaacattggcctgctgctcctggccttcccgtcccccactgaggagggccagctccgaccaaagacctatcacaccagcctcaaggtggcatgggacctcaacacagggatcttcgagacagtcagtgtaggcgacctgactgaggtcaaagggcagaccagcggcagtgtctggagctcctaccgcaagagctgcgtggacatggtcatgaagtggctggtgccggagagcagcggccgctacgtcaacaggatgaccaatgaggcgctgcacaaagggtgctccctgaaggttctggcggacagcgagcgatatacgtggatcgtgctgtgagggccaggccgccccggacactgactccaactacctccgtggcctgggaccggcccccttcctggggtggcctcttcctggccggctggcccaccgactgatgaccggcactagtgttagcctgcggaacggggctgggcagggcagcctctgttggcctgagggtctggacgctttttatttatgcctatttaagttgggaaggggcagagagagggcgccccctgccccaccagcctgagtgccccgccttcaccccgagctgggcatgggcctggcccctcgtgcatttgcccttttctcggctacagctgtggacgttgccctcggggaggtcgaatggaccccattccccctgccctgcccgcccccagcctccccacccaggccggcaacctggccatccccattccgttcttcttcatgtaataaatgttttaatttctga

SEQ ID NO: 349869 - DNA, 2636 bp, Homo sapiens
agcggaagtggagggagggggtgaaaatggcgcccagctcgaaatcggagcggaacagcggggctgggagcggcggcggcggccccgggggagccggagggaagcgggcagcagggcggcggcgggagcacgtcctcaagcagctggagcgggtcaagatcagcggacagctctcccctcgcctcttccggaagctgcctccccgggtgtgcgtgtccctcaagaacattgtggatgaggacttcctctatgcaggacatatcttcctgggcttttccaaatgcggccgctacgtcctctcctacaccagcagcagtggggatgacgacttctccttctacatctaccatctgtactggtgggagttcaacgttcacagcaagctcaagctggtccggcaggttcggctattccaggacgaggagatctacagcgacctgtacctgaccgtatgcgagtggcccagcgacgcctccaaggtcatcgtcttcggcttcaacacccgctcggccaacgggatgctcatgaacatgatgatgatgagtgacgagaaccaccgtgacatctacgtcagcaccgtggccgtgccaccgccaggccgctgtgctgcttgccaggatgccagccgagcccacccaggagacccgaatgcacagtgcctacggcatggcttcatgctgcacaccaagtaccaggtggtctaccccttccccaccttccagcccgccttccagctcaagaaggaccaggtggtgctgctcaacaccagctactccctggtggcctgcgccgtctccgtccactcggcaggtgacaggagtttctgccaaatcctgtatgaccacagcacctgccccctggcgcctgccagcccccctgagccccagagcccagagctgccccctgccctccccagcttctgccctgaggcggccccagcccgttcttctgggtctcctgagccctcgcccgccattgccaaagccaaggagtttgtggctgacatcttccgccgggccaaagaggccaagggcggggtccctgaggaagcccggcctgccctgtgcccaggaccctctggcagccgctgccgtgcgcactctgagcccctagccctgtgtggagagacggcaccccgggacagcccccctgcctcggaggcacctgcctccgagcctggctatgtcaactacaccaagctgtactatgtgctggagtccggagaggggacggagccggaggatgagttggaggacgacaagatctccctgcccttcgtggtgactgatcttcgtggccgcaacctgcggcccatgcgggagcggactgctgtccagggccagtacctgacagtggagcagctcacactagacttcgaatatgttatcaatgaggtcatccgccacgacgctacctggggccatcagttctgttctttcagcgactatgacatcgtcattctggaggtctgcccagaaaccaaccaggtcctcatcaacattggcctgctgctcctggccttcccgtcccccactgaggagggccagctccgaccaaagacctatcacaccagcctcaaggtggcatgggacctcaacacagggatcttcgagacagtcagtgtaggcgacctgactgaggtcaaagggcagaccagcggcagtgtctggagctcctaccgcaagagctgcgtggacatggtcatgaagtggctggtgccggagagcagcggccgctacgtcaacaggatgaccaatgaggcgctgcacaaaggtggggctcggtgaccccgtgatggtcagggtcaccaggaacacttgtcctcacccaggagctgattcctgagcgctgatgaaatgggtgggaaggctggtgaggagagggcagcccaggccaggcccagctcagcagccctgaaagtgtggggcctgggagcctcccaccagtcatggcctggctggtcactcattcacgctacatttattgggtagctgcaggctagaggtggagggcaactcagcagggtccctgccttctggaaccttctgggccagaagcaagtcaggtggagggtgtggccgcagggccaggcaggcaggggctctatgctttgtctccacctgtccctgtagggtgctccctgaaggttctggcggacagcgagcgatatacgtggatcgtgctgtgagggccaggccgccccggacactgactccaactacctccgtggcctgggaccggcccccttcctggggtggcctcttcctggccggctggcccaccgactgatgaccggcactagtgttagcctgcggaacggggctgggcagggcagcctctgttggcctgagggtctggacgctttttatttatgcctatttaagttgggaaggggcagagagagggcgccccctgccccaccagcctgagtgccccgccttcaccccgagctgggcatgggcctggcccctcgtgcatttgcccttttctcggctacagctgtggacgttgccctcggggaggtcgaatggaccccattccccctgccctgcccgcccccagcctccccacccaggccggcaacctggccatccccattccgttcttcttcatgtaataaatgttttaatttctga

SEQ ID NO: 349870 - DNA, 2608 bp, Homo sapiens
agcggaagtggagggagggggtgaaaatggcgcccagctcgaaatcggagcggaacagcggggctgggagcggcggcggcggccccgggggagccggagggaagcgggcagcagggcggcggcgggagcacgtcctcaagcagctggagcgggtcaagatcagcggacagctctcccctcgcctcttccggaagctgcctccccgggtgtgcgtgtccctcaagaacattgtggatgaggacttcctctatgcaggacatatcttcctgggcttttccaaatgcggccgctacgtcctctcctacaccagcagcagtggggatgacgacttctccttctacatctaccatctgtactggtgggagttcaacgttcacagcaagctcaagctggtccggcaggttcggctattccaggacgaggagatctacagcgacctgtacctgaccgtatgcgagtggcccagcgacgcctccaaggtcatcgtcttcggcttcaacacccgctcggccaacgggatgctcatgaacatgatgatgatgagtgacgagaaccaccgtgacatctacgtcagcaccgtggccgtgccaccgccaggccgctgtgctgcttgccaggatgccagccgagcccacccaggagacccgaatgcacagtgcctacggcatggcttcatgctgcacaccaagtaccaggtggtctaccccttccccaccttccagcccgccttccagctcaagaaggaccaggtggtgctgctcaacaccagctactccctggtggcctgcgccgtctccgtccactcggcaggtgacaggagtttctgccaaatcctgtatgaccacagcacctgccccctggcgcctgccagcccccctgagccccagagcccagagctgccccctgccctccccagcttctgccctgaggcggccccagcccgttcttctgggtctcctgagccctcgcccgccattgccaaagccaaggagtttgtggctgacatcttccgccgggccaaagaggccaagggcggggtccctgaggaagcccggcctgccctgtgcccaggaccctctggcagccgctgccgtgcgcactctgagcccctagccctgtgtggagagacggcaccccgggacagcccccctgcctcggaggcacctgcctccgagcctggctatgtcaactacaccaagctgtactatgtgctggagtccggagaggggacggagccggaggatgagttggaggacgacaagatctccctgcccttcgtggtgactgatcttcgtggccgcaacctgcggcccatgcgggagcggactgctgtccagggccagtacctgacagtggagcagctcacactagacttcgaatatgttatcaatgaggtcatccgccacgacgctacctggggccatcagttctgttctttcagcgactatgacatcgtcattctggaggtctgcccagaaaccaaccaggtcctcatcaacattggcctgctgctcctggccttcccgtcccccactgaggagggccagctccgaccaaagacctatcacaccagcctcaaggtggcatgggacctcaacacagggatcttcgagacagtcagtgtaggcgacctgactgaggtcaaagggcagaccagcggcagtgtctggagctcctaccgcaagagctgcgtggacatggtcatgaagtggctggtgccggagagcagcggccgctacgtcaacaggatgaccaatgaggcgctgcacaaaggtggggctcggtgaccccgtgatggtcagggtcaccaggaacacttgtcctcacccaggagctgattcctgagcgctgatgaaatgggtgggaaggctggtgaggagagggcagcccaggccaggcccagctcagcagccctgaaagtgtggggcctgggagcctcccaccagtcatggcctggctggtcactcattcacgctacatttattgggtagctgcaggctagaggtggagggcaactcagcagggtccctgccttctggaaccttctgggccagaagcaagtcaggtggagggtgtggccgcagggccaggcaggcaggggctctatgctttgtctccacctgtccctgtagggtgctccctgaaggttctggcggacagcgagcgatatacgtggatcgtgctgtgagggccaggccgccccggacactgactccaactacctccgtggcctcttcctggccggctggcccaccgactgatgaccggcactagtgttagcctgcggaacggggctgggcagggcagcctctgttggcctgagggtctggacgctttttatttatgcctatttaagttgggaaggggcagagagagggcgccccctgccccaccagcctgagtgccccgccttcaccccgagctgggcatgggcctggcccctcgtgcatttgcccttttctcggctacagctgtggacgttgccctcggggaggtcgaatggaccccattccccctgccctgcccgcccccagcctccccacccaggccggcaacctggccatccccattccgttcttcttcatgtaataaatgttttaatttctga

SEQ ID NO: 349871 - DNA, 2352 bp, Homo sapiens
agcggaagtggagggagggggtgaaaatggcgcccagctcgaaatcggagcggaacagcggggctgggagcggcggcggcggccccgggggagccggagggaagcgggcagcagggcggcggcgggagcacgtcctcaagcagctggagcgggtcaagatcagcggacagctctcccctcgcctcttccggaagctgcctccccgggtgtgcgtgtccctcaagaacattgtggatgaggacttcctctatgcaggacatatcttcctgggcttttccaaatgcggccgctacgtcctctcctacaccagcagcagtggggatgacgacttctccttctacatctaccatctgtactggtgggagttcaacgttcacagcaagctcaagctggtccggcaggttcggctattccaggacgaggagatctacagcgacctgtacctgaccgtatgcgagtggcccagcgacgcctccaaggtcatcgtcttcggcttcaacacccgctcggccaacgggatgctcatgaacatgatgatgatgagtgacgagaaccaccgtgacatctacgtcagcaccgtggccgtgccaccgccaggccgctgtgctgcttgccaggatgccagccgagcccacccaggagacccgaatgcacagtgcctacggcatggcttcatgctgcacaccaagtaccaggtggtctaccccttccccaccttccagcccgccttccagctcaagaaggaccaggtggtgctgctcaacaccagctactccctggtggcctgcgccgtctccgtccactcggcaggtgacaggagtttctgccaaatcctgtatgaccacagcacctgccccctggcgcctgccagcccccctgagccccagagcccagagctgccccctgccctccccagcttctgccctgaggcggccccagcccgttcttctgggtctcctgagccctcgcccgccattgccaaagccaaggagtttgtggctgacatcttccgccgggccaaagaggccaagggcggggtccctgaggaagcccggcctgccctgtgcccaggaccctctggcagccgctgccgtgcgcactctgagcccctagccctgtgtggagagacggcaccccgggacagcccccctgcctcggaggcacctgcctccgagcctggctatgtcaactacaccaagctgtactatgtgctggagtccggagaggggacggagccggaggatgagttggaggacgacaagatctccctgcccttcgtggtgactgatcttcgtggccgcaacctgcggcccatgcgggagcggactgctgtccagggccagtacctgacagtggagcagctcacactagacttcgaatatgttatcaatgaggtcatccgccacgacgctacctggggccatcagttctgttctttcagcgactatgacatcgtcattctggaggtctgcccagaaaccaaccaggtcctcatcaacattggcctgctgctcctggccttcccgtcccccactgaggagggccagctccgaccaaagacctatcacaccagcctcaaggtggcatgggacctcaacacagggatcttcgagacagtcagtgtaggcgacctgactgaggtcaaagggcagaccaggtgaggcagggctggggggcagggtcagggcgcggccaaggcgacgagagccactcaccccctggccccgcagcgcggcagtgtctggagctcctaccgcaagagctgcgtggacatggtcatgaagtggctggtgccggagagcagcggccgctacgtcaacaggatgaccaatgaggcgctgcacaaagggtgctccctgaaggttctggcggacagcgagcgatatacgtggatcgtgctgtgagggccaggccgccccggacactgactccaactacctccgtggcctgggaccggcccccttcctggggtggcctcttcctggccggctggcccaccgactgatgaccggcactagtgttagcctgcggaacggggctgggcagggcagcctctgttggcctgagggtctggacgctttttatttatgcctatttaagttgggaaggggcagagagagggcgccccctgccccaccagcctgagtgccccgccttcaccccgagctgggcatgggcctggcccctcgtgcatttgcccttttctcggctacagctgtggacgttgccctcggggaggtcgaatggaccccattccccctgccctgcccgcccccagcctccccacccaggccggcaacctggccatccccattccgttcttcttcatgtaataaatgttttaatttctga

SEQ ID NO: 349872 - DNA, 2451 bp, Homo sapiens
agcggaagtggagggagggggtgaaaatggcgcccagctcgaaatcggagcggaacagcggggctgggagcggcggcggcggccccgggggagccggagggaagcgggcagcagggcggcggcgggagcacgtcctcaagcagctggagcgggtcaagatcagcggacagctctcccctcgcctcttccggaagctgcctccccgggtgtgcgtgtccctcaagaacattgtggatgaggacttcctctatgcaggacatatcttcctgggcttttccaaatgcggccgctacgtcctctcctacaccagcagcagtggggatgacgacttctccttctacatctaccatctgtactggtgggagttcaacgttcacagcaagctcaagctggtccggcaggttcggctattccaggacgaggagatctacagcgacctgtacctgaccgtatgcgagtggcccagcgacgcctccaaggtcatcgtcttcggcttcaacacccgctcggccaacgggatgctcatgaacatgatgatgatgagtgacgagaaccaccgtgacatctacgtcagcaccgtggccgtgccaccgccaggccgctgtgctgcttgccaggatgccagccgagcccacccaggagacccgaatgcacagtgcctacggcatggcttcatgctgcacaccaagtaccaggtggtctaccccttccccaccttccagcccgccttccagctcaagaaggaccaggtggtgctgctcaacaccagctactccctggtggcctgcgccgtctccgtccactcggcaggtgacaggagtttctgccaaatcctgtatgaccacagcacctgccccctggcgcctgccagcccccctgagccccagagcccagagctgccccctgccctccccagcttctgccctgaggcggccccagcccgttcttctgggtctcctgagccctcgcccgccattgccaaagccaaggagtttgtggctgacatcttccgccgggccaaagaggccaagggcggggtccctgaggaagcccggcctgccctgtgcccaggaccctctggcagccgctgccgtgcgcactctgagcccctagccctgtgtggagagacggcaccccgggacagcccccctgcctcggaggcacctgcctccgagcctggctatgtcaactacaccaagctgtactatgtgctggagtccggagaggggacggagccggaggatgagttggaggacgacaagatctccctgcccttcgtggtgactgatcttcgtggccgcaacctgcggcccatgcgggagcggactgctgtccagggccagtacctgacagtggagcagctcacactagacttcgaatatgttatcaatgaggtcatccgccacgacgctacctggggccatcagttctgttctttcagcgactatgacatcgtcattctggaggtctgcccagaaaccaaccaggtcctcatcaacattggcctgctgctcctggccttcccgtcccccactgaggagggccagctccgaccaaagacctatcacaccagcctcaaggtggcatgggacctcaacacagggatcttcgagacagtcagtgtaggcgacctgactgaggtcaaagggcagaccagccaggtcctcatcaacattggcctgctgctcctggccttcccgtcccccactgaggagggccagctccgaccaaagacctatcacaccagcctcaaggtggcatgggacctcaacacagggatcttcgagacagtcagtgtaggcgacctgactgaggtcaaagggcagaccagcggcagtgtctggagctcctaccgcaagagctgcgtggacatggtcatgaagtggctggtgccggagagcagcggccgctacgtcaacaggatgaccaatgaggcgctgcacaaagggtgctccctgaaggttctggcggacagcgagcgatatacgtggatcgtgctgtgagggccaggccgccccggacactgactccaactacctccgtggcctgggaccggcccccttcctggggtggcctcttcctggccggctggcccaccgactgatgaccggcactagtgttagcctgcggaacggggctgggcagggcagcctctgttggcctgagggtctggacgctttttatttatgcctatttaagttgggaaggggcagagagagggcgccccctgccccaccagcctgagtgccccgccttcaccccgagctgggcatgggcctggcccctcgtgcatttgcccttttctcggctacagctgtggacgttgccctcggggaggtcgaatggaccccattccccctgccctgcccgcccccagcctccccacccaggccggcaacctggccatccccattccgttcttcttcatgtaataaatgttttaatttctga

SEQ ID NO: 349873 - DNA, 1193 bp, Homo sapiens
ttgggcatgggcctggcccctcgtgcatttgcccttttctcggctacagctgtggacagccccccctgcctcggaggcacctgcctccgagcctggctatgtcaactacaccaagctgtactatgtgctggagtccggagaggggacggagccggaggatgagttggaggacgacaagatctccctgcccttcgtggtgactgatcttcgtggccgcaacctgcggcccatgcgggagcggactgctgtccagggccagtacctgacagtggagcagctcacactagacttcgaatatgttatcaatgaggtcatccgccacgacgctacctggggccatcagttctgttctttcagcgactatgacatcgtcattctggaggtctgcccagaaaccaaccaggtcctcatcaacattggcctgctgctcctggccttcccgtcccccactgaggagggccagctccgaccaaagacctatcacaccagcctcaaggtggcatgggacctcaacacagggatcttcgagacagtcagtgtaggcgacctgactgaggtcaaagggcagaccagcggcagtgtctggagctcctaccgcaagagctgcgtggacatggtcatgaagtggctggtgccggagagcagcggccgctacgtcaacaggatgaccaatgaggcgctgcacaaagggtgctccctgaaggttctggcggacagcgagcgatatacgtggatcgtgctgtgagggccaggccgccccggacactgactccaactacctccgtggcctgggaccggcccccttcctggggtggcctcttcctggccggctggcccaccgactgatgaccggcactagtgttagcctgcggaacggggctgggcagggcagcctctgttggcctgagggtctggacgctttttatttatgcctatttaagttgggaaggggcagagagagggcgccccctgccccaccagcctgagtgccccgccttcaccccgagctgggcatgggcctggcccctcgtgcatttgcccttttctcggctacagctgtggacgttgccctcggggaggtcgaatggaccccattccccctgccctgcccgcccccagcctccccacccaggccggcaacctggccatccccattccgttcttcttcatgtaataaatgttttaatttctga

SEQ ID NO: 349874 - DNA, 1054 bp, Homo sapiens
cccccacttcctgcctccccagagttggaggacgacaagatctccctgcccttcgtggtgactgatcttcgtggccgcaacctgcggcccatgcgggagcggactgctgtccagggccagtacctgacagtggagcagctcacactagacttcgaatatgttatcaatgaggtcatccgccacgacgctacctggggccatcagttctgttctttcagcgactatgacatcgtcattctggaggtctgcccagaaaccaaccaggtcctcatcaacattggcctgctgctcctggccttcccgtcccccactgaggagggccagctccgaccaaagacctatcacaccagcctcaaggtggcatgggacctcaacacagggatcttcgagacagtcagtgtaggcgacctgactgaggtcaaagggcagaccagcggcagtgtctggagctcctaccgcaagagctgcgtggacatggtcatgaagtggctggtgccggagagcagcggccgctacgtcaacaggatgaccaatgaggcgctgcacaaagggtgctccctgaaggttctggcggacagcgagcgatatacgtggatcgtgctgtgagggccaggccgccccggacactgactccaactacctccgtggcctgggaccggcccccttcctggggtggcctcttcctggccggctggcccaccgactgatgaccggcactagtgttagcctgcggaacggggctgggcagggcagcctctgttggcctgagggtctggacgctttttatttatgcctatttaagttgggaaggggcagagagagggcgccccctgccccaccagcctgagtgccccgccttcaccccgagctgggcatgggcctggcccctcgtgcatttgcccttttctcggctacagctgtggacgttgccctcggggaggtcgaatggaccccattccccctgccctgcccgcccccagcctccccacccaggccggcaacctggccatccccattccgttcttcttcatgtaataaatgttttaatttctga

SEQ ID NO: 349875 - DNA, 2556 bp, Homo sapiens
agcggaagtggagggagggggtgaaaatggcgcccagctcgaaatcggagcggaacagcggggctgggagcggcggcggcggccccgggggagccggagggaagcgggcagcagggcggcggcgggagcacgtcctcaagcagctggagcgggtcaagagcccctgccgctggctttgggcttcctccgcctgatgttcctctccctgcccaagccccgaccacacatgagctgggagttccagtacctgggtgggcctccccattgaaagtgtgggagctccctggatagggctgagtcttcccccgcagagtgagagttaccgaagcaggctctgtctcctccatcagactggaaactcccagagctgggggatgatgtctctctcccccatcagtttgggagctctggagggcagaaatgtggatctcttgcagatcagcggacagctctcccctcgcctcttccggaagctgcctccccgggtgtgcgtgtccctcaagaacattgtggatgaggacttcctctatgcaggacatatcttcctgggcttttccaaatgcggccgctacgtcctctcctacaccagcagcagtggggatgacgacttctccttctacatctaccatctgtactggtgggagttcaacgttcacagcaagctcaagctggtccggcaggttcggctattccaggacgaggagatctacagcgacctgtacctgaccgtatgcgagtggcccagcgacgcctccaaggtcatcgtcttcggcttcaacacccgctcggccaacgggatgctcatgaacatgatgatgatgagtgacgagaaccaccgtgacatctacgtcagcaccgtggccgtgccaccgccaggccgctgtgctgcttgccaggatgccagccgagcccacccaggagacccgaatgcacagtgcctacggcatggcttcatgctgcacaccaagtaccaggtggtctaccccttccccaccttccagcccgccttccagctcaagaaggaccaggtggtgctgctcaacaccagctactccctggtggcctgcgccgtctccgtccactcggcaggtgacaggagtttctgccaaatcctgtatgaccacagcacctgccccctggcgcctgccagcccccctgagccccagagcccagagctgccccctgccctccccagcttctgccctgaggcggccccagcccgttcttctgggtctcctgagccctcgcccgccattgccaaagccaaggagtttgtggctgacatcttccgccgggccaaagaggccaagggcggggtccctgaggaagcccggcctgccctgtgcccaggaccctctggcagccgctgccgtgcgcactctgagcccctagccctgtgtggagagacggcaccccgggacagcccccctgcctcggaggcacctgcctccgagcctggctatgtcaactacaccaagctgtactatgtgctggagtccggagaggggacggagccggaggatgagttggaggacgacaagatctccctgcccttcgtggtgactgatcttcgtggccgcaacctgcggcccatgcgggagcggactgctgtccagggccagtacctgacagtggagcagctcacactagacttcgaatatgttatcaatgaggtcatccgccacgacgctacctggggccatcagttctgttctttcagcgactatgacatcgtcattctggaggtctgcccagaaaccaaccaggtcctcatcaacattggcctgctgctcctggccttcccgtcccccactgaggagggccagctccgaccaaagacctatcacaccagcctcaaggtggcatgggacctcaacacagggatcttcgagacagtcagtgtaggcgacctgactgaggtcaaagggcagaccagcggcagtgtctggagctcctaccgcaagagctgcgtggacatggtcatgaagtggctggtgccggagagcagcggccgctacgtcaacaggatgaccaatgaggcgctgcacaaagggtgctccctgaaggttctggcggacagcgagcgatatacgtggatcgtgctgtgagggccaggccgccccggacactgactccaactacctccgtggcctgggaccggcccccttcctggggtggcctcttcctggccggctggcccaccgactgatgaccggcactagtgttagcctgcggaacggggctgggcagggcagcctctgttggcctgagggtctggacgctttttatttatgcctatttaagttgggaaggggcagagagagggcgccccctgccccaccagcctgagtgccccgccttcaccccgagctgggcatgggcctggcccctcgtgcatttgcccttttctcggctacagctgtggacgttgccctcggggaggtcgaatggaccccattccccctgccctgcccgcccccagcctccccacccaggccggcaacctggccatccccattccgttcttcttcatgtaataaatgttttaatttctga

SEQ ID NO: 349876 - DNA, 2569 bp, Homo sapiens
agcggaagtggagggagggggtgaaaatggcgcccagctcgaaatcggagcggaacagcggggctgggagcggcggcggcggccccgggggagccggagggaagcgggcagcagggcggcggcgggagcacgtcctcaagcagctggagcgggtcaagatcagcggacagctctcccctcgcctcttccggaagctgcctccccgggtgtgcgtgtccctcaagaacattgtggatgaggacttcctctatgcaggacatatcttcctgggcttttccaaatgcggccgctacgtcctctcctacaccagcagcagtggggatgacgacttctccttctacatctaccatctgtactggtgggagttcaacgttcacagcaagctcaagctggtccggcaggttcggctattccaggacgaggagatctacagcgacctgtacctgaccgtatgcgagtggcccagcgacgcctccaaggtcatcgtcttcggcttcaacacccgctcggccaacgggatgctcatgaacatgatgatgatgagtgacgagaaccaccgtgacatctacgtcagcaccgtggccgtgccaccgccaggccgctgtgctgcttgccaggatgccagccgagcccacccaggagacccgaatgcacagtgcctacggcatggcttcatgctgcacaccaagtaccaggtggtctaccccttccccaccttccagcccgccttccagctcaagaaggaccaggtggtgctgctcaacaccagctactccctggtggcctgcgccgtctccgtccactcggcaggtgacaggagtttctgccaaatcctgtatgaccacagcacctgccccctggcgcctgccagcccccctgagccccagagcccagagctgccccctgccctccccagcttctgccctgaggcggccccagcccgttcttctgggtctcctgagccctcgcccgccattgccaaagccaaggagtttgtggctgacatcttccgccgggccaaagaggccaagggcggggtccctgaggaagcccggcctgccctgtgcccaggaccctctggcagccgctgccgtgcgcactctgagcccctagccctgtgtggagagacggcaccccgggacagcccccctgcctcggaggcacctgcctccgagcctggctatgtcaactacaccaagctgtactatgtgctggagtccggagaggggacggagccggaggatgagttggaggacgacaagatctccctgcccttcgtggtgactgatcttcgtggccgcaacctgcggcccatgcgggagcggactgctgtccagggccagtacctgacagtggagcagctcacactagacttcgaatatgttatcaatgaggtcatccgccacgacgctacctggggccatcagttctgttctttcagcgactatgacatcgtcattctggaggtctgcccagaaaccaaccaggtcctcatcaacattggcctgctgctcctggccttcccgtcccccactgaggagggccagctccggtgagcgcggggatcctgccctctctgtccactaggggggccactggcagacacttcacggtgggggtgtggggacgtgagaaggctctccctgtgccacaacctggctgggcccctccatagctgttccaaagacaaaaggccctcagggtagcctggggcctggttcaggagcccggctgtcccagcgtttgtcctatgtccctctccactgtagaccaaagacctatcacaccagcctcaaggtggcatgggacctcaacacagggatcttcgagacagtcagtgtaggcgacctgactgaggtcaaagggcagaccaggtgaggcagggctggggggcagggtcagggcgcggccaaggcgacgagagccactcaccccctggccccgcagcgcggcagtgtctggagctcctaccgcaagagctgcgtggacatggtcatgaagtggctggtgccggagagcagcggccgctacgtcaacaggatgaccaatgaggcgctgcacaaagggtgctccctgaaggttctggcggacagcgagcgatatacgtggatcgtgctgtgagggccaggccgccccggacactgactccaactacctccgtggcctgggaccggcccccttcctggggtggcctcttcctggccggctggcccaccgactgatgaccggcactagtgttagcctgcggaacggggctgggcagggcagcctctgttggcctgagggtctggacgctttttatttatgcctatttaagttgggaaggggcagagagagggcgccccctgccccaccagcctgagtgccccgccttcaccccgagctgggcatgggcctggcccctcgtgcatttgcccttttctcggctacagctgtggacgttgccctcggggaggtcgaatggaccccattccccctgccctgcccgcccccagcctccccacccaggccggcaacctggccatccccattccgttcttcttcatgtaataaatgttttaatttctga

SEQ ID NO: 349877 - DNA, 2494 bp, Homo sapiens
agcggaagtggagggagggggtgaaaatggcgcccagctcgaaatcggagcggaacagcggggctgggagcggcggcggcggccccgggggagccggagggaagcgggcagcagggcggcggcgggagcacgtcctcaagcagctggagcgggtcaagatcagcggacagctctcccctcgcctcttccggaagctgcctccccgggtgtgcgtgtccctcaagaacattgtggatgaggacttcctctatgcaggacatatcttcctgggcttttccaaatgcggccgctacgtcctctcctacaccagcagcagtggggatgacgacttctccttctacatctaccatctgtactggtgggagttcaacgttcacagcaagctcaagctggtccggcaggttcggctattccaggacgaggagatctacagcgacctgtacctgaccgtatgcgagtggcccagcgacgcctccaaggtcatcgtcttcggcttcaacacccgctcggccaacgggatgctcatgaacatgatgatgatgagtgacgagaaccaccgtgacatctacgtcagcaccgtggccgtgccaccgccaggccgctgtgctgcttgccaggatgccagccgagcccacccaggagacccgaatgcacagtgcctacggcatggcttcatgctgcacaccaagtaccaggtggtctaccccttccccaccttccagcccgccttccagctcaagaaggaccaggtggtgctgctcaacaccagctactccctggtggcctgcgccgtctccgtccactcggcaggtgacaggagtttctgccaaatcctgtatgaccacagcacctgccccctggcgcctgccagcccccctgagccccagagcccagagctgccccctgccctccccagcttctgccctgaggcggccccagcccgttcttctgggtctcctgagccctcgcccgccattgccaaagccaaggagtttgtggctgacatcttccgccgggccaaagaggccaagggcggggtccctgaggaagcccggcctgccctgtgcccaggaccctctggcagccgctgccgtgcgcactctgagcccctagccctgtgtggagagacggcaccccgggacagcccccctgcctcggaggcacctgcctccgagcctggctatgtcaactacaccaagctgtactatgtgctggagtccggagaggggacggagccggaggatgagttggaggacgacaagatctccctgcccttcgtggtgactgatcttcgtggccgcaacctgcggcccatgcgggagcggactgctgtccagggccagtacctgacagtggagcagctcacactagacttcgaatatgttatcaatgaggtcatccgccacgacgctacctggggccatcagttctgttctttcagcgactatgacatcgtcattctggaggtctgcccagaaaccaaccaggtcctcatcaacattggcctgctgctcctggccttcccgtcccccactgaggagggccagctccggtgagcgcggggatcctgccctctctgtccactaggggggccactggcagacacttcacggtgggggtgtggggacgtgagaaggctctccctgtgccacaacctggctgggcccctccatagctgttccaaagacaaaaggccctcagggtagcctggggcctggttcaggagcccggctgtcccagcgtttgtcctatgtccctctccactgtagaccaaagacctatcacaccagcctcaaggtggcatgggacctcaacacagggatcttcgagacagtcagtgtaggcgacctgactgaggtcaaagggcagaccagcggcagtgtctggagctcctaccgcaagagctgcgtggacatggtcatgaagtggctggtgccggagagcagcggccgctacgtcaacaggatgaccaatgaggcgctgcacaaagggtgctccctgaaggttctggcggacagcgagcgatatacgtggatcgtgctgtgagggccaggccgccccggacactgactccaactacctccgtggcctgggaccggcccccttcctggggtggcctcttcctggccggctggcccaccgactgatgaccggcactagtgttagcctgcggaacggggctgggcagggcagcctctgttggcctgagggtctggacgctttttatttatgcctatttaagttgggaaggggcagagagagggcgccccctgccccaccagcctgagtgccccgccttcaccccgagctgggcatgggcctggcccctcgtgcatttgcccttttctcggctacagctgtggacgttgccctcggggaggtcgaatggaccccattccccctgccctgcccgcccccagcctccccacccaggccggcaacctggccatccccattccgttcttcttcatgtaataaatgttttaatttctga

SEQ ID NO: 349878 - DNA, 2039 bp, Homo sapiens
agcggaagtggagggagggggtgaaaatggcgcccagctcgaaatcggagcggaacagcggggctgggagcggcggcggcggccccgggggagccggagggaagcgggcagcagggcggcggcgggagcacgtcctcaagcagctggagcgggtcaagatcagcggacagctctcccctcgcctcttccggaagctgcctccccgggtgtgcgtgtccctcaagaacattgtggatgaggacttcctctatgcaggacatatcttcctgggcttttccaaatgcggccgctacgtcctctcctacaccagcagcagtggggatgacgacttctccttctacatctaccatctgtactggtgggagttcaacgttcacagcaagctcaagctggtccggcaggttcggctattccaggacgaggagatctacagcgacctgtacctgaccgtatgcgagtggcccagcgacgcctccaaggtcatcgtcttcggcttcaacacccgctcggccaacgggatgctcatgaacatgatgatgatgagtgacgagaaccaccgtgacatctacgtcagcaccgtggccgtgccaccgccaggccgctgtgctgcttgccaggatgccagccgagcccacccaggagacccgaatgcacagtgcctacggcatggcttcatgctgcacaccaagtaccaggtggtctaccccttccccaccttccagcccgccttccagctcaagaaggaccaggtggtgctgctcaacaccagctactccctggtggcctgcgccgtctccgtccactcggcaggtgacaggagtttctgccaaatcctgtatgaccacagcacctgccccctggcgcctgccagcccccctgagccccagagcccagagctgccccctgccctccccagcttctgccctgaggcggccccagcccgttcttctgggtctcctgagccctcgcccgccattgccaaagccaaggagtttgtggctgacatcttccgccgggccaaagaggccaagggcggggtccctgaggaagcccggcctgccctgtgcccaggaccctctggcagccgctgccgtgcgcactctgagcccctagccctgtgtggagagacggcaccccgggacagcccccctgcctcggaggcacctgcctccgagcctggctatgtcaactacaccaagctgtactatgtgctggagtccggagaggggacggagccggaggatgagttggaggacgacaagatctccctgcccttcgtggtgactgatcttcgtggccgcaacctgcggcccatgcgggagcggactgctgtccagggccagtacctgacagtggagcagctcacactagacttcgaatatgttatcaatgaggtcatccgccacgacgctacctggggccatcagttctgttctttcagcgactatgacatcgtcattctggaggtctgcccagaaaccaaccaggtcctcatcaacattggcctgctgctcctggccttcccgtcccccactgaggagggccagctccgaccaaagacctatcacaccagcctcaaggtggcatgggacctcaacacagggatcttcgagacagtcagtgtaggcgacctgactgaggtcaaagggcagaccagcggcagtgtctggagctcctaccgcaagagctgcgtggacatggtcatgaagtggctggtgccggagagcagcggccgctacgtcaacaggatgaccaatgaggcgctgcacaaagggtgctccctgaaggttctggcggacagcgagcgatatacgtggatcgtgctgtgagggccaggccgccccggacactgactccaactacctccgtggcctgggaccggcccccttcctggggtggcctcttcctggccggctggcccaccgactgatgaccggcactagtgttagccctgcccgcccccagcctccccacccaggccggcaacctggccatccccattccgttcttcttcatgtaataaatgttttaatttctga

SEQ ID NO: 349879 - DNA, 1884 bp, Homo sapiens
agcggaagtggagggagggggtgaaaatggcgcccagctcgaaatcggagcggaacagcggggctgggagcggcggcggcggccccgggggagccggagggaagcgggcagcagggcggcggcgggagcacgtcctcaagcagctggagcgggtcaagatcagcggacagctctcccctcgcctcttccggaagctgcctccccgggtgtgcgtgtccctcaagaacattgtggatgaggacttcctctatgcaggacatatcttcctgggcttttccaaatgcggccgctacgtcctctcctacaccagcagcagtggggatgacgacttctccttctacatctaccatctgtactggtgggagttcaacgttcacagcaagctcaagctggtccggcaggttcggctattccaggacgaggagatctacagcgacctgtacctgaccgtatgcgagtggcccagcgacgcctccaaggtcatcgtcttcggcttcaacacccgctcggccaacgggatgctcatgaacatgatgatgatgagtgacgagaaccaccgtgacatctacgtcagcaccgtggccgtgccaccgccaggccgctgtgctgcttgccaggatgccagccgagcccacccaggagacccgaatgcacagtgcctacggcatggcttcatgctgcacaccaagtaccaggtggtctaccccttccccaccttccagcccgccttccagctcaagaaggaccaggtggtgctgctcaacaccagctactccctggtggcctgcgccgtctccgtccactcggcaggtgacaggagtttctgccaaatcctgtatgaccacagcacctgccccctggcgcctgccagcccccctgagccccagagcccagagctgccccctgccctccccagcttctgccctgaggcggccccagcccgttcttctgggtctcctgagccctcgcccgccattgccaaagccaaggagtttgtggctgacatcttccgccgggccaaagaggccaagggcggggtccctgaggaagcccggcctgccctgtgcccaggaccctctggcagccgctgccgtgcgcactctgagcccctagccctgtgtggagagacggcaccccgggacagcccccctgcctcggaggcacctgcctccgagcctggctatgtcaactacaccaagctgtactatgtgctggagtccggagaggggacggagccggaggatggtgagcggggggcaggcatcggcagtgtctggagctcctaccgcaagagctgcgtggacatggtcatgaagtggctggtgccggagagcagcggccgctacgtcaacaggatgaccaatgaggcgctgcacaaagggtgctccctgaaggttctggcggacagcgagcgatatacgtggatcgtgctgtgagggccaggccgccccggacactgactccaactacctccgtggcctgggaccggcccccttcctggggtggcctcttcctggccggctggcccaccgactgatgaccggcactagtgttagcctgcggaacggggctgggcagggcagcctctgttggcctgagggtctggacgctttttatttatgcctatttaagttgggaaggggcagagagagggcgccccctgccccaccagcctgagtgccccgccttcaccccgagctgggcatgggcctggcccctcgtgcatttgcccttttctcggctacagctgtggacgttgccctcggggaggtcgaatggaccccattccccctgccctgcccgcccccagcctccccacccaggccggcaacctggccatccccattccgttcttcttcatgtaataaatgttttaatttctga

SEQ ID NO: 349880 - DNA, 963 bp, Homo sapiens
agcggaagtggagggagggggtgaaaatggcgcccagctcgaaatcggagcggaacagcggggctgggagcggcggcggcggccccgggggagccggagggaagcgggcagcagggcggcggcgggagcacgtcctcaagcagctggagcgggtcaagagcccctgccgctggctttgggcttcctccgcctgatgttcctctccctgcccaagccccgaccacacatgagctgggagttccagtacctgggtgggcctccccattgaaagtgtgggagctccctggatagggctgagtcttcccccgcagagtgagagttaccgaagcaggctctgtctcctccatcagactggaaactcccagagctgggggatgatgtctctctcccccatcagtttgggagctctggagggcagaaatgtggatctcttgcagatcagcggacagctctcccctcgcctcttccggaagctgcctccccgggtgtgcgtgtccctcaagaacattgtggatgaggacttcctctatgcaggacatatcttcctgggcttttccaaatgcggccgctacgtcctctcctacaccagcagcagtggggatgacgacttctccttctacatctaccatctgtactggtgggagttcaacgttcacagcaagctcaagctggtagggaggcttcaacaccaggctggcccttcagatggtgtggttcagcaggtcacagcaacctctgagcctcaggttccttgggtgtaaaatgatcatcatgtactcctggggtcatcatcaagattccatgtgttagatccaaccatatgaaattaccagggcctggcatggtagctcacacctgtaatcccagcactttgggaggccaaggcgggaggatcacttggtccgagtagttcaagaccaggctgggcaacatggcaaaaccctgtctctactaaaaataaaa

SEQ ID NO: 349881 - DNA, 800 bp, Homo sapiens
tctcgaaaaggcactctgtcacgtgtacacaggaaagggccctgacaagaggatgggactgcagttgtggctgccagagtcttgctttgtcgcccagttggagtgcagtggcacgatctcggctcagtgcaacctccgcctcctgagttcaagtgattctcctgcctcagcctccctagtagctgggattacaggacaaggagagggacaaattccttcttggcatccttatggccctgtgacctgctaatgaatgctgactctgagttgctactagaatttggtttccttgtggcttcccaggaattgtgagccatgttggataaggacctgcaagggaagaatgaggaagcctgggacagtgcaggaggggagagcactggtggtagagaggagtgatgacaagggtctccgccaaaagggaaatggaggggttaaagaagctgctggggagggttaaaaacaatgtgttctcactcgtaggtgggaattgaacaatgagaacacttggacacaggaaggggaacatcaagcccgaatgatatctcctattcgctacacaattctccgatccgtccctaaacaaactaggaggcgtcctttgccctattatatccatcctcatcctagcaataatccccatcctccatatattccaaaaaacaaagcataaatatttcgcccactaagccactcactttatgactcctagcgagactcctattctagctgcatcgcaggacacagtaagtaccctttacatcatggacagtcgctccgtctatacttcaaaatctatc

SEQ ID NO: 349882 - DNA, 473 bp, Homo sapiens
gacaggttaactgatgttttttaaaattgtcttttatttctggaaagatctgacttattcctagcttttttcataccctttattattagtgccttaaaataaagctggccaggtgcagtgccacacacctgtaatacctgccatcactgattgtagcctggtgaggcctgttttagacttctgacctgtagagctgtaacataatacatttgggttgttttcaaccactaagtttgtggtaatttgttgtagcagctgtagaaaatgaatacatatgaatcctctggcatttgtttgagatttgctctatggcctagtatgtggttgtaaatgttccatctgtgcctgaaaaaatgtatatttctaattcagtagtctctgctttttttttttattttgtaccccatcaataaaatgattttcagcatgtatccccaaataaacaatattttatttattgattgaaaaataaa

SEQ ID NO: 349883 - DNA, 309 bp, Homo sapiens
acaaaacaaagtatattagggattcccaggggctggggctggggctggggttggttggggggaagaaatggggagtcattgctaaggggtacaagtttctctggggtaacgaaaatgttatagaattagatagtgttgatggctgcacaacctgtggatacactaaaataaataaataataaatagttacttgattacagttacttagcctttattttgtttgtttgttttttgacagagtcttgctttgtcgcccaagatcgagccattgcactccagcctgggcaataagagtaaaactccatatcg

SEQ ID NO: 349884 - DNA, 2548 bp, Homo sapiens
tctcgaaaaggcactctgtcacgtgtacacaggaaagggccctgacaagaggatgggactgcagttgtggctgccagggccccggccagggtgaaaacaaggaacattccagagaagatcacaaggatgcgaataaaatcggagctgcacagggatctttgggctgtaataggaggggacacacaggggttaggggagggtctagcccttggctccctcagcccagccctcctgtcaccttgcctctcccctttcccccaccttattctatcccacccgccaccgttggccaactcctctcctaaacagtggactctgctttttcccctcctcttatccctaatcctaggagctttctgtctggcttccctcctggcccctcgtgtatgcattctctctagcggtggggattaaggagaaaactcacgtggccagtgggtagagagagtccgggcaggcagctgcctgaagtcagccagagtctgcatgtgcccagctgtcctggcctccagcatctctggaaaaacagagacagaatgagtagcagcaggggaccccatagggcacatctgaaggcctgagaggtgctggatgggatgggaaggcagaaacaggctgaccttatctaggggtaggagtggggagtactggttggggtatcaccgctaccccacgtgatggcacagagagttgcctggaacttaccactgacataaggttggagtgcagtggcacgatctcggctcagtgcaacctccgcctcctgagttcaagtgattctcctgcctcagcctccctagtagctgggattacaggacaaggagagggacaaattccttcttggcatccttatggccctgtgacctgctaatgaatgctgactctgagttgctactagaatttggtttccttgtggcttcccaggaattgtgagccatgttggataaggacctgcaagggaagaatgaggaagcctgggacagtgcaggaggggagagcactggtggtagagaggagtgatgacaagggtctccgccaaaagggaaatggaggggttaaagaagctgctggggagggttaaaaacaatgtgttctcactcgtaggtgggaattgaacaatgagaacacttggacacaggaaggggaacatcacacactggggcctgtcgtggggtgtggggagggaggagggatagcattaggagatatacctaatgtaaatgatgagttaatgggtgcagcacaccaacatggcacatgtatacctatgtaacaaacctgcacattgtgtacatgtaccctagaacttaaagtataattaaaaaacaaaacaaaacaaaacaaaaacaatgaggtgctattgttttagtggtgagtatccggagacctgggagttctatttaccaggtataacctgggctcaaaattccaggctgacttcaggcatgtcctcatctcatagatgccagcactaaggcccagagagggcgagctcattcagcccacccatcttctcacccctgactgcatttcccgggggtccttctgcagccaggtgctgctgtggtactttgggatctattggctgagctcccagagaagggtcatggattgggctagtttggaacaagtgaagggactgaagatgggctcagtatggggcgaagaccttcaggaagggtctgcagagtgagtaggggggttttgactaggaaaagttccaaccctgccggggccgctgtcaagagaaaagcatctattacagttacatttttaagttaagtagactgaagaatatttcttgtgtattaaagacgttcctttttggttgatttgcaatggaaaagctttgttttcttttttttttggaaacagggtctcactctgctcactctgtctcccaagctggagtgcagtggtacagtcacggctcactgcagcctccacttcctggactcaagtgatcttctcacttcagccttctgagtagctgggactacaggtagacccagtgtaatcacaagcatccttgtaagtggcaaagaggcagaggagacagcgccagagaggcagctgcatgagaaggatcaagatgttgctgactttgaagttggaagaagaaggccatgagcctcagtatgtgggcggcttctagaagctggaaggggcaaggagatggatttgacccttcagcctccaggggcagctgtacctgccatcactgattgtagcctggtgaggcctgttttagacttctgacctgtagagctgtaacataatacatttgggttgttttcaaccactaagtttgtggtaatttgttgtagcagctgtagaaaatgaatacatatgaatcctctggcatttgtttgagatttgctctatggcctagtatgtggttgtaaatgttccatctgtgcctgaaaaaatgtatatttctaattcagtagtctctgctttttttttttattttgtaccccatcaataaaatgattttcagcatgtatccccaaataaacaatattttatttattgattgaaaaataaa

SEQ ID NO: 349885 - DNA, 2720 bp, Homo sapiens
tctcgaaaaggcactctgtcacgtgtacacaggaaagggccctgacaagaggatgggactgcagttgtggctgccagggccccggccagggtgaaaacaaggaacattccagagaagatcacaaggatgcgaataaaatcggagctgcacagggatctttgggctgtaataggaggggacacacaggggttaggggagggtctagcccttggctccctcagcccagccctcctgtcaccttgcctctcccctttcccccaccttattctatcccacccgccaccgttggccaactcctctcctaaacagtggactctgctttttcccctcctcttatccctaatcctaggagctttctgtctggcttccctcctggcccctcgtgtatgcattctctctagcggtggggattaaggagaaaactcacgtggccagtgggtagagagagtccgggcaggcagctgcctgaagtcagccagagtctgcatgtgcccagctgtcctggcctccagcatctctggaaaaacagagacagaatgagtagcagcaggggaccccatagggcacatctgaaggcctgagaggtgctggatgggatgggaaggcagaaacaggctgaccttatctaggggtaggagtggggagtactggttggggtatcaccgctaccccacgtgatggcacagagagttgcctggaacttaccactgacataaggttggagtgcagtggcacgatctcggctcagtgcaacctccgcctcctgagttcaagtgattctcctgcctcagcctccctagtagctgggattacaggacaaggagagggacaaattccttcttggcatccttatggccctgtgacctgctaatgaatgctgactctgagttgctactagaatttggtttccttgtggcttcccaggaattgtgagccatgttggataaggacctgcaagggaagaatgaggaagcctgggacagtgcaggaggggagagcactggtggtagagaggagtgatgacaagggtctccgccaaaagggaaatggaggggttaaagaagctgctggggagggttaaaaacaatgtgttctcactcgtaggtgggaattgaacaatgagaacacttggacacaggaaggggaacatcacacactggggcctgtcgtggggtgtggggagggaggagggatagcattaggagatatacctaatgtaaatgatgagttaatgggtgcagcacaccaacatggcacatgtatacctatgtaacaaacctgcacattgtgtacatgtaccctagaacttaaagtataattaaaaaacaaaacaaaacaaaacaaaaacaatgaggtgctattgttttagtggtgagtatccggagacctgggagttctatttaccaggtataacctgggctcaaaattccaggctgacttcaggcatgtcctcatctcatagatgccagcactaaggcccagagagggcgagctcattcagcccacccatcttctcacccctgactgcatttcccgggggtccttctgcagccaggtgctgctgtggtactttgggatctattggctgagctcccagagaagggtcatggattgggctagtttggaacaagtgaagggactgaagatgggctcagtatggggcgaagaccttcaggaagggtctgcagagtgagtaggggggttttgactaggaaaagttccaaccctgccggggccgctgtcaagagaaaagcatctattacagttacatttttaagttaagtagactgaagaatatttcttgtgtattaaagacgttcctttttggttgatttgcaatggaaaagctttgttttcttttttttttggaaacagggtctcactctgctcactctgtctcccaagctggagtgcagtggtacagtcacggctcactgcagcctccacttcctggactcaagtgatcttctcacttcagccttctgagtagctgggactacagccccctctgcagctcttcatgggggtccactcaagtcagaagccacatctgggtgtgattcagagagctgtttatgcaaaaccagccttgtcaccatcaggcaaggcacctgaattcccaccgcagagagtgctgtggccctgaggacttttctgtcaccagccatttccaggtagacccagtgtaatcacaagcatccttgtaagtggcaaagaggcagaggagacagcgccagagaggcagctgcatgagaaggatcaagatgttgctgactttgaagttggaagaagaaggccatgagcctcagtatgtgggcggcttctagaagctggaaggggcaaggagatggatttgacccttcagcctccaggggcagctgtacctgccatcactgattgtagcctggtgaggcctgttttagacttctgacctgtagagctgtaacataatacatttgggttgttttcaaccactaagtttgtggtaatttgttgtagcagctgtagaaaatgaatacatatgaatcctctggcatttgtttgagatttgctctatggcctagtatgtggttgtaaatgttccatctgtgcctgaaaaaatgtatatttctaattcagtagtctctgctttttttttttattttgtaccccatcaataaaatgattttcagcatgtatccccaaataaacaatattttatttattgattgaaaaataaa

SEQ ID NO: 349886 - DNA, 2567 bp, Homo sapiens
tctcgaaaaggcactctgtcacgtgtacacaggaaagggccctgacaagaggatgggactgcagttgtggctgccagggccccggccagggtgaaaacaaggaacattccagagaagatcacaaggatgcgaataaaatcggagctgcacagggatctttgggctgtaataggaggggacacacaggggttaggggagggtctagcccttggctccctcagcccagccctcctgtcaccttgcctctcccctttcccccaccttattctatcccacccgccaccgttggccaactcctctcctaaacagtggactctgctttttcccctcctcttatccctaatcctaggagctttctgtctggcttccctcctggcccctcgtgtatgcattctctctagcggtggggattaaggagaaaactcacgtggccagtgggtagagagagtccgggcaggcagctgcctgaagtcagccagagtctgcatgtgcccagctgtcctggcctccagcatctctggaaaaacagagacagaatgagtagcagcaggggaccccatagggcacatctgaaggcctgagaggtgctggatgggatgggaaggcagaaacaggctgaccttatctaggggtaggagtggggagtactggttggggtatcaccgctaccccacgtgatggcacagagagttgcctggaacttaccactgacataagagtcttgctttgtcgcccagttggagtgcagtggcacgatctcggctcagtgcaacctccgcctcctgagttcaagtgattctcctgcctcagcctccctagtagctgggattacaggacaaggagagggacaaattccttcttggcatccttatggccctgtgacctgctaatgaatgctgactctgagttgctactagaatttggtttccttgtggcttcccaggaattgtgagccatgttggataaggacctgcaagggaagaatgaggaagcctgggacagtgcaggaggggagagcactggtggtagagaggagtgatgacaagggtctccgccaaaagggaaatggaggggttaaagaagctgctggggagggttaaaaacaatgtgttctcactcgtaggtgggaattgaacaatgagaacacttggacacaggaaggggaacatcacacactggggcctgtcgtggggtgtggggagggaggagggatagcattaggagatatacctaatgtaaatgatgagttaatgggtgcagcacaccaacatggcacatgtatacctatgtaacaaacctgcacattgtgtacatgtaccctagaacttaaagtataattaaaaaacaaaacaaaacaaaacaaaaacaatgaggtgctattgttttagtggtgagtatccggagacctgggagttctatttaccaggtataacctgggctcaaaattccaggctgacttcaggcatgtcctcatctcatagatgccagcactaaggcccagagagggcgagctcattcagcccacccatcttctcacccctgactgcatttcccgggggtccttctgcagccaggtgctgctgtggtactttgggatctattggctgagctcccagagaagggtcatggattgggctagtttggaacaagtgaagggactgaagatgggctcagtatggggcgaagaccttcaggaagggtctgcagagtgagtaggggggttttgactaggaaaagttccaaccctgccggggccgctgtcaagagaaaagcatctattacagttacatttttaagttaagtagactgaagaatatttcttgtgtattaaagacgttcctttttggttgatttgcaatggaaaagctttgttttcttttttttttggaaacagggtctcactctgctcactctgtctcccaagctggagtgcagtggtacagtcacggctcactgcagcctccacttcctggactcaagtgatcttctcacttcagccttctgagtagctgggactacaggtagacccagtgtaatcacaagcatccttgtaagtggcaaagaggcagaggagacagcgccagagaggcagctgcatgagaaggatcaagatgttgctgactttgaagttggaagaagaaggccatgagcctcagtatgtgggcggcttctagaagctggaaggggcaaggagatggatttgacccttcagcctccaggggcagctgtacctgccatcactgattgtagcctggtgaggcctgttttagacttctgacctgtagagctgtaacataatacatttgggttgttttcaaccactaagtttgtggtaatttgttgtagcagctgtagaaaatgaatacatatgaatcctctggcatttgtttgagatttgctctatggcctagtatgtggttgtaaatgttccatctgtgcctgaaaaaatgtatatttctaattcagtagtctctgctttttttttttattttgtaccccatcaataaaatgattttcagcatgtatccccaaataaacaatattttatttattgattgaaaaataaa

SEQ ID NO: 349887 - DNA, 2684 bp, Homo sapiens
tctcgaaaaggcactctgtcacgtgtacacaggaaagggccctgacaagaggatgggactgcagttgtggctgccagggccccggccagggtgaaaacaaggaacattccagagaagatcacaaggatgcgaataaaatcggagctgcacagggatctttgggctgtaataggaggggacacacaggggttaggggagggtctagcccttggctccctcagcccagccctcctgtcaccttgcctctcccctttcccccaccttattctatcccacccgccaccgttggccaactcctctcctaaacagtggactctgctttttcccctcctcttatccctaatcctaggagctttctgtctggcttccctcctggcccctcgtgtatgcattctctctagcggtggggattaaggagaaaactcacgtggccagtgggtagagagagtccgggcaggcagctgcctgaagtcagccagagtctgcatgtgcccagctgtcctggcctccagcatctctggaaaaacagagacagaatgagtagcagcaggggaccccatagggcacatctgaaggcctgagaggtgctggatgggatgggaaggcagaaacaggctgaccttatctaggggtaggagtggggagtactggttggggtatcaccgctaccccacgtgatggcacagagagttgcctggaacttaccactgacataaggttggagtgcagtggcacgatctcggctcagtgcaacctccgcctcctgagttcaagtgattctcctgcctcagcctccctagtagctgggattacaggacaaggagagggacaaattccttcttggcatccttatggccctgtgacctgctaatgaatgctgactctgagttgctactagaatttggtttccttgtggcttcccaggaattgtgagccatgttggataaggacctgcaagggaagaatgaggaagcctgggacagtgcaggaggggagagcactggtggtagagaggagtgatgacaagggtctccgccaaaagggaaatggaggggttaaagaagctgctggggagggttaaaaacaatgtgttctcactcgtaggtgggaattgaacaatgagaacacttggacacaggaaggggaacatcacacactggggcctgtcgtggggtgtggggagggaggagggatagcattaggagatatacctaatgtaaatgatgagttaatgggtgcagcacaccaacatggcacatgtatacctatgtaacaaacctgcacattgtgtacatgtaccctagaacttaaagtataattaaaaaacaaaacaaaacaaaacaaaaacaatgaggtgctattgttttagtggtgagtatccggagacctgggagttctatttaccaggtataacctgggctcaaaattccaggctgacttcaggcatgtcctcatctcatagatgccagcactaaggcccagagagggcgagctcattcagcccacccatcttctcacccctgactgcatttcccgggggtccttctgcagccaggtgctgctgtggtactttgggatctattggctgagctcccagagaagggtcatggattgggctagtttggaacaagtgaagggactgaagatgggctcagtatggggcgaagaccttcaggaagggtctgcagagtgagtaggggggttttgactaggaaaagttccaaccctgccggggccgctgtcaagagaaaagcatctattacagttacatttttaagttaagtagactgaagaatatttcttgtgtattaaagacgttcctttttggttgatttgcaatggaaaagctttgttttcttttttttttggaaacagggtctcactctgctcactctgtctcccaagctggagtgcagtggtacagtcacggctcactgcagcctccacttcctggactcaagtgatcttctcacttcagccttctgagtagctgggactacagccccctctgcagctcttcatgggggtccactcaagtcagaagccacatctgggtgtgattcagagagctgtttatgcaaaaccagccttgtcaccatcaggcaaggcacctgaattcccaccgcagagagtgctgtggccctgaggacttttctgtcaccagccatttccaggtagacccagtgtaatcacaagcatccttgtaagtggcaaagaggcagaggagacagcgccagagaggcagctgcatgagaaggatcaagatgttgctgactttgaagttggaagaagaaggccatgagcctcagtatgtgggcggcttctagaagctggaaggggcaaggagatggatttgacccttcagcctccaggggcagctgtacctgccatcactgattgtagcctggtgaggcctgttttagacttctgacctgtagagctgtaacataatacatttgggttgttttcaaccactaagtttgtggtaatttgttgtagcagctgtagaaaatgaatacatatgaatcctctggcatttgtttgagatttgctctatggcctagtatgtggttgtaaatgttccatctgtgcctgaaaaaatgtatatttctaattcagtagtctctgctttttttttttattttgtaccccatcaataaaatgattttcagcatgtatcccca

SEQ ID NO: 349888 - DNA, 1996 bp, Homo sapiens
tctcgaaaaggcactctgtcacgtgtacacaggaaagggccctgacaagaggatgggactgcagttgtggctgccagggccccggccagggtgaaaacaaggaacattccagagaagatcacaaggatgcgaataaaatcggagctgcacagggatctttgggctgttggagtgcagtggcacgatctcggctcagtgcaacctccgcctcctgagttcaagtgattctcctgcctcagcctccctagtagctgggattacaggacaaggagagggacaaattccttcttggcatccttatggccctgtgacctgctaatgaatgctgactctgagttgctactagaatttggtttccttgtggcttcccaggaattgtgagccatgttggataaggacctgcaagggaagaatgaggaagcctgggacagtgcaggaggggagagcactggtggtagagaggagtgatgacaagggtctccgccaaaagggaaatggaggggttaaagaagctgctggggagggttaaaaacaatgtgttctcactcgtaggtgggaattgaacaatgagaacacttggacacaggaaggggaacatcacacactggggcctgtcgtggggtgtggggagggaggagggatagcattaggagatatacctaatgtaaatgatgagttaatgggtgcagcacaccaacatggcacatgtatacctatgtaacaaacctgcacattgtgtacatgtaccctagaacttaaagtataattaaaaaacaaaacaaaacaaaacaaaaacaatgaggtgctattgttttagtggtgagtatccggagacctgggagttctatttaccaggtataacctgggctcaaaattccaggctgacttcaggcatgtcctcatctcatagatgccagcactaaggcccagagagggcgagctcattcagcccacccatcttctcacccctgactgcatttcccgggggtccttctgcagccaggtgctgctgtggtactttgggatctattggctgagctcccagagaagggtcatggattgggctagtttggaacaagtgaagggactgaagatgggctcagtatggggcgaagaccttcaggaagggtctgcagagtgagtaggggggttttgactaggaaaagttccaaccctgccggggccgctgtcaagagaaaagcatctattacagttacatttttaagttaagtagactgaagaatatttcttgtgtattaaagacgttcctttttggttgatttgcaatggaaaagctttgttttcttttttttttggaaacagggtctcactctgctcactctgtctcccaagctggagtgcagtggtacagtcacggctcactgcagcctccacttcctggactcaagtgatcttctcacttcagccttctgagtagctgggactacaggtagacccagtgtaatcacaagcatccttgtaagtggcaaagaggcagaggagacagcgccagagaggcagctgcatgagaaggatcaagatgttgctgactttgaagttggaagaagaaggccatgagcctcagtatgtgggcggcttctagaagctggaaggggcaaggagatggatttgacccttcagcctccaggggcagctgtacctgccatcactgattgtagcctggtgaggcctgttttagacttctgacctgtagagctgtaacataatacatttgggttgttttcaaccactaagtttgtggtaatttgttgtagcagctgtagaaaatgaatacatatgaatcctctggcatttgtttgagatttgctctatggcctagtatgtggttgtaaatgttccatctgtgcctgaaaaaatgtatatttctaattcagtagtctctgctttttttttttattttgtaccccatcaataaaatgattttcagcatgtatccccaaataaacaatattttatttattgattgaaaaataaa

SEQ ID NO: 349889 - DNA, 1927 bp, Homo sapiens
tctcgaaaaggcactctgtcacgtgtacacaggaaagggccctgacaagaggatgggactgcagttgtggctgccagagtcttgctttgtcgcccagttggagtgcagtggcacgatctcggctcagtgcaacctccgcctcctgagttcaagtgattctcctgcctcagcctccctagtagctgggattacaggacaaggagagggacaaattccttcttggcatccttatggccctgtgacctgctaatgaatgctgactctgagttgctactagaatttggtttccttgtggcttcccaggaattgtgagccatgttggataaggacctgcaagggaagaatgaggaagcctgggacagtgcaggaggggagagcactggtggtagagaggagtgatgacaagggtctccgccaaaagggaaatggaggggttaaagaagctgctggggagggttaaaaacaatgtgttctcactcgtaggtgggaattgaacaatgagaacacttggacacaggaaggggaacatcacacactggggcctgtcgtggggtgtggggagggaggagggatagcattaggagatatacctaatgtaaatgatgagttaatgggtgcagcacaccaacatggcacatgtatacctatgtaacaaacctgcacattgtgtacatgtaccctagaacttaaagtataattaaaaaacaaaacaaaacaaaacaaaaacaatgaggtgctattgttttagtggtgagtatccggagacctgggagttctatttaccaggtataacctgggctcaaaattccaggctgacttcaggcatgtcctcatctcatagatgccagcactaaggcccagagagggcgagctcattcagcccacccatcttctcacccctgactgcatttcccgggggtccttctgcagccaggtgctgctgtggtactttgggatctattggctgagctcccagagaagggtcatggattgggctagtttggaacaagtgaagggactgaagatgggctcagtatggggcgaagaccttcaggaagggtctgcagagtgagtaggggggttttgactaggaaaagttccaaccctgccggggccgctgtcaagagaaaagcatctattacagttacatttttaagttaagtagactgaagaatatttcttgtgtattaaagacgttcctttttggttgatttgcaatggaaaagctttgttttcttttttttttggaaacagggtctcactctgctcactctgtctcccaagctggagtgcagtggtacagtcacggctcactgcagcctccacttcctggactcaagtgatcttctcacttcagccttctgagtagctgggactacaggtagacccagtgtaatcacaagcatccttgtaagtggcaaagaggcagaggagacagcgccagagaggcagctgcatgagaaggatcaagatgttgctgactttgaagttggaagaagaaggccatgagcctcagtatgtgggcggcttctagaagctggaaggggcaaggagatggatttgacccttcagcctccaggggcagctgtacctgccatcactgattgtagcctggtgaggcctgttttagacttctgacctgtagagctgtaacataatacatttgggttgttttcaaccactaagtttgtggtaatttgttgtagcagctgtagaaaatgaatacatatgaatcctctggcatttgtttgagatttgctctatggcctagtatgtggttgtaaatgttccatctgtgcctgaaaaaatgtatatttctaattcagtagtctctgctttttttttttattttgtaccccatcaataaaatgattttcagcatgtatccccaaataaacaatattttatttattgattgaaaaataaa

SEQ ID NO: 349890 - DNA, 2088 bp, Homo sapiens
acaaaacaaagtatattagggattcccaggggctggggctggggctggggttggttggggggaagaaatggggagtcattgctaaggggtacaagtttctctggggtaacgaaaatgttatagaattagatagtgttgatggctgcacaacctgtggatacactaaaataaataaataataaatagttacttgattacagttacttagcctttattttgtttgtttgttttttgacagagtcttgctttgtcgcccagttggagtgcagtggcacgatctcggctcagtgcaacctccgcctcctgagttcaagtgattctcctgcctcagcctccctagtagctgggattacaggacaaggagagggacaaattccttcttggcatccttatggccctgtgacctgctaatgaatgctgactctgagttgctactagaatttggtttccttgtggcttcccaggaattgtgagccatgttggataaggacctgcaagggaagaatgaggaagcctgggacagtgcaggaggggagagcactggtggtagagaggagtgatgacaagggtctccgccaaaagggaaatggaggggttaaagaagctgctggggagggttaaaaacaatgtgttctcactcgtaggtgggaattgaacaatgagaacacttggacacaggaaggggaacatcacacactggggcctgtcgtggggtgtggggagggaggagggatagcattaggagatatacctaatgtaaatgatgagttaatgggtgcagcacaccaacatggcacatgtatacctatgtaacaaacctgcacattgtgtacatgtaccctagaacttaaagtataattaaaaaacaaaacaaaacaaaacaaaaacaatgaggtgctattgttttagtggtgagtatccggagacctgggagttctatttaccaggtataacctgggctcaaaattccaggctgacttcaggcatgtcctcatctcatagatgccagcactaaggcccagagagggcgagctcattcagcccacccatcttctcacccctgactgcatttcccgggggtccttctgcagccaggtgctgctgtggtactttgggatctattggctgagctcccagagaagggtcatggattgggctagtttggaacaagtgaagggactgaagatgggctcagtatggggcgaagaccttcaggaagggtctgcagagtgagtaggggggttttgactaggaaaagttccaaccctgccggggccgctgtcaagagaaaagcatctattacagttacatttttaagttaagtagactgaagaatatttcttgtgtattaaagacgttcctttttggttgatttgcaatggaaaagctttgttttcttttttttttggaaacagggtctcactctgctcactctgtctcccaagctggagtgcagtggtacagtcacggctcactgcagcctccacttcctggactcaagtgatcttctcacttcagccttctgagtagctgggactacaggtagacccagtgtaatcacaagcatccttgtaagtggcaaagaggcagaggagacagcgccagagaggcagctgcatgagaaggatcaagatgttgctgactttgaagttggaagaagaaggccatgagcctcagtatgtgggcggcttctagaagctggaaggggcaaggagatggatttgacccttcagcctccaggggcagctgtacctgccatcactgattgtagcctggtgaggcctgttttagacttctgacctgtagagctgtaacataatacatttgggttgttttcaaccactaagtttgtggtaatttgttgtagcagctgtagaaaatgaatacatatgaatcctctggcatttgtttgagatttgctctatggcctagtatgtggttgtaaatgttccatctgtgcctgaaaaaatgtatatttctaattcagtagtctctgctttttttttttattttgtaccccatcaataaaatgattttcagcatgtatccccaaataaacaatattttatttattgattgaaaaataaa

SEQ ID NO: 349891 - DNA, 1738 bp, Homo sapiens
tctcgaaaaggcactctgtcacgtgtacacaggaaagggccctgacaagaggatgggactgcagttgtggctgccagggccccggccagggtgaaaacaaggaacattccagagaagatcacaaggatgcgaataaaatcggagctgcacagggatctttgggctgtaataggaggggacacacaggggttaggggagggtctagcccttggctccctcagcccagccctcctgtcaccttgcctctcccctttcccccaccttattctatcccacccgccaccgttggccaactcctctcctaaacagtggactctgctttttcccctcctcttatccctaatcctaggagctttctgtctggcttccctcctggcccctcgtgtatgcattctctctagcggtggggattaaggagaaaactcacgtggccagtgggtagagagagtccgggcaggcagctgcctgaagtcagccagagtctgcatgtgcccagctgtcctggcctccagcatctctggaaaaacagagacagaatgagtagcagcaggggaccccatagggcacatctgaaggcctgagaggtgctggatgggatgggaaggcagaaacaggctgaccttatctaggggtaggagtggggagtactggttggggtatcaccgctaccccacgtgatggcacagagagttgcctggaacttaccactgacataaggttggagtgcagtggcacgatctcggctcagtgcaacctccgcctcctgagttcaagtgattctcctgcctcagcctccctagtagctgggattacaggacaaggagagggacaaattccttcttggcatccttatggccctgtgacctgctaatgaatgctgactctgagttgctactagaatttggtttccttgtggcttcccaggaattggtctcactctgctcactctgtctcccaagctggagtgcagtggtacagtcacggctcactgcagcctccacttcctggactcaagtgatcttctcacttcagccttctgagtagctgggactacagccccctctgcagctcttcatgggggtccactcaagtcagaagccacatctgggtgtgattcagagagctgtttatgcaaaaccagccttgtcaccatcaggcaaggcacctgaattcccaccgcagagagtgctgtggccctgaggacttttctgtcaccagccatttccaggtagacccagtgtaatcacaagcatccttgtaagtggcaaagaggcagaggagacagcgccagagaggcagctgcatgagaaggatcaagatgttgctgactttgaagttggaagaagaaggccatgagcctcagtatgtgggcggcttctagaagctggaaggggcaaggagatggatttgacccttcagcctccaggggcagctgtacctgccatcactgattgtagcctggtgaggcctgttttagacttctgacctgtagagctgtaacataatacatttgggttgttttcaaccactaagtttgtggtaatttgttgtagcagctgtagaaaatgaatacatatgaatcctctggcatttgtttgagatttgctctatggcctagtatgtggttgtaaatgttccatctgtgcctgaaaaaatgtatatttctaattcagtagtctctgctttttttttttattttgtaccccatcaataaaatgattttcagcatgtatcccca

SEQ ID NO: 349892 - DNA, 1828 bp, Homo sapiens
tagtcccagctactcgggaggctgaggcaggagaatggcatgaacccgggaggcggagcttgcagtgagctgagattgtgccactgcactccagcctgggcgacagagtgagactccgtctccaaaaaaaaaaaaaaaaaaaaaaaaaaaaaactcgagactagttctctcctcgtgccgaattcggcacgaggtgacctgctaatgaatgctgactctgagttgctactagaatttggtttccttgtggcttcccaggaattgtgagccatgttggataaggacctgcaagggaagaatgaggaagcctgggacagtgcaggaggggagagcactggtggtagagaggagtgatgacaagggtctccgccaaaagggaaatggaggggttaaagaagctgctggggagggttaacaggaaggggaacatcacacactggggcctgtcgtggggtgtggggagggaggagggatagcattaggagatatacctaatgtaaatgatgagttaatgggtgcagcacaccaacatggcacatgtatacctatgtaacaaacctgcacattgtgtacatgtaccctagaacttaaagtataattaaaaaacaaaacaaaacaaaacaaaaacaatgaggtgctattgttttagtggtgagtatccggagacctgggagttctatttaccaggtataacctgggctcaaaattccaggctgacttcaggcatgtcctcatctcatagatgccagcactaaggcccagagagggcgagctcattcagcccacccatcttctcacccctgactgcatttcccgggggtccttctgcagccaggtgctgctgtggtactttgggatctattggctgagctcccagagaagggtcatggattgggctagtttggaacaagtgaagggactgaagatgggctcagtatggggcgaagaccttcaggaagggtctgcagagtgagtaggggggttttgactaggaaaagttccaaccctgccggggccgctgtcaagagaaaagcatctattacagttacatttttaagttaagtagactgaagaatatttcttgtgtattaaagacgttcctttttggttgatttgcaatggaaaagctttgttttcttttttttttggaaacagggtctcactctgctcactctgtctcccaagctggagtgcagtggtacagtcacggctcactgcagcctccacttcctggactcaagtgatcttctcacttcagccttctgagtagctgggactacaggtagacccagtgtaatcacaagcatccttgtaagtggcaaagaggcagaggagacagcgccagagaggcagctgcatgagaaggatcaagatgttgctgactttgaagttggaagaagaaggccatgagcctcagtatgtgggcggcttctagaagctggaaggggcaaggagatggatttgacccttcagcctccaggggcagctgtacctgccatcactgattgtagcctggtgaggcctgttttagacttctgacctgtagagctgtaacataatacatttgggttgttttcaaccactaagtttgtggtaatttgttgtagcagctgtagaaaatgaatacatatgaatcctctggcatttgtttgagatttgctctatggcctagtatgtggttgtaaatgttccatctgtgcctgaaaaaatgtatatttctaattcagtagtctctgctttttttttttattttgtaccccatcaataaaatgattttcagcatgtatccccaaataaacaatattttatttattgattgaaaaataaa

SEQ ID NO: 349893 - DNA, 1209 bp, Homo sapiens
tctcgaaaaggcactctgtcacgtgtacacaggaaagggccctgacaagaggatgggactgcagttgtggctgccagggccccggccagggtgaaaacaaggaacattccagagaagatcacaaggatgcgaataaaatcggagctgcacagggatctttgggctgtaataggaggggacacacaggggttggagtgcagtggcacgatctcggctcagtgcaacctccgcctcctgagttcaagtgattctcctgcctcagcctccctagtagctgggattacaggacaaggagagggacaaattccttcttggcatccttatggccctgtgacctgctaatgaatgctgactctgagttgctactagaatttggtttccttgtggcttcccaggaattggtctcactctgctcactctgtctcccaagctggagtgcagtggtacagtcacggctcactgcagcctccacttcctggactcaagtgatcttctcacttcagccttctgagtagctgggactacagccccctctgcagctcttcatgggggtccactcaagtcagaagccacatctgggtgtgattcagagagctgtttatgcaaaaccagccttgtcaccatcaggcaaggcacctgaattcccaccgcagagagtgctgtggccctgaggacttttctgtcaccagccatttccaggtagacccagtgtaatcacaagcatccttgtaagtggcaaagaggcagaggagacagcgccagagaggcagctgcatgagaaggatcaagatgttgctgactttgaagttggaagaagaaggccatgagcctcagtatgtgggcggcttctagaagctggaaggggcaaggagatggatttgacccttcagcctccaggggcagctgtacctgccatcactgattgtagcctggtgaggcctgttttagacttctgacctgtagagctgtaacataatacatttgggttgttttcaaccactaagtttgtggtaatttgttgtagcagctgtagaaaatgaatacatatgaatcctctggcatttgtttgagatttgctctatggcctagtatgtggttgtaaatgttccatctgtgcctgaaaaaatgtatatttctaattcagtagtctctgctttttttttttattttgtaccccatcaataaaatgattttcagcatgtatcccca

SEQ ID NO: 349894 - DNA, 1186 bp, Homo sapiens
tctcgaaaaggcactctgtcacgtgtacacaggaaagggccctgacaagaggatgggactgcagttgtggctgccagggccccggccagggtgaaaacaaggaacattccagagaagatcacaaggatgcgaataaaatcggagctgcacagggatctttgggctgttggagtgcagtggcacgatctcggctcagtgcaacctccgcctcctgagttcaagtgattctcctgcctcagcctccctagtagctgggattacaggacaaggagagggacaaattccttcttggcatccttatggccctgtgacctgctaatgaatgctgactctgagttgctactagaatttggtttccttgtggcttcccaggaattggtctcactctgctcactctgtctcccaagctggagtgcagtggtacagtcacggctcactgcagcctccacttcctggactcaagtgatcttctcacttcagccttctgagtagctgggactacagccccctctgcagctcttcatgggggtccactcaagtcagaagccacatctgggtgtgattcagagagctgtttatgcaaaaccagccttgtcaccatcaggcaaggcacctgaattcccaccgcagagagtgctgtggccctgaggacttttctgtcaccagccatttccaggtagacccagtgtaatcacaagcatccttgtaagtggcaaagaggcagaggagacagcgccagagaggcagctgcatgagaaggatcaagatgttgctgactttgaagttggaagaagaaggccatgagcctcagtatgtgggcggcttctagaagctggaaggggcaaggagatggatttgacccttcagcctccaggggcagctgtacctgccatcactgattgtagcctggtgaggcctgttttagacttctgacctgtagagctgtaacataatacatttgggttgttttcaaccactaagtttgtggtaatttgttgtagcagctgtagaaaatgaatacatatgaatcctctggcatttgtttgagatttgctctatggcctagtatgtggttgtaaatgttccatctgtgcctgaaaaaatgtatatttctaattcagtagtctctgctttttttttttattttgtaccccatcaataaaatgattttcagcatgtatcccca

SEQ ID NO: 349895 - DNA, 1036 bp, Homo sapiens
  misc_feature (944)..(944): n is a, c, g, or t
  misc_feature (954)..(954): n is a, c, g, or t
  misc_feature (956)..(956): n is a, c, g, or t
  misc_feature (972)..(972): n is a, c, g, or t
  misc_feature (974)..(974): n is a, c, g, or t
  misc_feature (984)..(985): n is a, c, g, or t
tctcgaaaaggcactctgtcacgtgtacacaggaaagggccctgacaagaggatgggactgcagttgtggctgccagggccccggccagggtgaaaacaaggaacattccagagaagatcacaaggatgcgaataaaatcggagctgcacagggatctttgggctgtaataggaggggacacacaggggttaggggagggtctagcccttggctccctcagcccagccctcctgtcaccttgcctctcccctttcccccaccttattctatcccacccgccaccgttggccaactcctctcctaaacagtggactctgctttttcccctcctcttatccctaatcctaggagctttctgtctggcttccctcctggcccctcgtgtatgcattctctctagcggtggggattaaggagaaaactcacgtggccagtgggtagagagagtccgggcaggcagctgcctgaagtcagccagagtctgcatgtgcccagctgtcctggcctccagcatctctggaaaaacagagacagaatgagtagcagcaggggaccccatagggcacatctgaaggcctgagaggtgctggatgggatgggaaggcagaaacaggctgaccttatctaggggtaggagtggggagtactggttggggtatcaccgctaccccacgtgatggcacagagagttgcctggaacttaccactgacataaggttggagtgcagtggcacgatctcggctcagtgcaacctccgcctcctgagttcaagtgattctcctgcctcagcctccctagtagctgggattacaggacaaggagagggacaaattccttcttggcatccttatggccctgtgacctgctaatgaatgctgactctgagttgctactagaatttggtttccttgtggcttcccaggaattggtctcctctgctcntctgtctccngnctgagtgcgggtcagncncggtcactgnnctcccttctggactcatgacctctccttcgctctgttccggacacggtgcc

SEQ ID NO: 349896 - DNA, 915 bp, Homo sapiens
  misc_feature (878)..(878): n is a, c, g, or t
  misc_feature (880)..(880): n is a, c, g, or t
tctcgaaaaggcactctgtcacgtgtacacaggaaagggccctgacaagaggatgggactgcagttgtggctgccagggccccggccagggtgaaaacaaggaacattccagagaagatcacaaggatgcgaataaaatcggagctgcacagggatctttgggctgtaataggaggggacacacaggggttaggggagggtctagcccttggctccctcagcccagccctcctgtcaccttgcctctcccctttcccccaccttattctatcccacccgccaccgttggccaactcctctcctaaacagtggactctgctttttcccctcctcttatccctaatcctaggagctttctgtctggcttccctcctggcccctcgtgtatgcattctctctagcggtggggattaaggagaaaactcacgtggccagtgggtagagagagtccgggcaggcagctgcctgaagtcagccagagtctgcatgtgcccagctgtcctggcctccagcatctctggaaaaacagagacagaatgagtagcagcaggggaccccatagggcacatctgaaggcctgagaggtgctggatgggatgggaaggcagaaacaggctgaccttatctaggggtaggagtggggagtactggttggggtatcaccgctaccccacgtgatggcacagagagttgcctggaacttaccactgacataagagtcttgctttgtcgcccagttggagtgcagtggcacgatctcggctcagtgcaacctccgcctcctgagttcaagtgattctcctgcctcagcctccctagtagctgggattacaggacaagaaaggacaatcttctgatctatgcctggactgtatatntnttagtgtctaattgtctggtcagatgacttgtagc

SEQ ID NO: 349897 - DNA, 382 bp, Homo sapiens
tgggctgggctcgctggcggctggtttgagaggagggtgattcagaggaaggcagtgacacccagatgtgggacaggctgcaagaaagcctggtgggccttagggcagacacttgtggggacccggggagccctaggtgccctgacaggtggaagaggggtgcagaaagggaggatgtcaaagagagaatgtcaaaggtcataaccaaacctaacaattttcttctacttatgccttttgtcaggacaaggagagggacaaattccttcttggcatccttatggccctgtgacctgctaatgaatgctgactctgagttgctactagaatttggtttccttgtggcttcccaggaattgtgagccatgttggataaggacct

SEQ ID NO: 349898 - DNA, 776 bp, Homo sapiens
tgcagttggcggataattgcagctttctttcattccctacatgagttcaaatggcagcaaacaaactaggagaacgcagaccttctgacttcctgagggtccagaatccagactgaggctcttgcttcatgccagtgcccctctgcacattttccatacaaactcctaaatcccatccggttccttcgccaacatccacttcaaagtaacgtcttcctgaggtgaagccttcacaacccaagacacaggggaaggcagtaaatctcctggaagatgtgtcctgattctcctgggtgtatccacgagtcacttgtctccgatcctcagagagaattagttcgtgatgagctgtatctggatccagagtcacactaactgcaaaacaaaacaaaacaaacaaaaataattttgttgctgtgaagaacacaggttattttattttattttattttgagatggagtgttgctgtcacccaggctggagtgcactggcactatctcaactcactgcaacctccacctcctggattcaggcaattctcctgcctcagcctccggagtaactgcgactacaggtgcgcaccaccacaagtggctaatttttttaaattttctgtagagatggggtttcgccatgttggccaggctggtctcaaactcctgacctgaagtgttccacccacctcggcctcccaaagtgctggattacacaggtgtgagccaccatgcccagccacaagttattttcaataaaaccagcctgtgttcaaacccaa

SEQ ID NO: 349899 - DNA, 377 bp, Homo sapiens
ttttttaattctaaattttgctgtgtttttgacaagtaaaagtaaacaataatacttagataaagttatcatagttttaaaaatatctttaaatccaaaaataatagagattcacaaataaattgaatgttaatattagaagaatttctaacactattcacttagacaggattaaacaactattcacaacacacctacacaacaaatacacaagttataacaaaaatacatggataggctgggtgcagtggctcatgtctgtaatccaagcactttgggaggaaggcggatcacgagatcaggagttcgagaccagcctgaccaacatggagaaaccccatctctactaaaaatacaaaattagccaggcgtcgtgc

SEQ ID NO: 349900 - DNA, 98 bp, Homo sapiens
agggtaagttatttctatataataatattaacttctgatttgtaggagtggctgtaattttgaattattaatttagtgttcttccatagtgtcagttt

SEQ ID NO: 349901 - DNA, 413 bp, Homo sapiens
acagatttctttattatgaggttatgttttccctcttggcacccagtaagtactttgtaagttgatactttggcattgtaagaatatccagttcattatgaccttccacctcttggctcagtctgctcaaaagttattattgagggccaggcacagtggctcacacctataatcccagtactttgggaggccgaggtaggcagatcacttgaggccaggaattcaagaccagcctgggcaacgtggtgaaatcctgactgtatagaaaaaaaaaagaccaaaaattagccaggtatggtggtgtacacctttagttccagctactcaagatactaagttgggagaatcacttgagaagtctaggatgcagtgaactgtgattgcgtcactgtacttcagccttggcaatagag

SEQ ID NO: 349902 - DNA, 982 bp, Homo sapiens
tataaaggctcaggcatatgtaaggcacagagggagtgacggccaacctgggaattagactaaggtttctttcctctctgtgccttgatagagaatccacctcagttccagaacttgcatcagaaacagggtcctcttcccacaccccacttctcggggagggctcaagccgcatctgcctctggaagcagatatccgtgactattatgactccttggaaggcagccaggcatgagcctgtggcttacattccttaatgctcaagcacattccttcgtgttcaagtatacgtgtggttggctcgagcacagaagcacagagctgagcaaaatattcagcgcctttttcagagaaccctggctggtgctggtggatgttcctgccccttcctccaccatgaacatttttaaaaattaagggagaaacaggaaaactttgaagaatcttccagatttgcctaacgcagatgtgcatgacctgacaagatagatgtgccatttggaccctttcaagagcagacagaatggaagggaggctggagtgcaatggtgtgatctctgctcctgcaacctgcgcctcctgagttcaagcgattctcctgcctcagcctcccaagttgctgggattacaggggcccgccaccacgcccagctaattttgttattttcagtagagatggggtttcatcatgttggccaggctagtcttgaactcctgacctcaggcgatccgcccgcctcggctcccaaagtgctgggattacaggtgtgagccactgcacctgcccaaggactaaggttttctatttcttattgtgtcagttaggttgtatttttctgtgaatctgttcatttcaccaaattttcaagtttgttggcttaaagttttcgataatatactcttatttgtggtgaagtcccttttttatttcttgtatttgttatttgtgccttcttttcttttttttttttccttttctttt

SEQ ID NO: 349903 - DNA, 619 bp, Homo sapiens
cctcccaaaatgctgggattacaggcatgaactgctgtacccggcctggttgttgcattttaatgtactgagccaagcaccaggctccagggacactgctactaggtggcctgtccttggctctgatgcaggcgcttccaggaagaatgggctgcagctctgtgcagcctgcctgtgctgggccaatgtcagctccccttgctcgaacaggattggccagaacacgccctgtgcctgcgagcagccttgaatgccactggggatttgaggtttaggcgtcccgttccttgagcaggaacctctgcagaaaggcaattagaagaacaaagtgccctctccctgacggtctgtctccctcacaccaaaaaggaaggtgaagcttcctttttaaggagacccctttttaagaaccatgcacctgcccaaggactaaggttttctatttcttattgtgtcagttaggttgtatttttctgtgaatctgttcatttcaccaaattttcaagtttgttggcttaaagttttcgataatatactcttatttgtggtgaagtcccttttttatttcttgtatttgttatttgtgccttcttttcttttttttttttccttttctttt

SEQ ID NO: 349904 - DNA, 463 bp, Homo sapiens
tccttggaaggcagccaggcatgagcctgtggcttacattccttaatgctcaagcacattccttcgtgttcaagtatacgtgtggttggctcgagcacagaagcacagagctgagcaaaatattcagcgcctttttcagagaaccctggctggtgctggtggatgttcctgccccttcctccaccatgaacatttttaaaaattaaggtgagtctgggcacagtagctcatgcctgtaatcccagcactttaggaggctgagatgggaagatcccttgagcccagaagtttgagaccagcctgggcaacacagtgagaccccatctctacaaaaactaaaaaattagccaggcagggcatcgtgtgcctgtagccccagctactcagcagtctgaggtaggaggatcacttgagcccaggaagttgaggcttcagtgagccatgtttgtgacgctgcactcca

SEQ ID NO: 349905 - DNA, 9570 bp, Homo sapiens
  misc_feature (3767)..(3767): n is a, c, g, or t
  misc_feature (5593)..(5593): n is a, c, g, or t
  misc_feature (8473)..(8473): n is a, c, g, or t
cacaggtggacctgtttaagcgccgcgtggtgcggagactggcatccctcaagacacggcgctgccggctgaacagggcagcgcagggcctcccagatccgggtactgagacctgtgcggtgtgcctggactacttctgcaacaaacagtggctccgggtgctgccctgtaagcacgagtttcaccgagactgtgtggacccctggctgatgctccagcagacctgcccactgtgcaaattcaacgtcctggggaaccgctactccgatgattagctgcccagctggactctgcacatggggatggacccttcctgcctgcaccccggtcctcagcctgggctcccaggacaggacaggatgggacagcaggatagacaggacagcaagcccagtgggtgggaggaaggatgagggccccaccatgtccacactgggaaggagggccccacagcttcagactgaggatctagggctgggacctgtcagtcaaggaagagaggtcactttgggaccttctctgcaatcctgtgacgtgagtctgccctccttacaggcagctcccaggtcaataaggaaagagaatatggggccagtgtagctgtcgccagggttctgggagctccctgtggcctgtctgggaattcctgggggctgagactacagtggccaggttttgtgcttatttattggggggtgggttgagggaagagctatctggccttggggtaccctggcctgaccgtctttcaggatacttcttgtcaaggctgtctgcctgttgcctttggtcctcaagcactgggagccatgggtcccactgcctgtccagcctggctcccttcctgggcctggctaggaccaaaggttttagaaaccgtcctgttctggaatccttggctgcggctttgtgttgctgaccgggatactcgaaaccccaggatcaatgtggtgcctcatccaggggcatcctttttttttttttttttttttttaaagagttggagtagggaaggtttaatagtaaaataaacgtggctatattttaacataagatgtaaaatgtgtataggtgttttaagattttaaaaagttaccttaggttctactgcctgtggtagatggaattctaagatggcccccaaggtctcccactaccacctgccgtgaacatgccttgcattaatataatttctggaactgggactcagagggattttatttatttattttatttttatttcttgagatggagtttcactcttgttgcccaggctggagtgcaatggcgtgatctcgcctcactgcaacctccgcctcccgggttcaagcaattctcctgtctcagcctcccaagtagctgggattacagacatgcgccaccacgcccggctaattttgtatttttagtagagacggggtttctccatgttggtcaggctggtctcgaactcccgatctcaggtgatccgcctgcctcggcctcccaaagtgctgggattacagacgtgagccactgcgcctggcttctcaaagggattttatgcccatggttgggttctgtcttatagcaagctgacctgaagatagggaaagtatttgagtgtgagccttgccctaaccacatgagcctattcaaagtagttttctgctggtagaagaggaggaagtcagggatttgaagcatgtgggggattcagcacatgagaaatcctctgttgttgacttgaagatggagggagccccatggcaaggaaggtggacggcctctaggagccgtgagaggacctggcttacagccagccagcgaggacatggggacctcagtcccacagccgcaaggatcggaattctgccaacaagtggagcttggaagccaattcttccccagaaccggcagaaaggaacgcaacctggtagatgcctcaatttcagccctctgggacccggagcaaaaaaacccagccacacagaacctggacttctgactgccagaactgggagctaatgaatacatggcacggagttggtgggcgcctgagagagctactcagctgtgaggtccttcccctggacttgagcacaggccttctggctcagggtgctgagggatggtgctcccctgtgaggggggtgcccggggcaccccagcctccctcaggaactcccaggcccctcagaagcaggaagttgggctgaccaaagctgtggtagctcagctatatacatggcccctcttgacccttctctgtgaactgaggtgctctacctgacggcctcttcaccaagggaaaatgcttcaggcatttgggagcgtgcgccctgagaaggcctcagcaagtttttggagattgtccttcacagaaacggggtcccattatattgtccaggctggtctcaaactcctgggctcgagtgatctgcccgcctcagcctctcaaattgttgggattacaggcatgagccgccgcacccggcctgacgaggcttcttgctgcacttaaaggaatgacagctatagagggcatatgggactggaaggcatcggatccataacatcctcacgccttctggaaatgtgaaaaatgtttcacaaaagcacagcctaaggcctcatgtgatgaggtgggctctccacaagttcccggggcagagtctgaagacctgctgctggataggggcttcctcctggtccccaagggcccgccctctcaggcccaccttgaggccaccctgctgggccacttcccggattttggacagcattgattggagccgcccgttctcctcctgtaggacccggatgcggatgtcgttggcctgcacttgcctctccatgtgatctgtgacgttgccagagtctgtgggacatgttatctgggattccacgctgctggatctgcctcctgtgcccaatgggacaggaccttagaagggaggcacaccagcttgggcaggtggcctggaggcacaaaggagctgtgtagtgcaccaggcctcctagctcatcttccttctcccgaggccttattcccccttccctgtcccccaacctgcagggaagatgaccatagtattataaaatctgagagctgggtgggacctagagctctcaaaagacttagcaaggccgggcgcggtggctcacgcctgtaatcccagcactttgggaggcccaggtcaggggatcattaagtcaagagatcaagaccatcctggccaacatggtgaaaccccgtctctactaaaaatagaaaaatgagctgggtgtggtggcgggcccccgtagtcccagctactcaggaggctgaggcaggagaatcacttgaacccaggaggtggaggttgcagtgagcagagattgtgccactgcactccagcctggcaacagagtgagactctgtctcaaaaaaaaaaaaaaaaaaaaagacttagcaaataagcatgagaggagagtgaatctctgacaaggccccccgttttggacaggctacagccaaagtgagctgtccaaggtcacacggccagctcaagcttgggaacggcaggaattccgccaggctgctcttcccctgcttttgtgatggatgcttccttctggctccaggagcccgggagaattgctgccccttctggttcagtttcctgctatgggaaatagctatggggctatgacctgcctcacaaggtggttgagaaggggacagaagggcctggatgatgtctcacgagcagctaactgcacatcttcctgccagctctgcaaanggatttgccctagtgctttaggggtctggaggggctgggagaacccaggtcacctgatatccaatcctgtgccaagatgggtacctagcactcctatgccatggggtccaggacagtgggcagctggaggctgtgtccttgggactagtcccatggtgtggtttggggacccattccaagaaccaagaagggggacacacagaagtcgagcaagaattagcatgtgacgtagtgaagagcacaggctgtggggacaaccagacctgtgtctgcgtttggctgttgtgactagaggcagtcacatcactgttgggctttcacgtccctgtctatgcagagtggatgacgcatgaagcacttgcgtgctgtggtgggtccacaggggctgcgctgctggccgcctggctttaacacccttgctgcaggctagggagctgcagtccccagtgtcctgcccacacgagccctcagctgctggccctgagccccagcatgcccttggcaccatccccagtcccctaccatggatctgggtctcggtgggcctgtgcaggtctgggaaggccaccagcagccgctcccgctccttcagctcctccagctcccgttctagctccaggatggttagccgcaggtccgtagtcgcctgctccaggccttgcttctccctctgcaggctctgcagcagctcctgggacagacggaggctcaggcctggctcctgagtgagctacatggtactcagcgccctggggcaccgtccctacccaagaaaagacatgggacaggcctgcaggcactcagttggccggagacttctctggcaaaaaggaagacccccaccctcacctgctgggccctgagctggcattgcccctgctcccgctcgctctgcagctgctcctccacgcgggcccgctgggcctcagcctcgtccaggctgccccgcagctcctcacgttcctggtccaggctgtccagctgctttagcagggctcgctgcttggcctgcagagactaagcaggaacggacaagcagggaggctgtgagacccacagggctaggcccagccatgtggaactaaggaggctacagcatctactacccctcggctgctacccccctggggtgtgtgtctgtgtctagggaatgctggtcacatgcgtggaagggtaggggtcgggggaagctggcagcaggcagatgcacaccggacctggtcaaggccaggatcccagcttgaagaccccggcccttggaacgcagatggctggctctgggggtctcacccccacttccttccagtcatacacagaccccacttggagaggaattctgggaactaagtttttcttctcctcgggtctccagtgtcacatcatcccatgttgctgaagcccacatttcctaacacccactgaatggaaagcaggaagaactaacgctggactgctcggagtcctggctccacctctcactagctgtgtggccttgggcaacttccttaacctcactcaataaggctgtttcctcattcgtaaaatgggggtgacaagagtatctacctcctgttgctgtagcgaggagtaagcatcagaggctgcggcgcctgaagcctgggtcacagcagacacctgatacatggcggctgtgacagtttgcaaggcacagagaacagcacccacttggggtagaaaggcttcccctaccctgggcccatgtctgaccctggggactctcaactgaactcctggctccttgctgagcttttgagggttagacccagccaagacagcccccagacctgcccctttcactaggcaanaggtcacctactccctcaaccacacttctgaggactcctgtgaggccccattgcccagagcacagctatgccccgggccctggctcaccctctgcctgccctgtccttcccctggctgatggactaattgcctgtcatgggcgtccagctcaaaggccacctcctcctagaagccattctggattcccatggcagatgtggccatccctccctgcaccccttagccatctggcaggagagtgtggcacacctgctcatctttgcctgtggggcgctcttccagagtgaggcctcactgggcagtatcagtccctgggtcactgttcccccagtgcctggttcagggtagactctctgtaaaggtgagtcaacccccacacctggaggcatctcagggagcagatgcccaatatagatgatcccccattccctgacagtggagccctctttccctgcagcctacattgcagatgcccaggctagcgagggccctggcctcacctcctggtggcggaccatgctgtcgacacgggccttctccttatccagctccgtgctggcccagcagacctgctggccagcgccctccagccgacccaccaacagctgcacctgcgcctccaactgctgcacctgctcctccagctgctgcacctgcctctccgctgccgccctgcgctcaccttcctcctgcagctgctgggcctttgcctctgcagcattaagtggacatgggatggggtagggcaggggagcgctgtactacctcagacctaggacgggagctcacatcccatctctgggcctcagagtcctcagccacaaaatggggctctagaccccacctgaggtgggtttggaaaatagaaggcgctttctcggtaggaggtggcaacccagtttggtcatcgccaatagtgtggttggtcaggcccaccctcctgtggctggttcccttcaactttgccctggatgctcaggggacagagatggacgatgctcatccagccacacccctggcttgagatgtggcatgggggcctatgatggggctccttacccacagcctgtgtggactcccgctgctgtttcagttctctctccagggtggccatctttgtctttaggtcacttgtttctatggcagccaagagagaggcccttcagagggtcccatggacctggccggcggccttcatgcccagtgtgccccgtggagtggaggcagcccatcgcctgcagaggggccgcctgcggccatgggaggagctctagggaggctggtggaagcggctgggcccttacccaccctgcttctcatgggctggctgccatgtgtctacacctctctgggccttggtgtcgtccatggaggcaactgtgatgaggctcagaaagggcaaatccctcaggcctcccatcagtgggcactggccatcttctggtgccaggaactttgtctctaatggcttttgccacaaccagagaggctgctctgcttggctggaagtgccaggggaataactctctggaagtagccctcaatgactgacagtgcaagtggatacatacctcggttccctcactgaccgatggacgagtctgggcaagcgtcctagcccagctcctggtggccccagtgggactgagatcacagtgtcaccaccggatgaacacccccttccttgctgccctcccttccctgcctcttgcctgtgtcccagcctgggttcttccacacaaaccacttgccctggaagccctgtctcacaaacatccatgcaaaggctgtggcagagcccctgggcaccaggcgtctggcctctggggcacagacctgtgagcagctgctgtttgtcgtgctcccactcagacaggcactgctcatcctcctccgcctgtcgccgccgtgccccctgctcctgtttcagcgcctgctccagcttgcccgcctgcttcctcaggccatccttctgcccttcagcctcctccagctgggccctgagggcctccacatgcttactgaggcgcgtcaggtctttcctctgctctgctgcccagcggcccacggtggcagccggcagtggcctgagccccatgctgtcctgcaccagttgctggaactggcctaaggacgagggcaggttctggctctgacacaggctgatgaccaccttgcccaccttctgcaggcttccctggacgctggcgcatgcgtcacagggcaccagggccgtctcaatggtctgggagtggacactcctggtgttcttgaaggtcgtggctgggaactgcagggaggctctgacagggatgctctctggctcttggcaggtctggggcaagcctagcactggggaggagggcttgattaacttggtagtcagatattcagggctcctggctggctcgcccttggtggtgggcttggaggtgggagtctccctttggtttgcccctttctgtgttcagaaaaagacaagggaaagcaggtgagggagagagtagagagggaggtgactggttccctgggggatgttctgtgacagtgtgacagccttgcctgacactcagaccctcaaatgttctctgacaccgacgtgaataagagagaactttctccctctgttactctgactcagcttactacagccaggtctcctctctgcggcccgcaccccaagctccaggcttgatctgattgtatgcatggtgttgggaaggtgatggtgacggtcacagctgctggttactgggctcttgcttactggacctgcctgctcttgtgtcaccataaccactctcagttttagtttccttcccatcatgggaacagtggttcttccccagtgggtggttgtgtggattacgggatagccnataacaaacaggggtcacatgacctccgttgtatagatgaagaaactgcggttcaaagtaggcaagatttttccaaagtcccacagggatgtcagagccagggagcaaggcatgatccccaaggcctgcgttcttaaccgccacactgtgtggggcttgattgggagggcggtgggagccagtaaaggctgtggtgcacatagtggtaggctaggaagccagagctggggcgaggtgtgaaggccaccacagtggggagatagaggctgaggctgacccacctgagacagaggctgggacccacctgggggagtggctgctggtggagcgtgcccagcctcagcaggctgtcccagaagcgccgcaccgtgagccccacggacatgcagggccccgcagcctgtgcagggggcatcatctgctctgagccaaggttctccaagtagctcatacagctttgaagcagcagcaggagcctgcgggcagagatgctaggttgctggggcccaggctggtgctaacataccctcagaccatacaaccgcagctctggctctggggaactggcccaggcatcaagagcttggagagtctcagaatatgctctgctgggccagcttcaaacctaacccaggggctacttcctcagggaagccctccctggccacagcctcagcttgggagcctcttctgtgtctcctgggtggcacttctgcctggctcttctccactggaccagggagctctgtgaagccaggcctggccttgcctcagttgtatcctgagtccttgaaaagttctgggtgaatggctgccttatatccagtggcccggagcctccacttgatagatgacagagctgagacccagagaggggaagagcttgcccacagacacacattgatagggcagagcagggagtgtgcacagtctcctgaggctagtcaggggcttctgcagggtgagctgcttctgtgacagtggagacctgtgtcaagacagctaggtctctgtcctaacctccaagtttaaaactacagtcaggcatgaattgtaagaaaaaggagtattataataaaaagctaagtttgcatttg

SEQ ID NO: 349906 - DNA, 8568 bp, Homo sapiens
  misc_feature (2765)..(2765): n is a, c, g, or t
  misc_feature (4591)..(4591): n is a, c, g, or t
  misc_feature (7471)..(7471): n is a, c, g, or t
tatgagggggggggtgggagggggggtataggtatatattacaaaccgaagctcctcactattttccgactacctggggccatgtccccgggggccccaagccagacgttcccagccgcgttaaccccgcgcctgcttatcccccttgggcctggcagaaacgggacggtaagtggcctcgggatactttgccgcccccctttttttttgggattttatttatttattttatttttatttcttgagatggagtttcactcttgttgcccaggctggagtgcaatggcgtgatctcgcctcactgcaacctccgcctcccgggttcaagcaattctcctgtctcagcctcccaagtagctgggattacagacatgcgccaccacgcccggctaattttgtatttttagtagagacggggtttctccatgttggtcaggctggtctcgaactcccgatctcaggtgatccgcctgcctcggcctcccaaagtgctgggattacagacgtgagccactgcgcctggcttctcaaagggattttatgcccatggttgggttctgtcttatagcaagctgacctgaagatagggaaagtatttgagtgtgagccttgccctaaccacatgagcctattcaaagtagttttctgctggtagaagaggaggaagtcagggatttgaagcatgtgggggattcagcacatgagaaatcctctgttgttgacttgaagatggagggagccccatggcaaggaaggtggacggcctctaggagccgtgagaggacctggcttacagccagccagcgaggacatggggacctcagtcccacagccgcaaggatcggaattctgccaacaagtggagcttggaagccaattcttccccagaaccggcagaaaggaacgcaacctggtagatgcctcaatttcagccctctgggacccggagcaaaaaaacccagccacacagaacctggacttctgactgccagaactgggagctaatgaatacatggcacggagttggtgggcgcctgagagagctactcagctgtgaggtccttcccctggacttgagcacaggccttctggctcagggtgctgagggatggtgctcccctgtgaggggggtgcccggggcaccccagcctccctcaggaactcccaggcccctcagaagcaggaagttgggctgaccaaagctgtggtagctcagctatatacatggcccctcttgacccttctctgtgaactgaggtgctctacctgacggcctcttcaccaagggaaaatgcttcaggcatttgggagcgtgcgccctgagaaggcctcagcaagtttttggagattgtccttcacagaaacggggtcccattatattgtccaggctggtctcaaactcctgggctcgagtgatctgcccgcctcagcctctcaaattgttgggattacaggcatgagccgccgcacccggcctgacgaggcttcttgctgcacttaaaggaatgacagctatagagggcatatgggactggaaggcatcggatccataacatcctcacgccttctggaaatgtgaaaaatgtttcacaaaagcacagcctaaggcctcatgtgatgaggtgggctctccacaagttcccggggcagagtctgaagacctgctgctggataggggcttcctcctggtccccaagggcccgccctctcaggcccaccttgaggccaccctgctgggccacttcccggattttggacagcattgattggagccgcccgttctcctcctgtaggacccggatgcggatgtcgttggcctgcacttgcctctccatgtgatctgtgacgttgccagagtctgtgggacatgttatctgggattccacgctgctggatctgcctcctgtgcccaatgggacaggaccttagaagggaggcacaccagcttgggcaggtggcctggaggcacaaaggagctgtgtagtgcaccaggcctcctagctcatcttccttctcccgaggccttattcccccttccctgtcccccaacctgcagggaagatgaccatagtattataaaatctgagagctgggtgggacctagagctctcaaaagacttagcaaggccgggcgcggtggctcacgcctgtaatcccagcactttgggaggcccaggtcaggggatcattaagtcaagagatcaagaccatcctggccaacatggtgaaaccccgtctctactaaaaatagaaaaatgagctgggtgtggtggcgggcccccgtagtcccagctactcaggaggctgaggcaggagaatcacttgaacccaggaggtggaggttgcagtgagcagagattgtgccactgcactccagcctggcaacagagtgagactctgtctcaaaaaaaaaaaaaaaaaaaaagacttagcaaataagcatgagaggagagtgaatctctgacaaggccccccgttttggacaggctacagccaaagtgagctgtccaaggtcacacggccagctcaagcttgggaacggcaggaattccgccaggctgctcttcccctgcttttgtgatggatgcttccttctggctccaggagcccgggagaattgctgccccttctggttcagtttcctgctatgggaaatagctatggggctatgacctgcctcacaaggtggttgagaaggggacagaagggcctggatgatgtctcacgagcagctaactgcacatcttcctgccagctctgcaaanggatttgccctagtgctttaggggtctggaggggctgggagaacccaggtcacctgatatccaatcctgtgccaagatgggtacctagcactcctatgccatggggtccaggacagtgggcagctggaggctgtgtccttgggactagtcccatggtgtggtttggggacccattccaagaaccaagaagggggacacacagaagtcgagcaagaattagcatgtgacgtagtgaagagcacaggctgtggggacaaccagacctgtgtctgcgtttggctgttgtgactagaggcagtcacatcactgttgggctttcacgtccctgtctatgcagagtggatgacgcatgaagcacttgcgtgctgtggtgggtccacaggggctgcgctgctggccgcctggctttaacacccttgctgcaggctagggagctgcagtccccagtgtcctgcccacacgagccctcagctgctggccctgagccccagcatgcccttggcaccatccccagtcccctaccatggatctgggtctcggtgggcctgtgcaggtctgggaaggccaccagcagccgctcccgctccttcagctcctccagctcccgttctagctccaggatggttagccgcaggtccgtagtcgcctgctccaggccttgcttctccctctgcaggctctgcagcagctcctgggacagacggaggctcaggcctggctcctgagtgagctacatggtactcagcgccctggggcaccgtccctacccaagaaaagacatgggacaggcctgcaggcactcagttggccggagacttctctggcaaaaaggaagacccccaccctcacctgctgggccctgagctggcattgcccctgctcccgctcgctctgcagctgctcctccacgcgggcccgctgggcctcagcctcgtccaggctgccccgcagctcctcacgttcctggtccaggctgtccagctgctttagcagggctcgctgcttggcctgcagagactaagcaggaacggacaagcagggaggctgtgagacccacagggctaggcccagccatgtggaactaaggaggctacagcatctactacccctcggctgctacccccctggggtgtgtgtctgtgtctagggaatgctggtcacatgcgtggaagggtaggggtcgggggaagctggcagcaggcagatgcacaccggacctggtcaaggccaggatcccagcttgaagaccccggcccttggaacgcagatggctggctctgggggtctcacccccacttccttccagtcatacacagaccccacttggagaggaattctgggaactaagtttttcttctcctcgggtctccagtgtcacatcatcccatgttgctgaagcccacatttcctaacacccactgaatggaaagcaggaagaactaacgctggactgctcggagtcctggctccacctctcactagctgtgtggccttgggcaacttccttaacctcactcaataaggctgtttcctcattcgtaaaatgggggtgacaagagtatctacctcctgttgctgtagcgaggagtaagcatcagaggctgcggcgcctgaagcctgggtcacagcagacacctgatacatggcggctgtgacagtttgcaaggcacagagaacagcacccacttggggtagaaaggcttcccctaccctgggcccatgtctgaccctggggactctcaactgaactcctggctccttgctgagcttttgagggttagacccagccaagacagcccccagacctgcccctttcactaggcaanaggtcacctactccctcaaccacacttctgaggactcctgtgaggccccattgcccagagcacagctatgccccgggccctggctcaccctctgcctgccctgtccttcccctggctgatggactaattgcctgtcatgggcgtccagctcaaaggccacctcctcctagaagccattctggattcccatggcagatgtggccatccctccctgcaccccttagccatctggcaggagagtgtggcacacctgctcatctttgcctgtggggcgctcttccagagtgaggcctcactgggcagtatcagtccctgggtcactgttcccccagtgcctggttcagggtagactctctgtaaaggtgagtcaacccccacacctggaggcatctcagggagcagatgcccaatatagatgatcccccattccctgacagtggagccctctttccctgcagcctacattgcagatgcccaggctagcgagggccctggcctcacctcctggtggcggaccatgctgtcgacacgggccttctccttatccagctccgtgctggcccagcagacctgctggccagcgccctccagccgacccaccaacagctgcacctgcgcctccaactgctgcacctgctcctccagctgctgcacctgcctctccgctgccgccctgcgctcaccttcctcctgcagctgctgggcctttgcctctgcagcattaagtggacatgggatggggtagggcaggggagcgctgtactacctcagacctaggacgggagctcacatcccatctctgggcctcagagtcctcagccacaaaatggggctctagaccccacctgaggtgggtttggaaaatagaaggcgctttctcggtaggaggtggcaacccagtttggtcatcgccaatagtgtggttggtcaggcccaccctcctgtggctggttcccttcaactttgccctggatgctcaggggacagagatggacgatgctcatccagccacacccctggcttgagatgtggcatgggggcctatgatggggctccttacccacagcctgtgtggactcccgctgctgtttcagttctctctccagggtggccatctttgtctttaggtcacttgtttctatggcagccaagagagaggcccttcagagggtcccatggacctggccggcggccttcatgcccagtgtgccccgtggagtggaggcagcccatcgcctgcagaggggccgcctgcggccatgggaggagctctagggaggctggtggaagcggctgggcccttacccaccctgcttctcatgggctggctgccatgtgtctacacctctctgggccttggtgtcgtccatggaggcaactgtgatgaggctcagaaagggcaaatccctcaggcctcccatcagtgggcactggccatcttctggtgccaggaactttgtctctaatggcttttgccacaaccagagaggctgctctgcttggctggaagtgccaggggaataactctctggaagtagccctcaatgactgacagtgcaagtggatacatacctcggttccctcactgaccgatggacgagtctgggcaagcgtcctagcccagctcctggtggccccagtgggactgagatcacagtgtcaccaccggatgaacacccccttccttgctgccctcccttccctgcctcttgcctgtgtcccagcctgggttcttccacacaaaccacttgccctggaagccctgtctcacaaacatccatgcaaaggctgtggcagagcccctgggcaccaggcgtctggcctctggggcacagacctgtgagcagctgctgtttgtcgtgctcccactcagacaggcactgctcatcctcctccgcctgtcgccgccgtgccccctgctcctgtttcagcgcctgctccagcttgcccgcctgcttcctcaggccatccttctgcccttcagcctcctccagctgggccctgagggcctccacatgcttactgaggcgcgtcaggtctttcctctgctctgctgcccagcggcccacggtggcagccggcagtggcctgagccccatgctgtcctgcaccagttgctggaactggcctaaggacgagggcaggttctggctctgacacaggctgatgaccaccttgcccaccttctgcaggcttccctggacgctggcgcatgcgtcacagggcaccagggccgtctcaatggtctgggagtggacactcctggtgttcttgaaggtcgtggctgggaactgcagggaggctctgacagggatgctctctggctcttggcaggtctggggcaagcctagcactggggaggagggcttgattaacttggtagtcagatattcagggctcctggctggctcgcccttggtggtgggcttggaggtgggagtctccctttggtttgcccctttctgtgttcagaaaaagacaagggaaagcaggtgagggagagagtagagagggaggtgactggttccctgggggatgttctgtgacagtgtgacagccttgcctgacactcagaccctcaaatgttctctgacaccgacgtgaataagagagaactttctccctctgttactctgactcagcttactacagccaggtctcctctctgcggcccgcaccccaagctccaggcttgatctgattgtatgcatggtgttgggaaggtgatggtgacggtcacagctgctggttactgggctcttgcttactggacctgcctgctcttgtgtcaccataaccactctcagttttagtttccttcccatcatgggaacagtggttcttccccagtgggtggttgtgtggattacgggatagccnataacaaacaggggtcacatgacctccgttgtatagatgaagaaactgcggttcaaagtaggcaagatttttccaaagtcccacagggatgtcagagccagggagcaaggcatgatccccaaggcctgcgttcttaaccgccacactgtgtggggcttgattgggagggcggtgggagccagtaaaggctgtggtgcacatagtggtaggctaggaagccagagctggggcgaggtgtgaaggccaccacagtggggagatagaggctgaggctgacccacctgagacagaggctgggacccacctgggggagtggctgctggtggagcgtgcccagcctcagcaggctgtcccagaagcgccgcaccgtgagccccacggacatgcagggccccgcagcctgtgcagggggcatcatctgctctgagccaaggttctccaagtagctcatacagctttgaagcagcagcaggagcctgcgggcagagatgctaggttgctggggcccaggctggtgctaacataccctcagaccatacaaccgcagctctggctctggggaactggcccaggcatcaagagcttggagagtctcagaatatgctctgctgggccagcttcaaacctaacccaggggctacttcctcagggaagccctccctggccacagcctcagcttgggagcctcttctgtgtctcctgggtggcacttctgcctggctcttctccactggaccagggagctctgtgaagccaggcctggccttgcctcagttgtatcctgagtccttgaaaagttctgggtgaatggctgccttatatccagtggcccggagcctccacttgatagatgacagagctgagacccagagaggggaagagcttgcccacagacacacattgatagggcagagcagggagtgtgcacagtctcctgaggctagtcaggggcttctgcagggtgagctgcttctgtgacagtggagacctgtgtcaagacagctaggtctctgtcctaacctccaagtttaaaactacagtcaggcatgaattgtaagaaaaaggagtattataataaaaagctaagtttgcatttg

SEQ ID NO: 349907 - DNA, 8091 bp, Homo sapiens
  misc_feature (2288)..(2288): n is a, c, g, or t
  misc_feature (4114)..(4114): n is a, c, g, or t
  misc_feature (6994)..(6994): n is a, c, g, or t
cacaggtggacctgtttaagcgccgcgtggtgcggagactggcatccctcaagacacggcgctgccggctgaacagggcagcgcagggcctcccagatccgggtactgagacctgtgcggtgtgcctggactacttctgcaacaaacagtggctccgggtgctgccctgtaagcacgagtttcaccgagactgtgtggacccctggctgatgctccagcagacctgcccactgtgcaaattcaacgtcctggatggagggagccccatggcaaggaaggtggacggcctctaggagccgtgagaggacctggcttacagccagccagcgaggacatggggacctcagtcccacagccgcaaggatcggaattctgccaacaagtggagcttggaagccaattcttccccagaaccggcagaaaggaacgcaacctggtagatgcctcaatttcagccctctgggacccggagcaaaaaaacccagccacacagaacctggacttctgactgccagaactgggagctaatgaatacatggcacggagttggtgggcgcctgagagagctactcagctgtgaggtccttcccctggacttgagcacaggccttctggctcagggtgctgagggatggtgctcccctgtgaggggggtgcccggggcaccccagcctccctcaggaactcccaggcccctcagaagcaggaagttgggctgaccaaagctgtggtagctcagctatatacatggcccctcttgacccttctctgtgaactgaggtgctctacctgacggcctcttcaccaagggaaaatgcttcaggcatttgggagcgtgcgccctgagaaggcctcagcaagtttttggagattgtccttcacagaaacggggtcccattatattgtccaggctggtctcaaactcctgggctcgagtgatctgcccgcctcagcctctcaaattgttgggattacaggcatgagccgccgcacccggcctgacgaggcttcttgctgcacttaaaggaatgacagctatagagggcatatgggactggaaggcatcggatccataacatcctcacgccttctggaaatgtgaaaaatgtttcacaaaagcacagcctaaggcctcatgtgatgaggtgggctctccacaagttcccggggcagagtctgaagacctgctgctggataggggcttcctcctggtccccaagggcccgccctctcaggcccaccttgaggccaccctgctgggccacttcccggattttggacagcattgattggagccgcccgttctcctcctgtaggacccggatgcggatgtcgttggcctgcacttgcctctccatgtgatctgtgacgttgccagagtctgtgggacatgttatctgggattccacgctgctggatctgcctcctgtgcccaatgggacaggaccttagaagggaggcacaccagcttgggcaggtggcctggaggcacaaaggagctgtgtagtgcaccaggcctcctagctcatcttccttctcccgaggccttattcccccttccctgtcccccaacctgcagggaagatgaccatagtattataaaatctgagagctgggtgggacctagagctctcaaaagacttagcaaggccgggcgcggtggctcacgcctgtaatcccagcactttgggaggcccaggtcaggggatcattaagtcaagagatcaagaccatcctggccaacatggtgaaaccccgtctctactaaaaatagaaaaatgagctgggtgtggtggcgggcccccgtagtcccagctactcaggaggctgaggcaggagaatcacttgaacccaggaggtggaggttgcagtgagcagagattgtgccactgcactccagcctggcaacagagtgagactctgtctcaaaaaaaaaaaaaaaaaaaaagacttagcaaataagcatgagaggagagtgaatctctgacaaggccccccgttttggacaggctacagccaaagtgagctgtccaaggtcacacggccagctcaagcttgggaacggcaggaattccgccaggctgctcttcccctgcttttgtgatggatgcttccttctggctccaggagcccgggagaattgctgccccttctggttcagtttcctgctatgggaaatagctatggggctatgacctgcctcacaaggtggttgagaaggggacagaagggcctggatgatgtctcacgagcagctaactgcacatcttcctgccagctctgcaaanggatttgccctagtgctttaggggtctggaggggctgggagaacccaggtcacctgatatccaatcctgtgccaagatgggtacctagcactcctatgccatggggtccaggacagtgggcagctggaggctgtgtccttgggactagtcccatggtgtggtttggggacccattccaagaaccaagaagggggacacacagaagtcgagcaagaattagcatgtgacgtagtgaagagcacaggctgtggggacaaccagacctgtgtctgcgtttggctgttgtgactagaggcagtcacatcactgttgggctttcacgtccctgtctatgcagagtggatgacgcatgaagcacttgcgtgctgtggtgggtccacaggggctgcgctgctggccgcctggctttaacacccttgctgcaggctagggagctgcagtccccagtgtcctgcccacacgagccctcagctgctggccctgagccccagcatgcccttggcaccatccccagtcccctaccatggatctgggtctcggtgggcctgtgcaggtctgggaaggccaccagcagccgctcccgctccttcagctcctccagctcccgttctagctccaggatggttagccgcaggtccgtagtcgcctgctccaggccttgcttctccctctgcaggctctgcagcagctcctgggacagacggaggctcaggcctggctcctgagtgagctacatggtactcagcgccctggggcaccgtccctacccaagaaaagacatgggacaggcctgcaggcactcagttggccggagacttctctggcaaaaaggaagacccccaccctcacctgctgggccctgagctggcattgcccctgctcccgctcgctctgcagctgctcctccacgcgggcccgctgggcctcagcctcgtccaggctgccccgcagctcctcacgttcctggtccaggctgtccagctgctttagcagggctcgctgcttggcctgcagagactaagcaggaacggacaagcagggaggctgtgagacccacagggctaggcccagccatgtggaactaaggaggctacagcatctactacccctcggctgctacccccctggggtgtgtgtctgtgtctagggaatgctggtcacatgcgtggaagggtaggggtcgggggaagctggcagcaggcagatgcacaccggacctggtcaaggccaggatcccagcttgaagaccccggcccttggaacgcagatggctggctctgggggtctcacccccacttccttccagtcatacacagaccccacttggagaggaattctgggaactaagtttttcttctcctcgggtctccagtgtcacatcatcccatgttgctgaagcccacatttcctaacacccactgaatggaaagcaggaagaactaacgctggactgctcggagtcctggctccacctctcactagctgtgtggccttgggcaacttccttaacctcactcaataaggctgtttcctcattcgtaaaatgggggtgacaagagtatctacctcctgttgctgtagcgaggagtaagcatcagaggctgcggcgcctgaagcctgggtcacagcagacacctgatacatggcggctgtgacagtttgcaaggcacagagaacagcacccacttggggtagaaaggcttcccctaccctgggcccatgtctgaccctggggactctcaactgaactcctggctccttgctgagcttttgagggttagacccagccaagacagcccccagacctgcccctttcactaggcaanaggtcacctactccctcaaccacacttctgaggactcctgtgaggccccattgcccagagcacagctatgccccgggccctggctcaccctctgcctgccctgtccttcccctggctgatggactaattgcctgtcatgggcgtccagctcaaaggccacctcctcctagaagccattctggattcccatggcagatgtggccatccctccctgcaccccttagccatctggcaggagagtgtggcacacctgctcatctttgcctgtggggcgctcttccagagtgaggcctcactgggcagtatcagtccctgggtcactgttcccccagtgcctggttcagggtagactctctgtaaaggtgagtcaacccccacacctggaggcatctcagggagcagatgcccaatatagatgatcccccattccctgacagtggagccctctttccctgcagcctacattgcagatgcccaggctagcgagggccctggcctcacctcctggtggcggaccatgctgtcgacacgggccttctccttatccagctccgtgctggcccagcagacctgctggccagcgccctccagccgacccaccaacagctgcacctgcgcctccaactgctgcacctgctcctccagctgctgcacctgcctctccgctgccgccctgcgctcaccttcctcctgcagctgctgggcctttgcctctgcagcattaagtggacatgggatggggtagggcaggggagcgctgtactacctcagacctaggacgggagctcacatcccatctctgggcctcagagtcctcagccacaaaatggggctctagaccccacctgaggtgggtttggaaaatagaaggcgctttctcggtaggaggtggcaacccagtttggtcatcgccaatagtgtggttggtcaggcccaccctcctgtggctggttcccttcaactttgccctggatgctcaggggacagagatggacgatgctcatccagccacacccctggcttgagatgtggcatgggggcctatgatggggctccttacccacagcctgtgtggactcccgctgctgtttcagttctctctccagggtggccatctttgtctttaggtcacttgtttctatggcagccaagagagaggcccttcagagggtcccatggacctggccggcggccttcatgcccagtgtgccccgtggagtggaggcagcccatcgcctgcagaggggccgcctgcggccatgggaggagctctagggaggctggtggaagcggctgggcccttacccaccctgcttctcatgggctggctgccatgtgtctacacctctctgggccttggtgtcgtccatggaggcaactgtgatgaggctcagaaagggcaaatccctcaggcctcccatcagtgggcactggccatcttctggtgccaggaactttgtctctaatggcttttgccacaaccagagaggctgctctgcttggctggaagtgccaggggaataactctctggaagtagccctcaatgactgacagtgcaagtggatacatacctcggttccctcactgaccgatggacgagtctgggcaagcgtcctagcccagctcctggtggccccagtgggactgagatcacagtgtcaccaccggatgaacacccccttccttgctgccctcccttccctgcctcttgcctgtgtcccagcctgggttcttccacacaaaccacttgccctggaagccctgtctcacaaacatccatgcaaaggctgtggcagagcccctgggcaccaggcgtctggcctctggggcacagacctgtgagcagctgctgtttgtcgtgctcccactcagacaggcactgctcatcctcctccgcctgtcgccgccgtgccccctgctcctgtttcagcgcctgctccagcttgcccgcctgcttcctcaggccatccttctgcccttcagcctcctccagctgggccctgagggcctccacatgcttactgaggcgcgtcaggtctttcctctgctctgctgcccagcggcccacggtggcagccggcagtggcctgagccccatgctgtcctgcaccagttgctggaactggcctaaggacgagggcaggttctggctctgacacaggctgatgaccaccttgcccaccttctgcaggcttccctggacgctggcgcatgcgtcacagggcaccagggccgtctcaatggtctgggagtggacactcctggtgttcttgaaggtcgtggctgggaactgcagggaggctctgacagggatgctctctggctcttggcaggtctggggcaagcctagcactggggaggagggcttgattaacttggtagtcagatattcagggctcctggctggctcgcccttggtggtgggcttggaggtgggagtctccctttggtttgcccctttctgtgttcagaaaaagacaagggaaagcaggtgagggagagagtagagagggaggtgactggttccctgggggatgttctgtgacagtgtgacagccttgcctgacactcagaccctcaaatgttctctgacaccgacgtgaataagagagaactttctccctctgttactctgactcagcttactacagccaggtctcctctctgcggcccgcaccccaagctccaggcttgatctgattgtatgcatggtgttgggaaggtgatggtgacggtcacagctgctggttactgggctcttgcttactggacctgcctgctcttgtgtcaccataaccactctcagttttagtttccttcccatcatgggaacagtggttcttccccagtgggtggttgtgtggattacgggatagccnataacaaacaggggtcacatgacctccgttgtatagatgaagaaactgcggttcaaagtaggcaagatttttccaaagtcccacagggatgtcagagccagggagcaaggcatgatccccaaggcctgcgttcttaaccgccacactgtgtggggcttgattgggagggcggtgggagccagtaaaggctgtggtgcacatagtggtaggctaggaagccagagctggggcgaggtgtgaaggccaccacagtggggagatagaggctgaggctgacccacctgagacagaggctgggacccacctgggggagtggctgctggtggagcgtgcccagcctcagcaggctgtcccagaagcgccgcaccgtgagccccacggacatgcagggccccgcagcctgtgcagggggcatcatctgctctgagccaaggttctccaagtagctcatacagctttgaagcagcagcaggagcctgcgggcagagatgctaggttgctggggcccaggctggtgctaacataccctcagaccatacaaccgcagctctggctctggggaactggcccaggcatcaagagcttggagagtctcagaatatgctctgctgggccagcttcaaacctaacccaggggctacttcctcagggaagccctccctggccacagcctcagcttgggagcctcttctgtgtctcctgggtggcacttctgcctggctcttctccactggaccagggagctctgtgaagccaggcctggccttgcctcagttgtatcctgagtccttgaaaagttctgggtgaatggctgccttatatccagtggcccggagcctccacttgatagatgacagagctgagacccagagaggggaagagcttgcccacagacacacattgatagggcagagcagggagtgtgcacagtctcctgaggctagtcaggggcttctgcagggtgagctgcttctgtgacagtggagacctgtgtcaagacagctaggtctctgtcctaacctccaagtttaaaactacagtcaggcatgaattgtaagaaaaaggagtattataataaaaagctaagtttgcatttg

SEQ ID NO: 349908 - DNA, 8485 bp, Homo sapiens
  misc_feature (2682)..(2682): n is a, c, g, or t
  misc_feature (4508)..(4508): n is a, c, g, or t
  misc_feature (7388)..(7388): n is a, c, g, or t
cacaggtggacctgtttaagcgccgcgtggtgcggagactggcatccctcaagacacggcgctgccggctgaacagggcagcgcagggcctcccagatccgggtactgagacctgtgcggtgtgcctggactacttctgcaacaaacagtggctccgggtgctgccctgtaagcacgagtttcaccgagactgtgtggacccctggctgatgctccagcagacctgcccactgtgcaaattcaacgtcctggggaaccgctactccgatgattagctgcccagctggactctgcacatggggatggacccttcctgcctgcaccccggtcctcagcctgggctcccaggacaggacaggatgggacagcaggatagacaggacagcaagcccagtgggtgggaggaaggatgagggccccaccatgtccacactgggaaggagggccccacagcttcagactgaggatctagggctgggacctgtcagtcaaggaagagaggtcactttgggaccttctctgcaatcctgtgacgtgagtctgccctccttacaggcagctcccaggtcaataaggaaagagaatatggggccagtgtagctgtcgccagggttctgggagctccctgtggcctgtctgggaattcctgggggctgagactacagtggccaggttttgtgcttatttattggggggtgggttgagggaagagctatctggccttggggtaccctggcctgaccgtctttcaggatacttcttgtcaaggctgtctgcctgttgcctttggtcctcaagcactgggagccatgggtcccactgcctgtccagcctggctcccttcctgggcctggctaggaccaaaggttttagaaaccgtcctgttctggaatccttggctgcggctttgtgttgctgaccgggatactcgaaaccccaggatcaatgtggtgcctcatccaggggcatcctttttttttttttttttttttttaaagagttggagtagggaaggtttaatagtaaaataaacgtggctatattttaacataagatgtaaaatgtgtataggtgttttaagattttaaaaagttaccttaggttctactgcctgtggtagatggaattctaagatggcccccaaggtctcccactaccacctgccgtgaacatgccttgcattaatataatttctggaactgggactcagagggattttatttatttattttatttttatttcttgagatggagtttcactcttgttgcccaggctggagtgcaatggcgtgatctcgcctcactgcaacctccgcctcccgggttcaagcaattctcctgtctcagcctctcaaattgttgggattacaggcatgagccgccgcacccggcctgacgaggcttcttgctgcacttaaaggaatgacagctatagagggcatatgggactggaaggcatcggatccataacatcctcacgccttctggaaatgtgaaaaatgtttcacaaaagcacagcctaaggcctcatgtgatgaggtgggctctccacaagttcccggggcagagtctgaagacctgctgctggataggggcttcctcctggtccccaagggcccgccctctcaggcccaccttgaggccaccctgctgggccacttcccggattttggacagcattgattggagccgcccgttctcctcctgtaggacccggatgcggatgtcgttggcctgcacttgcctctccatgtgatctgtgacgttgccagagtctgtgggacatgttatctgggattccacgctgctggatctgcctcctgtgcccaatgggacaggaccttagaagggaggcacaccagcttgggcaggtggcctggaggcacaaaggagctgtgtagtgcaccaggcctcctagctcatcttccttctcccgaggccttattcccccttccctgtcccccaacctgcagggaagatgaccatagtattataaaatctgagagctgggtgggacctagagctctcaaaagacttagcaaggccgggcgcggtggctcacgcctgtaatcccagcactttgggaggcccaggtcaggggatcattaagtcaagagatcaagaccatcctggccaacatggtgaaaccccgtctctactaaaaatagaaaaatgagctgggtgtggtggcgggcccccgtagtcccagctactcaggaggctgaggcaggagaatcacttgaacccaggaggtggaggttgcagtgagcagagattgtgccactgcactccagcctggcaacagagtgagactctgtctcaaaaaaaaaaaaaaaaaaaaagacttagcaaataagcatgagaggagagtgaatctctgacaaggccccccgttttggacaggctacagccaaagtgagctgtccaaggtcacacggccagctcaagcttgggaacggcaggaattccgccaggctgctcttcccctgcttttgtgatggatgcttccttctggctccaggagcccgggagaattgctgccccttctggttcagtttcctgctatgggaaatagctatggggctatgacctgcctcacaaggtggttgagaaggggacagaagggcctggatgatgtctcacgagcagctaactgcacatcttcctgccagctctgcaaanggatttgccctagtgctttaggggtctggaggggctgggagaacccaggtcacctgatatccaatcctgtgccaagatgggtacctagcactcctatgccatggggtccaggacagtgggcagctggaggctgtgtccttgggactagtcccatggtgtggtttggggacccattccaagaaccaagaagggggacacacagaagtcgagcaagaattagcatgtgacgtagtgaagagcacaggctgtggggacaaccagacctgtgtctgcgtttggctgttgtgactagaggcagtcacatcactgttgggctttcacgtccctgtctatgcagagtggatgacgcatgaagcacttgcgtgctgtggtgggtccacaggggctgcgctgctggccgcctggctttaacacccttgctgcaggctagggagctgcagtccccagtgtcctgcccacacgagccctcagctgctggccctgagccccagcatgcccttggcaccatccccagtcccctaccatggatctgggtctcggtgggcctgtgcaggtctgggaaggccaccagcagccgctcccgctccttcagctcctccagctcccgttctagctccaggatggttagccgcaggtccgtagtcgcctgctccaggccttgcttctccctctgcaggctctgcagcagctcctgggacagacggaggctcaggcctggctcctgagtgagctacatggtactcagcgccctggggcaccgtccctacccaagaaaagacatgggacaggcctgcaggcactcagttggccggagacttctctggcaaaaaggaagacccccaccctcacctgctgggccctgagctggcattgcccctgctcccgctcgctctgcagctgctcctccacgcgggcccgctgggcctcagcctcgtccaggctgccccgcagctcctcacgttcctggtccaggctgtccagctgctttagcagggctcgctgcttggcctgcagagactaagcaggaacggacaagcagggaggctgtgagacccacagggctaggcccagccatgtggaactaaggaggctacagcatctactacccctcggctgctacccccctggggtgtgtgtctgtgtctagggaatgctggtcacatgcgtggaagggtaggggtcgggggaagctggcagcaggcagatgcacaccggacctggtcaaggccaggatcccagcttgaagaccccggcccttggaacgcagatggctggctctgggggtctcacccccacttccttccagtcatacacagaccccacttggagaggaattctgggaactaagtttttcttctcctcgggtctccagtgtcacatcatcccatgttgctgaagcccacatttcctaacacccactgaatggaaagcaggaagaactaacgctggactgctcggagtcctggctccacctctcactagctgtgtggccttgggcaacttccttaacctcactcaataaggctgtttcctcattcgtaaaatgggggtgacaagagtatctacctcctgttgctgtagcgaggagtaagcatcagaggctgcggcgcctgaagcctgggtcacagcagacacctgatacatggcggctgtgacagtttgcaaggcacagagaacagcacccacttggggtagaaaggcttcccctaccctgggcccatgtctgaccctggggactctcaactgaactcctggctccttgctgagcttttgagggttagacccagccaagacagcccccagacctgcccctttcactaggcaanaggtcacctactccctcaaccacacttctgaggactcctgtgaggccccattgcccagagcacagctatgccccgggccctggctcaccctctgcctgccctgtccttcccctggctgatggactaattgcctgtcatgggcgtccagctcaaaggccacctcctcctagaagccattctggattcccatggcagatgtggccatccctccctgcaccccttagccatctggcaggagagtgtggcacacctgctcatctttgcctgtggggcgctcttccagagtgaggcctcactgggcagtatcagtccctgggtcactgttcccccagtgcctggttcagggtagactctctgtaaaggtgagtcaacccccacacctggaggcatctcagggagcagatgcccaatatagatgatcccccattccctgacagtggagccctctttccctgcagcctacattgcagatgcccaggctagcgagggccctggcctcacctcctggtggcggaccatgctgtcgacacgggccttctccttatccagctccgtgctggcccagcagacctgctggccagcgccctccagccgacccaccaacagctgcacctgcgcctccaactgctgcacctgctcctccagctgctgcacctgcctctccgctgccgccctgcgctcaccttcctcctgcagctgctgggcctttgcctctgcagcattaagtggacatgggatggggtagggcaggggagcgctgtactacctcagacctaggacgggagctcacatcccatctctgggcctcagagtcctcagccacaaaatggggctctagaccccacctgaggtgggtttggaaaatagaaggcgctttctcggtaggaggtggcaacccagtttggtcatcgccaatagtgtggttggtcaggcccaccctcctgtggctggttcccttcaactttgccctggatgctcaggggacagagatggacgatgctcatccagccacacccctggcttgagatgtggcatgggggcctatgatggggctccttacccacagcctgtgtggactcccgctgctgtttcagttctctctccagggtggccatctttgtctttaggtcacttgtttctatggcagccaagagagaggcccttcagagggtcccatggacctggccggcggccttcatgcccagtgtgccccgtggagtggaggcagcccatcgcctgcagaggggccgcctgcggccatgggaggagctctagggaggctggtggaagcggctgggcccttacccaccctgcttctcatgggctggctgccatgtgtctacacctctctgggccttggtgtcgtccatggaggcaactgtgatgaggctcagaaagggcaaatccctcaggcctcccatcagtgggcactggccatcttctggtgccaggaactttgtctctaatggcttttgccacaaccagagaggctgctctgcttggctggaagtgccaggggaataactctctggaagtagccctcaatgactgacagtgcaagtggatacatacctcggttccctcactgaccgatggacgagtctgggcaagcgtcctagcccagctcctggtggccccagtgggactgagatcacagtgtcaccaccggatgaacacccccttccttgctgccctcccttccctgcctcttgcctgtgtcccagcctgggttcttccacacaaaccacttgccctggaagccctgtctcacaaacatccatgcaaaggctgtggcagagcccctgggcaccaggcgtctggcctctggggcacagacctgtgagcagctgctgtttgtcgtgctcccactcagacaggcactgctcatcctcctccgcctgtcgccgccgtgccccctgctcctgtttcagcgcctgctccagcttgcccgcctgcttcctcaggccatccttctgcccttcagcctcctccagctgggccctgagggcctccacatgcttactgaggcgcgtcaggtctttcctctgctctgctgcccagcggcccacggtggcagccggcagtggcctgagccccatgctgtcctgcaccagttgctggaactggcctaaggacgagggcaggttctggctctgacacaggctgatgaccaccttgcccaccttctgcaggcttccctggacgctggcgcatgcgtcacagggcaccagggccgtctcaatggtctgggagtggacactcctggtgttcttgaaggtcgtggctgggaactgcagggaggctctgacagggatgctctctggctcttggcaggtctggggcaagcctagcactggggaggagggcttgattaacttggtagtcagatattcagggctcctggctggctcgcccttggtggtgggcttggaggtgggagtctccctttggtttgcccctttctgtgttcagaaaaagacaagggaaagcaggtgagggagagagtagagagggaggtgactggttccctgggggatgttctgtgacagtgtgacagccttgcctgacactcagaccctcaaatgttctctgacaccgacgtgaataagagagaactttctccctctgttactctgactcagcttactacagccaggtctcctctctgcggcccgcaccccaagctccaggcttgatctgattgtatgcatggtgttgggaaggtgatggtgacggtcacagctgctggttactgggctcttgcttactggacctgcctgctcttgtgtcaccataaccactctcagttttagtttccttcccatcatgggaacagtggttcttccccagtgggtggttgtgtggattacgggatagccnataacaaacaggggtcacatgacctccgttgtatagatgaagaaactgcggttcaaagtaggcaagatttttccaaagtcccacagggatgtcagagccagggagcaaggcatgatccccaaggcctgcgttcttaaccgccacactgtgtggggcttgattgggagggcggtgggagccagtaaaggctgtggtgcacatagtggtaggctaggaagccagagctggggcgaggtgtgaaggccaccacagtggggagatagaggctgaggctgacccacctgagacagaggctgggacccacctgggggagtggctgctggtggagcgtgcccagcctcagcaggctgtcccagaagcgccgcaccgtgagccccacggacatgcagggccccgcagcctgtgcagggggcatcatctgctctgagccaaggttctccaagtagctcatacagctttgaagcagcagcaggagcctgcgggcagagatgctaggttgctggggcccaggctggtgctaacataccctcagaccatacaaccgcagctctggctctggggaactggcccaggcatcaagagcttggagagtctcagaatatgctctgctgggccagcttcaaacctaacccaggggctacttcctcagggaagccctccctggccacagcctcagcttgggagcctcttctgtgtctcctgggtggcacttctgcctggctcttctccactggaccagggagctctgtgaagccaggcctggccttgcctcagttgtatcctgagtccttgaaaagttctgggtgaatggctgccttatatccagtggcccggagcctccacttgatagatgacagagctgagacccagagaggggaagagcttgcccacagacacacattgatagggcagagcagggagtgtgcacagtctcctgaggctagtcaggggcttctgcagggtgagctgcttctgtgacagtggagacctgtgtcaagacagctaggtctctgtcctaacctccaagtttaaaactacagtcaggcatgaattgtaagaaaaaggagtattataataaaaagctaagtttgcatttg

SEQ ID NO: 349909 - DNA, 1057 bp, Homo sapiens
cacaggtggacctgtttaagcgccgcgtggtgcggagactggcatccctcaagacacggcgctgccggctgaacagggcagcgcagggcctcccagatccgggtactgagacctgtgcggtgtgcctggactacttctgcaacaaacagtggctccgggtgctgccctgtaagcacgagtttcaccgagactgtgtggacccctggctgatgctccagcagacctgcccactgtgcaaattcaacgtcctggggaaccgctactccgatgattagctgcccagctggactctgcacatggggatggacccttcctgcctgcaccccggtcctcagcctgggctcccaggacaggacaggatgggacagcaggatagacaggacagcaagcccagtgggtgggaggaaggatgagggccccaccatgtccacactgggaaggagggccccacagcttcagactgaggatctagggctgggacctgtcagtcaaggaagagaggtcactttgggaccttctctgcaatcctgtgacgtgagtctgccctccttacaggcagctcccaggtcaataaggaaagagaatatggggccagtgtagctgtcgccagggttctgggagctccctgtggcctgtctgggaattcctgggggctgagactacagtggccaggttttgtgcttatttattggggggtgggttgagggaagagctatctggccttggggtaccctggcctgaccgtctttcaggatacttcttgtcaaggctgtctgcctgttgcctttggtcctcaagcactgggagccatgggtcccactgcctgtccagcctggctcccttcctgggcctggctaggaccaaaggttttagaaaccgtcctgttctggaatccttggctgcggctttgtgttgctgaccgggatactcgaaaccccaggatcaatgtggtgcctcatccaggggcatcctttttttttttttttttttttttaaagagttggagtagggaaggtttaatagtaaaataaacgtggctatattttaacataagatg

SEQ ID NO: 349910 - DNA, 1343 bp, Homo sapiens
gtcaggaaaatgaagttgctccaaagaacaggatgaatgaaagcattttattgaaaaactcgtgcagcaaaccaccatggcacacgtttacctatgtaacaaacctgcacatcctgcacatgtatcctggaacttaaataaaattaaaaaaataaaaataaaaactcagattcctctcaattttcagtccttgcatttaataatttcttaatcatttcccttccaacttttagcctgcacgagcatgtgtgaagcacagaaatcataccacatgcaaaaatctctaaaatatcttatcatctgaaggtactgggggatttcctatcccatctgaaatccgagctaataaacaccaaaccctaagtggcaaaaaccctactttcagatggtattgtttcctcaatcccagaggtagactcaaaactaatttgaaacctccctggatagaagagaattggcagtcctttccagctgggagcacctgctagtaatggaggggcctctgctgacagtgcttttatgaagcaggatggtttgtgaatttaccaacagtgaggtctcagacttgaccagtttaggattaccgtagacccaggagtagttctagactggaatctagatagttttcaggatggggaagatagattcaaaaccacctaagggcattctgggtacaaagcattgtgcaaggctttggtgatacagagaataaggtcttttttcccatacttcctcatctgccaaggttatctccaattgtacctttctctccagttccaagcttgcatcatgaagatggtgtgtgggaaggccatgacagatgaatccgacacatgcagctcccagaaaacagaagtttctactgtctcgtctacccaagttggccccaactgaggacccaatattggcctgtttgcaacagctagaattaaattttacttttaagtaagtttctattgtctccgtcagaaaccaaactactaaaaacacaaaaaagatggtaaaaggagtgatggcagtttggggagtcaatttttcattttcttactattgccttcttgcctacaaagctactgtttccactggtctatttcagaccacccaaaggccatttcaacaatcatcagtttctactcctaagtggcaccattcacagcacttggagaactgatttctacatacaaggcaaccaaaaaggaatatgctttaagttttcagtgtatggatactttcctttttagtaactttttttttttttcctgctggggatccattctgagatgatatatgctgaattagaacaaacttaagaaaacactttagaaatgggagagacataaaga

SEQ ID NO: 349911 - DNA, 1260 bp, Homo sapiens
gtggaaagaggggaagacataatctgccttcgaatgtgggaaggtgcagtgaaatgccttttcaagaagcaggaactggccagttcctgcttcgtgaaaccagttccttgcatttaataatttcttaatcatttcccttccaacttttagcctgcacgagcatgtgtgaagcacagaaatcataccacatgcaaaaatctctaaaatatcttatcatctgaaggtactgggggatttcctatcccatctgaaatccgagctaataaacaccaaaccctaagtggcaaaaaccctactttcagatggtattgtttcctcaatcccagaggtagactcaaaactaatttgaaacctccctggatagaagagaattggcagtcctttccagctgggagcacctgctagtaatggaggggcctctgctgacagtgcttttatgaagcaggatggtttgtgaatttaccaacagtgaggtctcagacttgaccagtttaggattaccgtagacccaggagtagttctagactggaatctagatagttttcaggatggggaagatagattcaaaaccacctaagggcattctgggtacaaagcattgtgcaaggctttggtgatacagagaataaggtcttttttcccatacttcctcatctgccaaggttatctccaattgtacctttctctccagttccaagcttgcatcatgaagatggtgtgtgggaaggccatgacagatgaatccgacacatgcagctcccagaaaacagaagtttctactgtctcgtctacccaagttggccccaactgaggacccaatattggcctgtttgcaacagctagaattaaattttacttttaagtaagtttctattgtctccgtcagaaaccaaactactaaaaacacaaaaaagatggtaaaaggagtgatggcagtttggggagtcaatttttcattttcttactattgccttcttgcctacaaagctactgtttccactggtctatttcagaccacccaaaggccatttcaacaatcatcagtttctactcctaagtggcaccattcacagcacttggagaactgatttctacatacaaggcaaccaaaaaggaatatgctttaagttttcagtgtatggatactttcctttttagtaactttttttttttttcctgctggggatccattctgagatgatatatgctgaattagaacaaacttaagaaaacactttagaaatgggagagacataaaga

SEQ ID NO: 349912 - DNA, 1503 bp, Homo sapiens
  misc_feature (527)..(527): n is a, c, g, or t
ggcatccatgagaaaaatgtcggaggaagagttttatctgttcaaaaatatctcttcagtggggccgtgggatgggcctcagtaccacattgcccctgtctgggccttctacctccaggcagctttcatgggcactgtcttccttatagggttcccactcaatgccatggtgctggtggccacactgcgctacaaaaagttgcggcagcccctcaactacattctggtcaacgtgtccttcggaggcttcctcctctgcatcttctctgtcttccctgtcttcgtcgccagctgtaacggatacttcgtcttcggtcgccatgtttgtgctttggagggcttcctgggcactgtagcaggtctggttacaggatggtcactggccttcctggcctttgagcgctacattgtcatctgtaagcccttcggcaacttccgcttcagctccaagcatgcactgacggtggtcctggctacctggaccattggtattggcgtctccatcccacccttctttggctggagcnggttcatccctgagggcctgcagtgttcctgtggccctgactggtacaccgtgggcaccaaataccgcagcgagtcctatacgtggttcctcttcatcttctgcttcattgtgcctctctccctcatctgcttctcctacactcagctgctgagggccctgaaagctgttgcagctcagcagcaggagtcagctacgacccagaaggctgaacgggaggtgagccgcatggtggttgtgatggtaggatccttctgtgtctgctacgtgccctacgcggccttcgccatgtacatggtcaacaaccgtaaccatgggctggacttacggcttgtcaccattccttcattcttctccaagagtgcttgcatctacaatcccatcatctactgcttcatgaataagcagttccaagcttgcatcatgaagatggtgtgtgggaaggccatgacagatgaatccgacacatgcagctcccagaaaacagaagtttctactgtctcgtctacccaagttggccccaactgaggacccaatattggcctgtttgcaacagctagaattaaattttacttttaagtaagtttctattgtctccgtcagaaaccaaactactaaaaacacaaaaaagatggtaaaaggagtgatggcagtttggggagtcaatttttcattttcttactattgccttcttgcctacaaagctactgtttccactggtctatttcagaccacccaaaggccatttcaacaatcatcagtttctactcctaagtggcaccattcacagcacttggagaactgatttctacatacaaggcaaccaaaaaggaatatgctttaagttttcagtgtatggatactttcctttttagtaactttttttttttttcctgctggggatccattctgagatgatatatgctgaattagaacaaacttaagaaaacactttagaaatgggagagacataaaga

SEQ ID NO: 349913 - DNA, 5264 bp, Homo sapiens
gcttaaaaatttctgtgtcttacacagaagatagaaaaaatagagtgtctccaattggatggattttttaaaaaatttggttattgtaatggatttattttttcttagagctgagctgattgtactttggccaactaatgggttaatactgtcaagggaaattagccctgactaaacattgccgctggctcatgaatgcactaggcttggggcagtataaaaactcagagaaatcagtgtgtaggagacacagaaatcagtgtcactcagtgacagaagcaacaataattgtgaaaaatacttcagcagttatggactcatctgtcattcaaaggaaaaaagtagctgtcattggtggtggcttggttggctcattacaagcatgctttcttgcaaagaggaatttccagattgatgtatatgaagctagggaagatactcgagtggctaccttcacacgtggaagaagcattaacttagccctttctcatagaggacgacaagccttgaaagctgttggcctggaagatcagattgtatcccaaggtattcccatgagagcaagaatgatccactctctttcaggaaaaaagtctgcaattccctatgggacaaagtctcagtatattctttctgtaagcagagaaaatctaaacaaggatctattgactgctgctgagaaataccccaatgtgaaaatgcactttaaccacaggctgttgaaatgtaatccagaggaaggaatgatcacagtgcttggatctgacaaagttcccaaagatgtcacttgtgacctcattgtaggatgtgatggagcctattcaactgtcagatctcacctgatgaagaaacctcgctttgattacagtcagcagtacattcctcatgggtacatggagttgactattccacctaagaacggagattatgccatggaacctaattatctgcatatttggcctagaaatacctttatgatgattgcacttcctaacatgaacaaatcattcacatgtactttgttcatgccctttgaagagtttgaaaaacttctaaccagtaatgatgtggtagatttcttccagaaatactttccggatgccatccctctaattggagagaaactcctagtgcaagatttcttcctgttgcctgcccagcccatgatatctgtaaagtgctcttcatttcactttaaatctcactgtgtactgctgggagatgcagctcatgctatagtgccgttttttgggcaaggaatgaatgcgggctttgaagactgcttggtatttgatgagttaatggataaattcagtaacgaccttagtttgtgtcttcctgtgttctcaagattgagaatcccagatgatcacgcgatttcagacctatccatgtacaattacatagagatgcgagcacatgtcaactcaagctggttcatttttcagaagaacatggagagatttcttcatgcgattatgccatcgacctttatccctctctatacaatggtcactttttccagaataagataccatgaggctgtgcagcgttggcattggcaaaaaaaggtgataaacaaaggactctttttcttgggatcactgatagccatcagcagtacctacctacttatacactacatgtcaccacgatctttcctccgcttgagaagaccatggaactggatagctcacttccggaatacaacatgtttccccgcaaaggccgtggactccctagaacaaatttccaatctcattagcaggtgatagaaaggttttgtggtagcaaatgcatgatttctctgtgaccaaaattaagcatgaaaaaaatgtttccattgccatatttgattcactagtggaagatagtgttctgcttataattaaactgaatgtagagtatctctgtatgttaattgcaattactggttggggggtgcattttaaaagatgaaacatgcagcttccctacattacacacactcaggttgagtcattctaactataaaagtgcaatgactaagatccttcacttctctgaaagtaaggccctagatgcctcagggaagacagtaatcatgccttttctttaaaagacacaataggactcgcaacagcattgactcaacacctaggactaaaaatcacaacttaactagcatgttaactgcacttttcattacgtgaatggaacttacctaaccacagggctcagacttactagataaaaccagaaatggaaataaggaattcaggggagttccagagacttacaaaatgaactcattttattttcccaccttcaaatataagtattatcatctatctgtttatcgtctatctatctatcatctatctatctatctatcatctatctatctatctatctatctatctatctatctatctatctatctatctctatttatttatgtatttagagatcaggtctcactctgttgaccaggctggagtgcagtggtgagatctgggttcactgcaacctctgcctcctgggctcaagcaatcctcccacttcagcctcccaaatagctggggctaccatggtatttttcagtagagaccgggtcttgccatgctgcccaggccagtctcaaactcctggcctcatgtgatctgcccacctcagcctcccaaagtacagggattagagttgtgagccaccgctgccagcccagagttaccctctaaagataagaaaaaggctattaatatcatactaagtgaaggacaggaaagggttttattcataaattaaatgtctacatgtgccagaatggaaaggaaacaaggggagacaacttttatagaaatacaaagccattactttattcaatttcagaccctcagaagcaatttactaatttattcttcgactacatactgcagcagaaccagcaatacacttgatttttaaaagcacatttagtgaaatgttttctttggttcatccttctttaacaggctgctgagtcactcagaaatccttcaaacatgattaattatgaagatgaaacactagagtcatataagaaataaaaattgggcaataaaataaaatgattcagtgtttcttttctatattgtcaatgaaaaccttgagttctaataatccatgttcagtttgtagggaaagaaaaaataatttttccttctacccactttaggttccttggctggggcccctataacaaaagacagattgacaagagaaaaacaaacataaatttattagcgggtatatgtaatatatatgtgggaaatacaggggaatgagcaaatctcaaagagctggcgtcttagaactccctggcttatatagcatcgacaaagaacagtaaatttttagagaaacaacaaaacaaagaaaaagagctttgagtctgtaggggcagcaatttgggggaagcaaatatatgggagtttgccttgtagattcctctggtgctggtctccaggctgacaaggattcaaagttgtctctgaaactcctctttgtcatactgcacatataaaacgtcttttgtttccaacaagaggattttctttttcattctagaattatctccttgataacttgatcagatataggacatgacactgaatagagtccaacagtacaaaaaaaattcagtatgttctagctacttcacacatgtgtacgcgacagttatttttacagtaaggtattttcgagaaaaatgcattacgtgttttggaaaatagagtaatttaaaaaatatatttgaaatgaaaatctccaacacattagaagatgatgatgttagatgcccatcgtgtgccacaagtggttttttcattatgtaaagcacccgttgaattaaaagaatttgtttttgttcaacctcttcctgaggcccaagagcatatgggcaattcggatttcctgctggaccacaaggttctgttgatattacatagaacgggtattccagacacttcttatgatgaaagtccaaaagtggcatccaatttaaggccccatctttcgttgccattcttcattcctacaaaggacgaacttggattacatcaactttggacccattggttttgtcgctgtcgtcaactgacagtgattcatcactggtgatgataaaaatgatggaagaagagttgaaagtcacttttttctttggcctgtccccatctttctgtgacatcacaatgggtctgatctgcatttcacttccagctgctggtaggtctttagcaggcctctggcacctcagcagtcggaggcacagaagctgcaaaagggatcttcgaaactgggcagagaaaaaataaagtggaatattaagtaaaagttgggcactaatctggattaacattcgaggaaatcagttgagctgaatttaagttgttttttgtttgttagcaggtgtggatgtggggttatgtggtcatgctcagatctacctaaatcaccccagagctttatgtcttttattcattctaattcttattaaccggaatatgtaggaccatttcaataccttgtaatcctccaagcttcaatctgcacacactttctatgagggcaggtacaactattaagagattttgaacattaagttagtccacaaatattcagtgggcatctactaggtgacagccactgtgctataattagagactttttactataagcatcaaaaacagataaggctcttcctggcagagtttacagcctggtgtacttgctaatgtctctttaattaggtgaagaattttttttttctatcgaaattactaatcagttggggaaaaaaatactatagcagacagcactaatgtcatcaacaaacattgttcttctccgtgtcctgggtacaacatcgaataatatttcttggcctcctttccgcttctcctctctgctgttcctctctacaagaacctggggggccaacgcctaaagatcataatatcacacaatggaaggaacctagattcctaaatgactgcataggacagatcccatctcctccacccaatacattattagactgaactgtgacctgaaatgagcaataaactctgtattaattcactgaaatgttggggttgcttgttatagtagtcggtccatcatgaccagtaaaacataaatcaaaagttaatgtaattgttatcccattatttagagcgaaataaatgttgaatatatggactttctcagattaggaaataccaattaaaaatataataaat

SEQ ID NO: 349914 - DNA, 726 bp, Homo sapiens
gcttaaaaatttctgtgtcttacacagaagatagaaaaaatagagtgtctccaattggatggattttttaaaaaatttggttattgtaatggatttattttttcttagagctgagctgattgtactttggccaactaatgggttaatactgtcaagggaaattagccctgactaaacattgccgctggctcatgaatgcactaggcttggggcagtataaaaactcagagaaatcagtgtgtaggagacacagaaatcagtgtcactcagtgacagaagcaacaataattgtgaaaaatacttcagcagttatggactcatctgtcattcaaaggaaaaaagtagctgtcattggtggtggcttggtaagaattttcagatggattactattgttggtggtattatattaactattattactcgtaatgattattattcgtcacttctgcaaattgttaattttcttgtgaactctgatatttaaatacagctattttgtttatttttttaatatttttattttcatagatttaatatagtatgagttttaatctgttcttttcagggaaaggtattttatagccattaaatacaaaggtttctgttttccctcatcattttggtttaggatttgttaaaaagcaaaaataatgcaaattgaatttgattttatccccaaattggctatgtttttaggaacaggaattagtctcaatattcatttt

SEQ ID NO: 349915 - DNA, 439 bp, Homo sapiens
ggccccatgggtttggataaagaatggtgggcctgtagtagattttcatcatgtgagcttaatgttgtagaacttttcactgtctatgttagcttggtaatataaacagacatgatagatgtatttttcttgatactactttcagtgacaatgtgtctttgagctgacagtactagcaaatatgagtgctatttgcattcctattattttctcccagatagcagcagtcatgtgtaagaaaacactttgcattgaatgttaggaaccctgggttttactcctcataatctccctttttgtcatgatgagaaaatcacttaacctctgtaacaacaaatcacttccctcaatctgtgatattcgatttagatcagataaattttaagccggttctaagatctaagattaaaaaaacaaactaaaagcttcaggatcacca

SEQ ID NO: 349916 - DNA, 5210 bp, Homo sapiens
gcttaaaaatttctgtgtcttacacagaagatagaaaaaatagagtgtctccaattggatggattttttaaaaaatttggttattgtaatggatttattttttcttagagctgagctgattgtactttggccaactaatgggttaatactgtcaagggaaattagccctgactaaacattgccgctggctcatgaatgcactaggcttggggcagtataaaaactcagagaaatcagtgtgtaggagacacagaaatcagtgtcactcagtgacagaagcaacaataattgtgaaaaatacttcagcagttatggactcatctgtcattcaaaggaaaaaagtagctgtcattggtggtggcttggttggctcattacaagcatgctttcttgcaaagaggaatttccagattgatgtatatgaagctagggaagatactcgagtggctaccttcacacgtggaagaagcattaacttagccctttctcatagaggacgacaagccttgaaagctgttggcctggaagatcagattgtatcccaaggtattcccatgagagcaagaatgatccactctctttcaggaaaaaagtctgcaattccctatgggacaaagtctcagtatattctttctgtaagcagagaaaatctaaacaaggatctattgactgctgctgagaaataccccaatgtgaaaatgcactttaaccacaggctgttgaaatgtaatccagaggaaggaatgatcacagtgcttggatctgacaaagttcccaaagatgtcacttgtgacctcattgtaggatgtgatggagcctattcaactgtcagatctcacctgatgaagaaacctcgctttgattacagtcagcagtacattcctcatgggtacatggagttgactattccacctaagaacggagattatgccatggaacctaattatctgcatatttggcctagaaatacctttatgatgattgcacttcctaacatgaacaaatcattcacatgtactttgttcatgccctttgaagagtttgaaaaacttctaaccagtaatgatgtggtagatttcttccagaaatactttccggatgccatccctctaattggagagaaactcctagtgcaagatttcttcctgttgcctgcccagcccatgatatctgtaaagtgctcttcatttcactttaaatctcactgtgtactgctgggagatgcagctcatgctatagtgccgttttttgggcaaggaatgaatgcgggctttgaagactgcttggtatttgatgagttaatggataaattcagtaacgaccttagtttgtgtcttcctgtgttctcaagattgagaatcccagatgatcacgcgatttcagacctatccatgtacaattacatagagatgcgagcacatgtcaactcaagctggttcatttttcagaagaacatggagagatttcttcatgcgattatgccatcgacctttatccctctctatacaatggtcactttttccagaataagataccatgaggctgtgcagcgttggcattggcaaaaaaaggtgataaacaaaggactctttttcttgggatcactgatagccatcagcagtacctacctacttatacactacatgtcaccacgatctttcctccgcttgagaagaccatggaactggatagctcacttccggaatacaacatgtttccccgcaaaggccgtggactccctagaacaaatttccaatctcattagcaggtgatagaaaggttttgtggtagcaaatgcatgatttctctgtgaccaaaattaagcatgaaaaaaatgtttccattgccatatttgattcactagtggaagatagtgttctgcttataattaaactgaatgtagagtatctctgtatgttaattgcaattactggttggggggtgcattttaaaagatgaaacatgcagcttccctacattacacacactcaggttgagtcattctaactataaaagtgcaatgactaagatccttcacttctctgaaagtaaggccctagatgcctcagggaagacagtaatcatgccttttctttaaaagacacaataggactcgcaacagcattgactcaacacctaggactaaaaatcacaacttaactagcatgttaactgcacttttcattacgtgaatggaacttacctaaccacagggctcagacttactagataaaaccagaaatggaaataaggaattcaggggagttccagagacttacaaaatgaactcattttattttcccaccttcaaatataagtattatcatctatctgtttatcgtctatctatctatcatctatctatctatctatcatctatctatctatctatctatctatctatctatctatctatctatctatctctatttatttatgtatttagagatcaggtctcactctgttgaccaggctggagtgcagtggtgagatctgggttcactgcaacctctgcctcctgggctcaagcaatcctcccacttcagcctcccaaatagctggggctaccatggtatttttcagtagagaccgggtcttgccatgctgcccaggccagtctcaaactcctggcctcatgtgatctgcccacctcagcctcccaaagtacagggattagagttgtgagccaccgctgccagcccagagttaccctctaaagataagaaaaaggctattaatatcatactaagtgaaggacaggaaagggttttattcataaattaaatgtctacatgtgccagaatggaaaggaaacaaggggagacaacttttatagaaatacaaagccattactttattcaatttcagaccctcagaagcaatttactaatttattcttcgactacatactgcagcagaaccagcaatacacttgattttttgagtcactcagaaatccttcaaacatgattaattatgaagatgaaacactagagtcatataagaaataaaaattgggcaataaaataaaatgattcagtgtttcttttctatattgtcaatgaaaaccttgagttctaataatccatgttcagtttgtagggaaagaaaaaataatttttccttctacccactttaggttccttggctggggcccctataacaaaagacagattgacaagagaaaaacaaacataaatttattagcgggtatatgtaatatatatgtgggaaatacaggggaatgagcaaatctcaaagagctggcgtcttagaactccctggcttatatagcatcgacaaagaacagtaaatttttagagaaacaacaaaacaaagaaaaagagctttgagtctgtaggggcagcaatttgggggaagcaaatatatgggagtttgccttgtagattcctctggtgctggtctccaggctgacaaggattcaaagttgtctctgaaactcctctttgtcatactgcacatataaaacgtcttttgtttccaacaagaggattttctttttcattctagaattatctccttgataacttgatcagatataggacatgacactgaatagagtccaacagtacaaaaaaaattcagtatgttctagctacttcacacatgtgtacgcgacagttatttttacagtaaggtattttcgagaaaaatgcattacgtgttttggaaaatagagtaatttaaaaaatatatttgaaatgaaaatctccaacacattagaagatgatgatgttagatgcccatcgtgtgccacaagtggttttttcattatgtaaagcacccgttgaattaaaagaatttgtttttgttcaacctcttcctgaggcccaagagcatatgggcaattcggatttcctgctggaccacaaggttctgttgatattacatagaacgggtattccagacacttcttatgatgaaagtccaaaagtggcatccaatttaaggccccatctttcgttgccattcttcattcctacaaaggacgaacttggattacatcaactttggacccattggttttgtcgctgtcgtcaactgacagtgattcatcactggtgatgataaaaatgatggaagaagagttgaaagtcacttttttctttggcctgtccccatctttctgtgacatcacaatgggtctgatctgcatttcacttccagctgctggtaggtctttagcaggcctctggcacctcagcagtcggaggcacagaagctgcaaaagggatcttcgaaactgggcagagaaaaaataaagtggaatattaagtaaaagttgggcactaatctggattaacattcgaggaaatcagttgagctgaatttaagttgttttttgtttgttagcaggtgtggatgtggggttatgtggtcatgctcagatctacctaaatcaccccagagctttatgtcttttattcattctaattcttattaaccggaatatgtaggaccatttcaataccttgtaatcctccaagcttcaatctgcacacactttctatgagggcaggtacaactattaagagattttgaacattaagttagtccacaaatattcagtgggcatctactaggtgacagccactgtgctataattagagactttttactataagcatcaaaaacagataaggctcttcctggcagagtttacagcctggtgtacttgctaatgtctctttaattaggtgaagaattttttttttctatcgaaattactaatcagttggggaaaaaaatactatagcagacagcactaatgtcatcaacaaacattgttcttctccgtgtcctgggtacaacatcgaataatatttcttggcctcctttccgcttctcctctctgctgttcctctctacaagaacctggggggccaacgcctaaagatcataatatcacacaatggaaggaacctagattcctaaatgactgcataggacagatcccatctcctccacccaatacattattagactgaactgtgacctgaaatgagcaataaactctgtattaattcactgaaatgttggggttgcttgttatagtagtcggtccatcatgaccagtaaaacataaatcaaaagttaatgtaattgttatcccattatttagagcgaaataaatgttgaatatatggactttctcagattaggaaataccaattaaaaatataataaat

SEQ ID NO: 349917 - DNA, 4487 bp, Homo sapiens
gcttaaaaatttctgtgtcttacacagaagatagaaaaaatagagtgtctccaattggatggattttttaaaaaatttggttattgtaatggatttattttttcttagagctgagctgattgtactttggccaactaatgggttaatactgtcaagggaaattagccctgactaaacattgccgctggctcatgaatgcactaggcttggggcagtataaaaactcagagaaatcagtgtgtaggagacacagaaatcagtgtcactcagtgacagaagcaacaataattgtgaaaaatacttcagcagttatggactcatctgtcattcaaaggaaaaaagtagctgtcattggtggtggcttggttggctcattacaagcatgctttcttgcaaagaggaatttccagattgatgtatatgaagctagggaagatactcgagtggctaccttcacacgtggaagaagcattaacttagccctttctcatagaggacgacaagccttgaaagctgttggcctggaagatcagattgtatcccaaggtattcccatgagagcaagaatgatccactctctttcaggaaaaaagtctgcaattccctatgggacaaagtctcagtatattctttctgtaagcagagaaaatctaaacaaggatctattgactgctgctgagaaataccccaatgtgaaaatgcactttaaccacaggctgttgaaatgtaatccagaggaaggaatgatcacagtgcttggatctgacaaagttcccaaagatgtcacttgtgacctcattgtaggatgtgatggagcctattcaactgtcagatctcacctgatgaagaaacctcgctttgattacagtcagcagtacattcctcatgggtacatggagttgactattccacctaagaacggagattatgccatggaacctaattatctgcatatttggcctagaaatacctttatgatgattgcacttcctaacatgaacaaatcattcacatgtactttgttcatgccctttgaagagtttgaaaaacttctaaccagtaatgatgtggtagatttcttccagaaatactttccggatgccatccctctaattggagagaaactcctagtgcaagatttcttcctgttgcctgcccagcccatgatatctgtaaagtgctcttcatttcactttaaatctcactgtgtactgctgggagatgcagctcatgctatagtgccgttttttgggcaaggaatgaatgcgggctttgaagactgcttggtatttgatgagttaatggataaattcagtaacgaccttagtttgtgtcttcctgtgttctcaagattgagaatcccagatgatcacgcgatttcagacctatccatgtacaattacatagagatgcgagcacatgtcaactcaagctggttcatttttcagaagaacatggagagatttcttcatgcgattatgccatcgacctttatccctctctatacaatggtcactttttccagaataagataccatgaggctgtgcagcgttggcattggcaaaaaaaggtgataaacaaaggactctttttcttgggatcactgatagccatcagcagtacctacctacttatacactacatgtcaccacgatctttcctccgcttgagaagaccatggaactggatagctcacttccggaatacaacatgtttccccgcaaaggccgtggactccctagaacaaatttccaatctcattagcaggtgatagaaaggttttgtggtagcaaatgcatgatttctctgtgaccaaaattaagcatgaaaaaaatgtttccattgccatatttgattcactagtggaagatagtgttctgcttataattaaactgaatgtagagtatctctgtatgttaattgcaattactggttggggggtgcattttaaaagatgaaacatgcagcttccctacattacacacactcaggttgagtcattctaactataaaagtgcaatgactaagatccttcacttctctgaaagtaaggccctagatgcctcagggaagacagtaatcatgccttttctttaaaagacacaataggactcgcaacagcattgactcaacacctaggactaaaaatcacaacttaactagcatgttaactgcacttttcattacgtgaatggaacttacctaaccacagggctcagacttactagataaaaccagaaatggaaataaggaattcaggggagttccagagacttacaaaatgaactcattttattttcccaccttcaaatataagtattatcatctatctgtttatcgtctatctatctatcatctatctatctatctatcatctatctatctatctatctatctatctatctatctatctatctatctatctctatttatttatgtatttagagatcaggtctcactctgttgaccaggctggagtgcagtggtgagatctgggttcactgcaacctctgcctcctgggctcaagcaatcctcccacttcagcctcccaaatagctggggctaccatggtatttttcagtagagaccgggtcttgccatgctgcccaggccagtctcaaactcctggcctcatgtgatctgcccacctcagcctcccaaagtacagggattagagttgtgagccaccgctgccagcccagagttaccctctaaagataagaaaaaggctattaatatcatactaagtgaaggacaggaaagggttttattcataaattaaatgtctacatgtgccagaatggaaaggaaacaaggggagacaacttttatagaaatacaaagccattactttattcaatttcagaccctcagaagcaatttactaatttattcttcgactacatactgcagcagaaccagcaatacacttgatttttaaaagcacatttagtgaaatgttttctttggttcatccttctttaacaggctgctgagtcactcagaaatccttcaaacatgattaattatgaagatgaaacactagagtcatataagaaataaaaattgggcaataaaataaaatgattcagtgtttcttttctatattgtcaatgaaaaccttgagttctaataatccatgttcagtttgtagggaaagaaaaaataatttttccttctacccactttaggttccttggctggggcccctataacaaaagacagattgacaagagaaaaacaaacataaatttattagcgggtatatgtaatatatatgtgggaaatacaggggaatgagcaaatctcaaagagctggcgtcttagaactccctggcttatatagcatcgacaaagaacagtaaatttttagagaaacaacaaaacaaagaaaaagagctttgagtctgtaggggcagcaatttgggggaagcaaatatatgggagtttgccttgtagattcctctggtgctggtctccaggctgacaaggattcaaagttgtctctgaaactcctctttgtcatactgcacatataaaacgtcttttgtttccaacaagaggattttctttttcattctagaattatctccttgataacttgatcagatataggacatgacactgaatagagtccaacagtacaaaaaaaattcagtatgttctagctacttcacacatgtgtacgcgacagttatttttacagtaaggtattttcgagaaaaatgcattacgtgttttggaaaatagagtaatttaaaaaatatatttgaaatgaaaatctccaacacattagaagatgatgatgttagatgcccatcgtgtgccacaagtggttttttcattatgtaaagcacccgttgaattaaaagaatttgtttttgttcaacctcttcctgaggcccaagagcatatgggcaattcggatttcctgctggaccacaaggttctgttgatattacatagaacgggtattccagacacttcttatgatgaaagtccaaaagtggcatccaatttaaggccccatctttcgttgccattcttcattcctacaaaggacgaacttggattacatcaactttggacccattggttttgtcgctgtcgtcaactgacagtgattcatcactggtgatgataaaaatgatggaagaagagttgaaagtcacttttttctttggcctgtccccatctttctgtgacatcacaatgggtctgatctgcatttcacttccagctgctggtaggtctttagcaggcctctggcacctcagcagtcggaggcacagaagctgcaaaagggatcttcgaaactttctgatcatgaagacataaatcactggattgtatacagtgttcgatttagcaaagaggtacgaaacaatagatattgttggagtgaccaggtgaccatgaccattaaccaccaagaagcagatcacgatataaggcatccaacagaccaggaaggtgaatatcatt

SEQ ID NO: 349918 - DNA, 5039 bp, Homo sapiens
gcttaaaaatttctgtgtcttacacagaagatagaaaaaatagagtgtctccaattggatggattttttaaaaaatttggttattgtaatggatttattttttcttagagctgagctgattgtactttggccaactaatgggttaatactgtcaagggaaattagccctgactaaacattgccgctggctcatgaatgcactaggcttggggcagtataaaaactcagagaaatcagtgtgtaggagacacagaaatcagtgtcactcagtgacagaagcaacaataattgtgaaaaatacttcagcagttatggactcatctgtcattcaaaggaaaaaagtagctgtcattggtggtggcttgattgtatcccaaggtattcccatgagagcaagaatgatccactctctttcaggaaaaaagtctgcaattccctatgggacaaagtctcagtatattctttctgtaagcagagaaaatctaaacaaggatctattgactgctgctgagaaataccccaatgtgaaaatgcaatctgacaaagttcccaaagatgtcacttgtgacctcattgtaggatgtgatggagcctattcaactgtcagatctcacctgatgaagaaacctcgctttgattacagtcagcagtacattcctcatgggtacatggagttgactattccacctaagaacggagattatgccatggaacctaattatctgcatatttggcctagaaatacctttatgatgattgcacttcctaacatgaacaaatcattcacatgtactttgttcatgccctttgaagagtttgaaaaacttctaaccagtaatgatgtggtagatttcttccagaaatactttccggatgccatccctctaattggagagaaactcctagtgcaagatttcttcctgttgcctgcccagcccatgatatctgtaaagtgctcttcatttcactttaaatctcactgtgtactgctgggagatgcagctcatgctatagtgccgttttttgggcaaggaatgaatgcgggctttgaagactgcttggtatttgatgagttaatggataaattcagtaacgaccttagtttgtgtcttcctgtgttctcaagattgagaatcccagatgatcacgcgatttcagacctatccatgtacaattacatagagatgcgagcacatgtcaactcaagctggttcatttttcagaagaacatggagagatttcttcatgcgattatgccatcgacctttatccctctctatacaatggtcactttttccagaataagataccatgaggctgtgcagcgttggcattggcaaaaaaaggtgataaacaaaggactctttttcttgggatcactgatagccatcagcagtacctacctacttatacactacatgtcaccacgatctttcctccgcttgagaagaccatggaactggatagctcacttccggaatacaacatgtttccccgcaaaggccgtggactccctagaacaaatttccaatctcattagcaggtgatagaaaggttttgtggtagcaaatgcatgatttctctgtgaccaaaattaagcatgaaaaaaatgtttccattgccatatttgattcactagtggaagatagtgttctgcttataattaaactgaatgtagagtatctctgtatgttaattgcaattactggttggggggtgcattttaaaagatgaaacatgcagcttccctacattacacacactcaggttgagtcattctaactataaaagtgcaatgactaagatccttcacttctctgaaagtaaggccctagatgcctcagggaagacagtaatcatgccttttctttaaaagacacaataggactcgcaacagcattgactcaacacctaggactaaaaatcacaacttaactagcatgttaactgcacttttcattacgtgaatggaacttacctaaccacagggctcagacttactagataaaaccagaaatggaaataaggaattcaggggagttccagagacttacaaaatgaactcattttattttcccaccttcaaatataagtattatcatctatctgtttatcgtctatctatctatcatctatctatctatctatcatctatctatctatctatctatctatctatctatctatctatctatctatctctatttatttatgtatttagagatcaggtctcactctgttgaccaggctggagtgcagtggtgagatctgggttcactgcaacctctgcctcctgggctcaagcaatcctcccacttcagcctcccaaatagctggggctaccatggtatttttcagtagagaccgggtcttgccatgctgcccaggccagtctcaaactcctggcctcatgtgatctgcccacctcagcctcccaaagtacagggattagagttgtgagccaccgctgccagcccagagttaccctctaaagataagaaaaaggctattaatatcatactaagtgaaggacaggaaagggttttattcataaattaaatgtctacatgtgccagaatggaaaggaaacaaggggagacaacttttatagaaatacaaagccattactttattcaatttcagaccctcagaagcaatttactaatttattcttcgactacatactgcagcagaaccagcaatacacttgatttttaaaagcacatttagtgaaatgttttctttggttcatccttctttaacaggctgctgagtcactcagaaatccttcaaacatgattaattatgaagatgaaacactagagtcatataagaaataaaaattgggcaataaaataaaatgattcagtgtttcttttctatattgtcaatgaaaaccttgagttctaataatccatgttcagtttgtagggaaagaaaaaataatttttccttctacccactttaggttccttggctggggcccctataacaaaagacagattgacaagagaaaaacaaacataaatttattagcgggtatatgtaatatatatgtgggaaatacaggggaatgagcaaatctcaaagagctggcgtcttagaactccctggcttatatagcatcgacaaagaacagtaaatttttagagaaacaacaaaacaaagaaaaagagctttgagtctgtaggggcagcaatttgggggaagcaaatatatgggagtttgccttgtagattcctctggtgctggtctccaggctgacaaggattcaaagttgtctctgaaactcctctttgtcatactgcacatataaaacgtcttttgtttccaacaagaggattttctttttcattctagaattatctccttgataacttgatcagatataggacatgacactgaatagagtccaacagtacaaaaaaaattcagtatgttctagctacttcacacatgtgtacgcgacagttatttttacagtaaggtattttcgagaaaaatgcattacgtgttttggaaaatagagtaatttaaaaaatatatttgaaatgaaaatctccaacacattagaagatgatgatgttagatgcccatcgtgtgccacaagtggttttttcattatgtaaagcacccgttgaattaaaagaatttgtttttgttcaacctcttcctgaggcccaagagcatatgggcaattcggatttcctgctggaccacaaggttctgttgatattacatagaacgggtattccagacacttcttatgatgaaagtccaaaagtggcatccaatttaaggccccatctttcgttgccattcttcattcctacaaaggacgaacttggattacatcaactttggacccattggttttgtcgctgtcgtcaactgacagtgattcatcactggtgatgataaaaatgatggaagaagagttgaaagtcacttttttctttggcctgtccccatctttctgtgacatcacaatgggtctgatctgcatttcacttccagctgctggtaggtctttagcaggcctctggcacctcagcagtcggaggcacagaagctgcaaaagggatcttcgaaactgggcagagaaaaaataaagtggaatattaagtaaaagttgggcactaatctggattaacattcgaggaaatcagttgagctgaatttaagttgttttttgtttgttagcaggtgtggatgtggggttatgtggtcatgctcagatctacctaaatcaccccagagctttatgtcttttattcattctaattcttattaaccggaatatgtaggaccatttcaataccttgtaatcctccaagcttcaatctgcacacactttctatgagggcaggtacaactattaagagattttgaacattaagttagtccacaaatattcagtgggcatctactaggtgacagccactgtgctataattagagactttttactataagcatcaaaaacagataaggctcttcctggcagagtttacagcctggtgtacttgctaatgtctctttaattaggtgaagaattttttttttctatcgaaattactaatcagttggggaaaaaaatactatagcagacagcactaatgtcatcaacaaacattgttcttctccgtgtcctgggtacaacatcgaataatatttcttggcctcctttccgcttctcctctctgctgttcctctctacaagaacctggggggccaacgcctaaagatcataatatcacacaatggaaggaacctagattcctaaatgactgcataggacagatcccatctcctccacccaatacattattagactgaactgtgacctgaaatgagcaataaactctgtattaattcactgaaatgttggggttgcttgttatagtagtcggtccatcatgaccagtaaaacataaatcaaaagttaatgtaattgttatcccattatttagagcgaaataaatgttgaatatatggactttctcagattaggaaataccaattaaaaatataataaat

SEQ ID NO: 349919 - DNA, 4342 bp, Homo sapiens
ttttttttttggttatttcccagtcatctctctcagatgctcaggagccagagatattttgtttcctcctttccttgtgctcgcgtgactggtttacacatgacgttggaggttgatagagggtttatgcataagaacacactgtcaacgctggtttggggcactagagaacaaagataaagcaataatatagattaattttgttgtaatttttatttaatcacaacaggaaatgctctgtgtattgtcaatagtcatagattgttggttatacagaatggttatttatagtttaaaaaaattagcgagagcattggtagtgaacgtaccatttaatttgacctgtgtagagttcagcacatttttatagaaggttttggaaagatgtattatttaacttacaggtttgtgtcttcctgtgttctcaagattgagaatcccagatgatcacgcgatttcagacctatccatgtacaattacatagagatgcgagcacatgtcaactcaagctggttcatttttcagaagaacatggagagatttcttcatgcgattatgccatcgacctttatccctctctatacaatggtcactttttccagaataagataccatgaggctgtgcagcgttggcattggcaaaaaaaggtgataaacaaaggactctttttcttgggatcactgatagccatcagcagtacctacctacttatacactacatgtcaccacgatctttcctccgcttgagaagaccatggaactggatagctcacttccggaatacaacatgtttccccgcaaaggccgtggactccctagaacaaatttccaatctcattagcaggtgatagaaaggttttgtggtagcaaatgcatgatttctctgtgaccaaaattaagcatgaaaaaaatgtttccattgccatatttgattcactagtggaagatagtgttctgcttataattaaactgaatgtagagtatctctgtatgttaattgcaattactggttggggggtgcattttaaaagatgaaacatgcagcttccctacattacacacactcaggttgagtcattctaactataaaagtgcaatgactaagatccttcacttctctgaaagtaaggccctagatgcctcagggaagacagtaatcatgccttttctttaaaagacacaataggactcgcaacagcattgactcaacacctaggactaaaaatcacaacttaactagcatgttaactgcacttttcattacgtgaatggaacttacctaaccacagggctcagacttactagataaaaccagaaatggaaataaggaattcaggggagttccagagacttacaaaatgaactcattttattttcccaccttcaaatataagtattatcatctatctgtttatcgtctatctatctatcatctatctatctatctatcatctatctatctatctatctatctatctatctatctatctatctatctatctctatttatttatgtatttagagatcaggtctcactctgttgaccaggctggagtgcagtggtgagatctgggttcactgcaacctctgcctcctgggctcaagcaatcctcccacttcagcctcccaaatagctggggctaccatggtatttttcagtagagaccgggtcttgccatgctgcccaggccagtctcaaactcctggcctcatgtgatctgcccacctcagcctcccaaagtacagggattagagttgtgagccaccgctgccagcccagagttaccctctaaagataagaaaaaggctattaatatcatactaagtgaaggacaggaaagggttttattcataaattaaatgtctacatgtgccagaatggaaaggaaacaaggggagacaacttttatagaaatacaaagccattactttattcaatttcagaccctcagaagcaatttactaatttattcttcgactacatactgcagcagaaccagcaatacacttgatttttaaaagcacatttagtgaaatgttttctttggttcatccttctttaacaggctgctgagtcactcagaaatccttcaaacatgattaattatgaagatgaaacactagagtcatataagaaataaaaattgggcaataaaataaaatgattcagtgtttcttttctatattgtcaatgaaaaccttgagttctaataatccatgttcagtttgtagggaaagaaaaaataatttttccttctacccactttaggttccttggctggggcccctataacaaaagacagattgacaagagaaaaacaaacataaatttattagcgggtatatgtaatatatatgtgggaaatacaggggaatgagcaaatctcaaagagctggcgtcttagaactccctggcttatatagcatcgacaaagaacagtaaatttttagagaaacaacaaaacaaagaaaaagagctttgagtctgtaggggcagcaatttgggggaagcaaatatatgggagtttgccttgtagattcctctggtgctggtctccaggctgacaaggattcaaagttgtctctgaaactcctctttgtcatactgcacatataaaacgtcttttgtttccaacaagaggattttctttttcattctagaattatctccttgataacttgatcagatataggacatgacactgaatagagtccaacagtacaaaaaaaattcagtatgttctagctacttcacacatgtgtacgcgacagttatttttacagtaaggtattttcgagaaaaatgcattacgtgttttggaaaatagagtaatttaaaaaatatatttgaaatgaaaatctccaacacattagaagatgatgatgttagatgcccatcgtgtgccacaagtggttttttcattatgtaaagcacccgttgaattaaaagaatttgtttttgttcaacctcttcctgaggcccaagagcatatgggcaattcggatttcctgctggaccacaaggttctgttgatattacatagaacgggtattccagacacttcttatgatgaaagtccaaaagtggcatccaatttaaggccccatctttcgttgccattcttcattcctacaaaggacgaacttggattacatcaactttggacccattggttttgtcgctgtcgtcaactgacagtgattcatcactggtgatgataaaaatgatggaagaagagttgaaagtcacttttttctttggcctgtccccatctttctgtgacatcacaatgggtctgatctgcatttcacttccagctgctggtaggtctttagcaggcctctggcacctcagcagtcggaggcacagaagctgcaaaagggatcttcgaaactgggcagagaaaaaataaagtggaatattaagtaaaagttgggcactaatctggattaacattcgaggaaatcagttgagctgaatttaagttgttttttgtttgttagcaggtgtggatgtggggttatgtggtcatgctcagatctacctaaatcaccccagagctttatgtcttttattcattctaattcttattaaccggaatatgtaggaccatttcaataccttgtaatcctccaagcttcaatctgcacacactttctatgagggcaggtacaactattaagagattttgaacattaagttagtccacaaatattcagtgggcatctactaggtgacagccactgtgctataattagagactttttactataagcatcaaaaacagataaggctcttcctggcagagtttacagcctggtgtacttgctaatgtctctttaattaggtgaagaattttttttttctatcgaaattactaatcagttggggaaaaaaatactatagcagacagcactaatgtcatcaacaaacattgttcttctccgtgtcctgggtacaacatcgaataatatttcttggcctcctttccgcttctcctctctgctgttcctctctacaagaacctggggggccaacgcctaaagatcataatatcacacaatggaaggaacctagattcctaaatgactgcataggacagatcccatctcctccacccaatacattattagactgaactgtgacctgaaatgagcaataaactctgtattaattcactgaaatgttggggttgcttgttatagtagtcggtccatcatgaccagtaaaacataaatcaaaagttaatgtaattgttatcccattatttagagcgaaataaatgttgaatatatggactttctcagattaggaaataccaattaaaaatataataaat

SEQ ID NO: 349920 - DNA, 5209 bp, Homo sapiens
gcttaaaaatttctgtgtcttacacagaagatagaaaaaatagagtgtctccaattggatggattttttaaaaaatttggttattgtaatggatttattttttcttagagctgagctgattgtactttggccaactaatgggttaatactgtcaagggaaattagccctgactaaacattgccgctggctcatgaatgcactaggcttggggcagtataaaaactcagagaaatcagtgtgtaggagacacagaaatcagtgtcactcagtgacagaagcaacaataattgtgaaaaatacttcagcagttatggactcatctgtcattcaaaggaaaaaagtagctgtcattggtggtggcttggttggctcattacaagcatgctttcttgcaaagaggaatttccagattgatgtatatgaagctagggaagatactcgagtggctaccttcacacgtggaagaagcattaacttagccctttctcatagaggacgacaagccttgaaagctgttggcctggaagatcagattgtatcccaaggtattcccatgagagcaagaatgatccactctctttcaggaaaaaagtctgcaattccctatgggacaaagtctcagtatattctttctgtaagcagagaaaatctaaacaaggatctattgactgctgctgagaaataccccaatgtgaaaatgcactttaaccacaggctgttgaaatgtaatccagaggaaggaatgatcacagtgcttggatctgacaaagttcccaaagatgtcacttgtgacctcattgtaggatgtgatggagcctattcaactgtcagatctcacctgatgaagaaacctcgctttgattacagtcagcagtacattcctcatgggtacatggagttgactattccacctaagaacggagattatgccatggaacctaattatctgcatatttggcctagaaatacctttatgatgattgcacttcctaacatgaacaaatcattcacatgtactttgttcatgccctttgaagagtttgaaaaacttctaaccagtaatgatgtggtagatttcttccagaaatactttccggatgccatccctctaattggagagaaactcctagtgcaagatttcttcctgttgcctgcccagcccatgatatctgtaaagtgctcttcatttcactttaaatctcactgtgtactgctgggagatgcagctcatgctatagtgccgttttttgggcaaggaatgaatgcgggctttgaagactgcttggtatttgatgagttaatggataaattcagtaacgaccttagtttgtgtcttcctgtgttctcaagattgagaatcccagatgatcacgcgatttcagacctatccatgtacaattacatagagatgcgagcacatgtcaactcaagctggttcatttttcagaagaacatggagagatttcttcatgcgattatgccatcgacctttatccctctctatacaatggtcactttttccagaataagataccatgaggctgtgcagcgttggcattggcaaaaaaaggtgataaacaaaggactctttttcttgggatcactgatagccatcagcagtacctacctacttatacactacatgtcaccacgatctttcctccgcttgagaagaccatggaactggatagctcacttccggaatacaacatgtttccccgcaaaggccgtggactccctagaacaaatttccaatctcattagcaggtgatagaaaggttttgtggtagcaaatgcatgatttctctgtgaccaaaattaagcatgaaaaaaatgtttccattgccatatttgattcactagtggaagatagtgttctgcttataattaaactgaatgtagagtatctctgtatgttaattgcaattactggttggggggtgcattttaaaagatgaaacatgcagcttccctacattacacacactcaggttgagtcattctaactataaaagtgcaatgactaagatccttcacttctctgaaagtaaggccctagatgcctcagggaagacagtaatcatgccttttctttaaaagacacaataggactcgcaacagcattgactcaacacctaggactaaaaatcacaacttaactagcatgttaactgcacttttcattacgtgaatggaacttacctaaccacagggctcagacttactagataaaaccagaaatggaaataaggaattcaggggagttccagagacttacaaaatgaactcattttattttcccaccttcaaatataagtattatcatctatctgtttatcgtctatctatctatcatctatctatctatctatcatctatctatctatctatctatctatctatctatctatctatctatctatctctatttatttatgtatttagagatcaggtctcactctgttgaccaggctggagtgcagtggtgagatctgggttcactgcaacctctgcctcctgggctcaagcaatcctcccacttcagcctcccaaatagctggggctaccatggtatttttcagtagagaccgggtcttgccatgctgcccaggccagtctcaaactcctggcctcatgtgatctgcccacctcagcctcccaaagtacagggattagagttgtgagccaccgctgccagcccagagttaccctctaaagataagaaaaaggctattaatatcatactaagtgaaggacaggaaagggttttattcataaattaaatgtctacatgtgccagaatggaaaggaaacaaggggagacaacttttatagaaatacaaagccattactttattcaatttcagaccctcagaagcaatttactaatttattcttcgactacatactgcagcagaaccagcaatacacttgatttttaaaagcacatttagtgaaatgttttctttggttcatccttctttaacaggctgctgagtcactcagaaatccttcaaacatgattaattatgaagatgaaacactagagtcatataagaaataaaaattgggcaataaaataaaatgattcagtgtttcttttctatattgtcaatgaaaaccttgagttctaataatccatgttcagtttgtagggaaagaaaaaataatttttccttctacccactttaggttccttggctggggcccctataacaaaagacagattgacaagagaaaaacaaacataaatttattagcgggtatatgtaatatatatgtgggaaatacaggggaatgagcaaatctcaaagagctgagaaacaacaaaacaaagaaaaagagctttgagtctgtaggggcagcaatttgggggaagcaaatatatgggagtttgccttgtagattcctctggtgctggtctccaggctgacaaggattcaaagttgtctctgaaactcctctttgtcatactgcacatataaaacgtcttttgtttccaacaagaggattttctttttcattctagaattatctccttgataacttgatcagatataggacatgacactgaatagagtccaacagtacaaaaaaaattcagtatgttctagctacttcacacatgtgtacgcgacagttatttttacagtaaggtattttcgagaaaaatgcattacgtgttttggaaaatagagtaatttaaaaaatatatttgaaatgaaaatctccaacacattagaagatgatgatgttagatgcccatcgtgtgccacaagtggttttttcattatgtaaagcacccgttgaattaaaagaatttgtttttgttcaacctcttcctgaggcccaagagcatatgggcaattcggatttcctgctggaccacaaggttctgttgatattacatagaacgggtattccagacacttcttatgatgaaagtccaaaagtggcatccaatttaaggccccatctttcgttgccattcttcattcctacaaaggacgaacttggattacatcaactttggacccattggttttgtcgctgtcgtcaactgacagtgattcatcactggtgatgataaaaatgatggaagaagagttgaaagtcacttttttctttggcctgtccccatctttctgtgacatcacaatgggtctgatctgcatttcacttccagctgctggtaggtctttagcaggcctctggcacctcagcagtcggaggcacagaagctgcaaaagggatcttcgaaactgggcagagaaaaaataaagtggaatattaagtaaaagttgggcactaatctggattaacattcgaggaaatcagttgagctgaatttaagttgttttttgtttgttagcaggtgtggatgtggggttatgtggtcatgctcagatctacctaaatcaccccagagctttatgtcttttattcattctaattcttattaaccggaatatgtaggaccatttcaataccttgtaatcctccaagcttcaatctgcacacactttctatgagggcaggtacaactattaagagattttgaacattaagttagtccacaaatattcagtgggcatctactaggtgacagccactgtgctataattagagactttttactataagcatcaaaaacagataaggctcttcctggcagagtttacagcctggtgtacttgctaatgtctctttaattaggtgaagaattttttttttctatcgaaattactaatcagttggggaaaaaaatactatagcagacagcactaatgtcatcaacaaacattgttcttctccgtgtcctgggtacaacatcgaataatatttcttggcctcctttccgcttctcctctctgctgttcctctctacaagaacctggggggccaacgcctaaagatcataatatcacacaatggaaggaacctagattcctaaatgactgcataggacagatcccatctcctccacccaatacattattagactgaactgtgacctgaaatgagcaataaactctgtattaattcactgaaatgttggggttgcttgttatagtagtcggtccatcatgaccagtaaaacataaatcaaaagttaatgtaattgttatcccattatttagagcgaaataaatgttgaatatatggactttctcagattaggaaataccaattaaaaatataataaat

SEQ ID NO: 349921 - DNA, 5210 bp, Homo sapiens
gcttaaaaatttctgtgtcttacacagaagatagaaaaaatagagtgtctccaattggatggattttttaaaaaatttggttattgtaatggatttattttttcttagagctgagctgattgtactttggccaactaatgggttaatactgtcaagggaaattagccctgactaaacattgccgctggctcatgaatgcactaggcttggggcagtataaaaactcagagaaatcagtgtgtaggagacacagaaatcagtgtcactcagtgacagaagcaacaataattgtgaaaaatacttcagcagttatggactcatctgtcattcaaaggaaaaaagtagctgtcattggtggtggcttggttggctcattacaagcatgctttcttgcaaagaggaatttccagattgatgtatatgaagctagggaagatactcgagtggctaccttcacacgtggaagaagcattaacttagccctttctcatagaggacgacaagccttgaaagctgttggcctggaagatcagattgtatcccaaggtattcccatgagagcaagaatgatccactctctttcaggaaaaaagtctgcaattccctatgggacaaagtctcagtatattctttctgtaagcagagaaaatctaaacaaggatctattgactgctgctgagaaataccccaatgtgaaaatgcactttaaccacaggctgttgaaatgtaatccagaggaaggaatgatcacagtgcttggatctgacaaagttcccaaagatgtcacttgtgacctcattgtaggatgtgatggagcctattcaactgtcagatctcacctgatgaagaaacctcgctttgattacagtcagcagtacattcctcatgggtacatggagttgactattccacctaagaacggagattatgccatggaacctaattatctgcatatttggcctagaaatacctttatgatgattgcacttcctaacatgaacaaatcattcacatgtactttgttcatgccctttgaagagtttgaaaaacttctaaccagtaatgatgtggtagatttcttccagaaatactttccggatgccatccctctaattggagagaaactcctagtgcaagatttcttcctgttgcctgcccagcccatgatatctgtaaagtgctcttcatttcactttaaatctcactgtgtactgctgggagatgcagctcatgctatagtgccgttttttgggcaaggaatgaatgcgggctttgaagactgcttggtatttgatgagttaatggataaattcagtaacgaccttagtttgtgtcttcctgtgttctcaagattgagaatcccagatgatcacgcgatttcagacctatccatgtacaattacatagagatgcgagcacatgtcaactcaagctggttcatttttcagaagaacatggagagatttcttcatgcgattatgccatcgacctttatccctctctatacaatggtcactttttccagaataagataccatgaggctgtgcagcgttggcattggcaaaaaaaggtgataaacaaaggactctttttcttgggatcactgatagccatcagcagtacctacctacttatacactacatgtcaccacgatctttcctccgcttgagaagaccatggaactggatagctcacttccggaatacaacatgtttccccgcaaaggccgtggactccctagaacaaatttccaatctcattagcaggtgatagaaaggttttgtggtagcaaatgcatgatttctctgtgaccaaaattaagcatgaaaaaaatgtttccattgccatatttgattcactagtggaagatagtgttctgcttataattaaactgaatgtagagtatctctgtatgttaattgcaattactggttggggggtgcattttaaaagatgaaacatgcagcttccctacattacacacactcaggttgagtcattctaactataaaagtgcaatgactaagatccttcacttctctgaaagtaaggccctagatgcctcagggaagacagtaatcatgccttttctttaaaagacacaataggactcgcaacagcattgactcaacacctaggactaaaaatcacaacttaactagcatgttaactgcacttttcattacgtgaatggaacttacctaaccacagggctcagacttactagataaaaccagaaatggaaataaggaattcaggggagttccagagacttacaaaatgaactcattttattttcccaccttcaaatataagtattatcatctatctgtttatcgtctatctatctatcatctatctatctatctatcatctatctatctatctatctatctatctatctatctatctatctatctatctctatttatttatgtatttagagatcaggtctcactctgttgaccaggctggagtgcagtggtgagatctgggttcactgcaacctctgcctcctgggctcaagcaatcctcccacttcagcctcccaaatagctggggctaccatggtatttttcagtagagaccgggtcttgccatgctgcccaggccagtctcaaactcctggcctcatgtgatctgcccacctcagcctcccaaagtacagggattagagttgtgagccaccgctgccagcccagagttaccctctaaagataagaaaaaggctattaatatcatactaagtgaaggacaggaaagggttttattcataaattaaatgtctacatgtgccagaatggaaaggaaacaaggggagacaacttttatagaaatacaaagccattactttattcaatttcagaccctcagaagcaatttactaatttattcttcgactacatactgcagcagaaccagcaatacacttgatttttaaaagcacatttagtgaaatgttttctttggttcatccttctttaacaggctgctgagtcactcagaaatccttcaaacatgattaattatgaagatgaaacactagagtcatataagaaataaaaattgggcaataaaataaaatgattcagtgtttcttttctatattgtcaatgaaaaccttgagttctaataatccatgttcagtttgtagggaaagaaaaaataatttttccttctacccactttaggttccttggctggggcccctataacaaaagacagattgacaagagaaaaacaaacataaatttattagcgggtatatgtaatatatatgtgggaaatacaggggaatgagcaaatctcaaagagctggcgtcttagaactccctggcttatatagcatcgacaaagaacagtaaatttttagagaaacaacaaaacaaagaaaaagagctttgagtctgtaggggcagcaatttgggggaagcaaatatatgggagtttgccttgtagattcctctggtgctggtctccaggctgacaaggattgtttccaacaagaggattttctttttcattctagaattatctccttgataacttgatcagatataggacatgacactgaatagagtccaacagtacaaaaaaaattcagtatgttctagctacttcacacatgtgtacgcgacagttatttttacagtaaggtattttcgagaaaaatgcattacgtgttttggaaaatagagtaatttaaaaaatatatttgaaatgaaaatctccaacacattagaagatgatgatgttagatgcccatcgtgtgccacaagtggttttttcattatgtaaagcacccgttgaattaaaagaatttgtttttgttcaacctcttcctgaggcccaagagcatatgggcaattcggatttcctgctggaccacaaggttctgttgatattacatagaacgggtattccagacacttcttatgatgaaagtccaaaagtggcatccaatttaaggccccatctttcgttgccattcttcattcctacaaaggacgaacttggattacatcaactttggacccattggttttgtcgctgtcgtcaactgacagtgattcatcactggtgatgataaaaatgatggaagaagagttgaaagtcacttttttctttggcctgtccccatctttctgtgacatcacaatgggtctgatctgcatttcacttccagctgctggtaggtctttagcaggcctctggcacctcagcagtcggaggcacagaagctgcaaaagggatcttcgaaactgggcagagaaaaaataaagtggaatattaagtaaaagttgggcactaatctggattaacattcgaggaaatcagttgagctgaatttaagttgttttttgtttgttagcaggtgtggatgtggggttatgtggtcatgctcagatctacctaaatcaccccagagctttatgtcttttattcattctaattcttattaaccggaatatgtaggaccatttcaataccttgtaatcctccaagcttcaatctgcacacactttctatgagggcaggtacaactattaagagattttgaacattaagttagtccacaaatattcagtgggcatctactaggtgacagccactgtgctataattagagactttttactataagcatcaaaaacagataaggctcttcctggcagagtttacagcctggtgtacttgctaatgtctctttaattaggtgaagaattttttttttctatcgaaattactaatcagttggggaaaaaaatactatagcagacagcactaatgtcatcaacaaacattgttcttctccgtgtcctgggtacaacatcgaataatatttcttggcctcctttccgcttctcctctctgctgttcctctctacaagaacctggggggccaacgcctaaagatcataatatcacacaatggaaggaacctagattcctaaatgactgcataggacagatcccatctcctccacccaatacattattagactgaactgtgacctgaaatgagcaataaactctgtattaattcactgaaatgttggggttgcttgttatagtagtcggtccatcatgaccagtaaaacataaatcaaaagttaatgtaattgttatcccattatttagagcgaaataaatgttgaatatatggactttctcagattaggaaataccaattaaaaatataataaat

SEQ ID NO: 349922 - DNA, 1583 bp, Homo sapiens
gcttaaaaatttctgtgtcttacacagaagatagaaaaaatagagtgtctccaattggatggattttttaaaaaatttggttattgtaatggatttattttttcttagagctgagctgattgtactttggccaactaatgggttaatactgtcaagggaaattagccctgactaaacattgccgctggctcatgaatgcactaggcttggggcagtataaaaactcagagaaatcagtgtgtaggagacacagaaatcagtgtcactcagtgacagaagcaacaataattgtgaaaaatacttcagcagttatggactcatctgtcattcaaaggaaaaaagtagctgtcattggtggtggcttggttggctcattacaagcatgctttcttgcaaagaggaatttccagattgatgtatatgaagctagggaagatactcgagtggctaccttcacacgtggaagaagcattaacttagccctttctcatagaggacgacaagccttgaaagctgttggcctggaagatcagattgtatcccaaggtattcccatgagagcaagaatgatccactctctttcaggaaaaaagtctgcaattccctatgggacaaagtctcagtatattctttctgtaagcagagaaaatctaaacaaggatctattgactgctgctgagaaataccccaatgtgaaaatgcactttaaccacaggctgttgaaatgtaatccagaggaaggaatgatcacagtgcttggatctgacaaagttcccaaagatgtcacttgtgacctcattgtaggatgtgatggagcctattcaactgtcagatctcacctgatgaagaaacctcgctttgattacagtcagcagtacattcctcatgggtacatggagttgactattccacctaagaacggagattatgccatggaacctaattatctgcatatttggcctagaaatacctttatgatgattgcacttcctaacatggtagtatagaattttttatcaactgtaattttgcatttgtaattaatgttgtttattacttacatttgtacttagaatgtatctacctaattgatctcttcattgtttaatccatttagtgattatagctttgaaactttgggattactgaggaaaaatctgaaggatttccaattatttactttggaaaggagatttaacttacatgaatggataacaagagtttatgtgtggtggtgcctgtcatctccactaaagacaatttaggaggaaacagcccttccagtaaagccaaagagatttaggttatctatcaggaagtgattcagcctttaaggtctgtagtacattggaatacgcattatcaaaagagagcatggggatgggcgcagcggctcacacctgtaataccagcactttgggaggccaaagcgggaggattgcttgagctcaggagttcaagactgatgtggccaacatagcaagaccttgccctgtgccgaatttttgccttgaggccaaattcctataggagtcgattaaattcttaacatgtcatactggttcctggtgaaatgtatacgt

SEQ ID NO: 349923 - DNA, 2033 bp, Homo sapiens
gcttaaaaatttctgtgtcttacacagaagatagaaaaaatagagtgtctccaattggatggattttttaaaaaatttggttattgtaatggatttattttttcttagagctgagctgattgtactttggccaactaatgggttaatactgtcaagggaaattagccctgactaaacattgccgctggctcatgaatgcactaggcttggggcagtataaaaactcagagaaatcagtgtgtaggagacacagaaatcagtgtcactcagtgacagaagcaacaataattgtgaaaaatacttcagcagttatggactcatctgtcattcaaaggaaaaaagtagctgtcattggtggtggcttggttggctcattacaagcatgctttcttgcaaagaggaatttccagattgatgtatatgaagctagggaagatactcgagtggctaccttcacacgtggaagaagcattaacttagccctttctcatagaggacgacaagccttgaaagctgttggcctggaagatcagattgtatcccaaggtattcccatgagagcaagaatgatccactctctttcaggaaaaaagtctgcaattccctatgggacaaagtctcagtatattctttctgtaagcagagaaaatctaaacaaggatctattgactgctgctgagaaataccccaatgtgaaaatgcactttaaccacaggctgttgaaatgtaatccagaggaaggaatgatcacagtgcttggatctgacaaagttcccaaagatgtcacttgtgacctcattgtaggatgtgatggagcctattcaactgtcagatctcacctgatgaagaaacctcgctttgattacagtcagcagtacattcctcatgggtacatggagttgactattccacctaagaacggagattatgccatggaacctaattatctgcatatttggcctagaaatacctttatgatgattgcacttcctaacatgaacaaatcattcacatgtactttgttcatgccctttgaagagtttgaaaaacttctaaccagtaatgatgtggtagatttcttccagaaatactttccggatgccatccctctaattggagagaaactcctagtgcaagatttcttcctgttgcctgcccagcccatgatatctgtaaagtgctcttcatttcactttaaatctcactgtgtactgctgggagatgcagctcatgctatagtgccgttttttgggcaaggaatgaatgcgggctttgaagactgcttggtatttgatgagttaatggataaattcagtaacgaccttagtttgtgtcttcctgtgttctcaagattgagaatcccagatgatcacgcgatttcagacctatccatgtacaattacatagagaagaacatggagagatttcttcatgcgattatgccatcgacctttatccctctctatacaatggtcactttttccagaataagataccatgaggctgtgcagcgttggcattggcaaaaaaaggtgataaacaaaggactctttttcttgggatcactgatagccatcagcagtacctacctacttatacactacatgtcaccacgatctttcctccgcttgagaagaccatggaactggatagctcacttccggaatacaacatgtttccccgcaaaggccgtggactccctagaacaaatttccaatctcattagcaggtgatagaaaggttttgtggtagcaaatgcatgatttctctgtgaccaaaattaagcatgaaaaaaatgtttccattgccatatttgattcactagtggaagatagtgttctgcttataattaaactgaatgtagagcaataaacaacacaacaccaaaaaaaaaactttggggcgcgctcgggcccccaaaaagattttttaaacccttcgtgtggcgcgcgcggccccaagggtcatgcacactggccacagggttcccaagaaaaacctggcccgacaaggggctgggttccccccaataa

SEQ ID NO: 349924 - DNA, 1056 bp, Homo sapiens
gcttaaaaatttctgtgtcttacacagaagatagaaaaaatagagtgtctccaattggatggattttttaaaaaatttggttattgtaatggatttattttttcttagagctgagctgattgtactttggccaactaatgggttaatactgtcaagggaaattagccctgactaaacattgccgctggctcatgaatgcactaggcttggggcagtataaaaactcagagaaatcagtgtgtaggagacacagaaatcagtgtcactcagtgacagaagcaacaataattgtgaaaaatacttcagcagttatggactcatctgtcattcaaaggaaaaaagtagctgtcattggtggtggcttggttggctcattacaagcatgctttcttgcaaagaggaatttccagattgatgtatatgaagctagggaagatactcgagtggctaccttcacacgtggaagaagcattaacttagccctttctcatagaggacgacaagccttgaaagctgttggcctggaagatcagattgtatcccaaggtattcccatgagagcaagaatgatccactctctttcaggaaaaaagtctgcaattccctatgggacaaagtctcagtatattctttctgtaagcagagaaaatctaaacaaggatctattgactgctgctgagaaataccccaatgtgaaaatgcactttaaccacaggctgttgaaatgtaatccagaggaaggaatgatcacagtgcttggatctgacaaagttcccaaagatgtcacttgtgacctcattgtaggatgtgatggagcctattcaactgtcagatctcacctgatgaagaaacctcgctttgattacagtcagcagtacattcctcatgggtacatggagttgactattccacctaagaacggagattatgccatggaacctaattatctgcatatttggcctagaaatacctttatcaccactgctcagccctagcgctgagccatcatactccccccggaaccccaagactttggtttcccgaactgccccgcgg

SEQ ID NO: 349925 - DNA, 608 bp, Homo sapiens
caaaatggattgggaatgacattatggaaacaaaaaattatttgactactttgtgtttggcattgcgatgagtgggaatgaagaataatactaagtcgcagtgagaaatagctgtatttgttcaaaagcgttctttaagactgtcattattgcagatgcgagcacatgtcaactcaagctggttcatttttcagaagaacatggagagatttcttcatgcgattatgccatcgacctttatccctctctatacaatggtaaggtctggactgaagacttttcctcattttgattttctgtttagctgttaaagaatacacaagaatactttttaaacttccctgcaggtcactttttccagaataagataccatgaggctgtgcagcgttggcattggcaaaaaaaggttggaacagttacattttatttattttttaatgtggtgttttgaaatgtcatagtattatgattatgtttgtttccaacaaatacagaaataatgggacagacaccaactgtttgccttccaaacagaaactgtcctgagtacagagagggaacagtgcttactgaaaaacattacaaggaggtggcaaagagagctttt

SEQ ID NO: 349926 - DNA, 458 bp, Homo sapiens
gcttcaggatcaccattttcattgaaggagtttctaccacgttgggcttctatggtctttcacaatttttaaaatttcttggagaatatatgaaattacatttaaaaatcaacttctatctttcttgcataatgccatgttactgtcattgaagtcaatatttctggtttcatttcagattgtatcccaaggtattcccatgagagcaagaatgatccactctctttcaggaaaaaagtctgcaattccctatgggacaaagtctcaggtaggtttaccccggagatcattgtgcattgattataaggaagtcaaagtctggaacttgcctcttgtttgatggcccctctctctccagccctatctctgacattgcttggctcagtctagaccccaggaatacagatactagttggcaagtttattcagaggagatgctcaaaacaagccccagccca

SEQ ID NO: 349927 - DNA, 447 bp, Homo sapiens
atgcagccaaacttttatttttaatgtgattaacattgttgcagaccaagaaggtaattagaataatggaattttaggactggaaaaacttcagtttttcccttttctgttttcttcttggcattcttgtttttcaacaaaacttcgtgatagttaatttagtaaacctgaaagaatttagcaggatttaatacctaatttgatgtctttatattcggattattttcctttgaaggaaactcctagtgcaagatttcttcctgttgcctgcccagcccatgatatctgtaaagtgctcttcatttcactttaaatctcactgtgtactgctgggagatgcagctcatgctatagtgccgttttttgggcaaggaatgaatgcggtaagttctttttccctaggtaagtccctcaaatacttctgggtcagtctcagctaacaagtct

SEQ ID NO: 349928 - DNA, 1866 bp, Homo sapiens
gcttaaaaatttctgtgtcttacacagaagatagaaaaaatagagtgtctccaattggatggattttttaaaaaatttggttattgtaatggatttattttttcttagagctgagctgattgtactttggccaactaatgggttaatactgtcaagggaaattagccctgactaaacattgccgctggctcatgaatgcactaggcttggggcagtataaaaactcagagaaatcagtgtgtaggagacacagaaatcagtgtcactcagtgacagaagcaacaataattgtgaaaaatacttcagcagttatggactcatctgtcattcaaaggaaaaaagtagctgtcattggtggtggcttggttggctcattacaagcatgctttcttgcaaagaggaatttccagattgatgtatatgaagctagggaagatactcgagtggctaccttcacacgtggaagaagcattaacttagccctttctcatagaggacgacaagccttgaaagctgttggcctggaagatcagattgtatcccaaggtattcccatgagagcaagaatgatccactctctttcaggaaaaaagtctgcaattccctatgggacaaagtctcagtatattctttctgtaagcagagaaaatctaaacaaggatctattgactgctgctgagaaataccccaatgtgaaaatgcactttaaccacaggctgttgaaatgtaatccagaggaaggaatgatcacagtgcttggatctgacaaagttcccaaagatgtcacttgtgacctcattgtaggatgtgatggagcctattcaactgtcagatctcacctgatgaagaaacctcgctttgattacagtcagcagtacattcctcatgggtacatggagttgactattccacctaagaacggagattatgccatggaacctaattatctgcatatttggcctagaaatacctttatgatgattgcacttcctaacatgaacaaatcattcacatgtactttgttcatgccctttgaagagtttgaaaaacttctaaccagtaatgatgtggtagatttcttccagaaatactttccggatgccatccctctaattggagagaaactcctagtgcaagatttcttcctgttgcctgcccagcccatgatatctgtaaagtgctcttcatttcactttaaatctcactgtgtactgctgggagatgcagctcatgctatagtgccgttttttgggcaaggaatgaatgcgggctttgaagactgcttggtatttgatgagttaatggataaattcagtaacgaccttagtttgtgtcttcctgtgttctcaagattgagaatcccagatgatcacgcgatttcagacctatccatgtacaattacatagagaagaacatggagagatttcttcatgcgattatgccatcgacctttatccctctctatacaatggtcactttttccagaataagataccatgaggctgtgcagcgttggcattggcaaaaaaaggtgataaacaaaggactctttttcttgggatcactgatagccatcagcagtacctacctacttatacactacatgtcaccacgatctttcctccgcttgagaagaccatggaactggatagctcacttccggaatacaacatgtttccccgcaaaggccgtggactccctagaacaaatttccaatctcattagcaggtgatagaaaggttttgtggtagcaaatgcatgatttctctgtgaccaaaattaagcatgaaaaaaatgtttccattgccatatttgattcactagtggaagatagtgttctgcttataattaaactgaatgtagag

SEQ ID NO: 349929 - DNA, 5096 bp, Homo sapiens
gcttaaaaatttctgtgtcttacacagaagatagaaaaaatagagtgtctccaattggatggattttttaaaaaatttggttattgtaatggatttattttttcttagagctgagctgattgtactttggccaactaatgggttaatactgtcaagggaaattagccctgactaaacattgccgctggctcatgaatgcactaggcttggggcagtataaaaactcagagaaatcagtgtgtaggagacacagaaatcagtgtcactcagtgacagaagcaacaataattgtgaaaaatacttcagcagttatggactcatctgtcattcaaaggaaaaaagtagctgtcattggtggtggcttgattgtatcccaaggtattcccatgagagcaagaatgatccactctctttcaggaaaaaagtctgcaattccctatgggacaaagtctcagtatattctttctgtaagcagagaaaatctaaacaaggatctattgactgctgctgagaaataccccaatgtgaaaatgcactttaaccacaggctgttgaaatgtaatccagaggaaggaatgatcacagtgcttggatctgacaaagttcccaaagatgtcacttgtgacctcattgtaggatgtgatggagcctattcaactgtcagatctcacctgatgaagaaacctcgctttgattacagtcagcagtacattcctcatgggtacatggagttgactattccacctaagaacggagattatgccatggaacctaattatctgcatatttggcctagaaatacctttatgatgattgcacttcctaacatgaacaaatcattcacatgtactttgttcatgccctttgaagagtttgaaaaacttctaaccagtaatgatgtggtagatttcttccagaaatactttccggatgccatccctctaattggagagaaactcctagtgcaagatttcttcctgttgcctgcccagcccatgatatctgtaaagtgctcttcatttcactttaaatctcactgtgtactgctgggagatgcagctcatgctatagtgccgttttttgggcaaggaatgaatgcgggctttgaagactgcttggtatttgatgagttaatggataaattcagtaacgaccttagtttgtgtcttcctgtgttctcaagattgagaatcccagatgatcacgcgatttcagacctatccatgtacaattacatagagatgcgagcacatgtcaactcaagctggttcatttttcagaagaacatggagagatttcttcatgcgattatgccatcgacctttatccctctctatacaatggtcactttttccagaataagataccatgaggctgtgcagcgttggcattggcaaaaaaaggtgataaacaaaggactctttttcttgggatcactgatagccatcagcagtacctacctacttatacactacatgtcaccacgatctttcctccgcttgagaagaccatggaactggatagctcacttccggaatacaacatgtttccccgcaaaggccgtggactccctagaacaaatttccaatctcattagcaggtgatagaaaggttttgtggtagcaaatgcatgatttctctgtgaccaaaattaagcatgaaaaaaatgtttccattgccatatttgattcactagtggaagatagtgttctgcttataattaaactgaatgtagagtatctctgtatgttaattgcaattactggttggggggtgcattttaaaagatgaaacatgcagcttccctacattacacacactcaggttgagtcattctaactataaaagtgcaatgactaagatccttcacttctctgaaagtaaggccctagatgcctcagggaagacagtaatcatgccttttctttaaaagacacaataggactcgcaacagcattgactcaacacctaggactaaaaatcacaacttaactagcatgttaactgcacttttcattacgtgaatggaacttacctaaccacagggctcagacttactagataaaaccagaaatggaaataaggaattcaggggagttccagagacttacaaaatgaactcattttattttcccaccttcaaatataagtattatcatctatctgtttatcgtctatctatctatcatctatctatctatctatcatctatctatctatctatctatctatctatctatctatctatctatctatctctatttatttatgtatttagagatcaggtctcactctgttgaccaggctggagtgcagtggtgagatctgggttcactgcaacctctgcctcctgggctcaagcaatcctcccacttcagcctcccaaatagctggggctaccatggtatttttcagtagagaccgggtcttgccatgctgcccaggccagtctcaaactcctggcctcatgtgatctgcccacctcagcctcccaaagtacagggattagagttgtgagccaccgctgccagcccagagttaccctctaaagataagaaaaaggctattaatatcatactaagtgaaggacaggaaagggttttattcataaattaaatgtctacatgtgccagaatggaaaggaaacaaggggagacaacttttatagaaatacaaagccattactttattcaatttcagaccctcagaagcaatttactaatttattcttcgactacatactgcagcagaaccagcaatacacttgatttttaaaagcacatttagtgaaatgttttctttggttcatccttctttaacaggctgctgagtcactcagaaatccttcaaacatgattaattatgaagatgaaacactagagtcatataagaaataaaaattgggcaataaaataaaatgattcagtgtttcttttctatattgtcaatgaaaaccttgagttctaataatccatgttcagtttgtagggaaagaaaaaataatttttccttctacccactttaggttccttggctggggcccctataacaaaagacagattgacaagagaaaaacaaacataaatttattagcgggtatatgtaatatatatgtgggaaatacaggggaatgagcaaatctcaaagagctggcgtcttagaactccctggcttatatagcatcgacaaagaacagtaaatttttagagaaacaacaaaacaaagaaaaagagctttgagtctgtaggggcagcaatttgggggaagcaaatatatgggagtttgccttgtagattcctctggtgctggtctccaggctgacaaggattcaaagttgtctctgaaactcctctttgtcatactgcacatataaaacgtcttttgtttccaacaagaggattttctttttcattctagaattatctccttgataacttgatcagatataggacatgacactgaatagagtccaacagtacaaaaaaaattcagtatgttctagctacttcacacatgtgtacgcgacagttatttttacagtaaggtattttcgagaaaaatgcattacgtgttttggaaaatagagtaatttaaaaaatatatttgaaatgaaaatctccaacacattagaagatgatgatgttagatgcccatcgtgtgccacaagtggttttttcattatgtaaagcacccgttgaattaaaagaatttgtttttgttcaacctcttcctgaggcccaagagcatatgggcaattcggatttcctgctggaccacaaggttctgttgatattacatagaacgggtattccagacacttcttatgatgaaagtccaaaagtggcatccaatttaaggccccatctttcgttgccattcttcattcctacaaaggacgaacttggattacatcaactttggacccattggttttgtcgctgtcgtcaactgacagtgattcatcactggtgatgataaaaatgatggaagaagagttgaaagtcacttttttctttggcctgtccccatctttctgtgacatcacaatgggtctgatctgcatttcacttccagctgctggtaggtctttagcaggcctctggcacctcagcagtcggaggcacagaagctgcaaaagggatcttcgaaactgggcagagaaaaaataaagtggaatattaagtaaaagttgggcactaatctggattaacattcgaggaaatcagttgagctgaatttaagttgttttttgtttgttagcaggtgtggatgtggggttatgtggtcatgctcagatctacctaaatcaccccagagctttatgtcttttattcattctaattcttattaaccggaatatgtaggaccatttcaataccttgtaatcctccaagcttcaatctgcacacactttctatgagggcaggtacaactattaagagattttgaacattaagttagtccacaaatattcagtgggcatctactaggtgacagccactgtgctataattagagactttttactataagcatcaaaaacagataaggctcttcctggcagagtttacagcctggtgtacttgctaatgtctctttaattaggtgaagaattttttttttctatcgaaattactaatcagttggggaaaaaaatactatagcagacagcactaatgtcatcaacaaacattgttcttctccgtgtcctgggtacaacatcgaataatatttcttggcctcctttccgcttctcctctctgctgttcctctctacaagaacctggggggccaacgcctaaagatcataatatcacacaatggaaggaacctagattcctaaatgactgcataggacagatcccatctcctccacccaatacattattagactgaactgtgacctgaaatgagcaataaactctgtattaattcactgaaatgttggggttgcttgttatagtagtcggtccatcatgaccagtaaaacataaatcaaaagttaatgtaattgttatcccattatttagagcgaaataaatgttgaatatatggactttctcagattaggaaataccaattaaaaatataataaat

SEQ ID NO: 349930 - DNA, 5207 bp, Homo sapiens
gcttaaaaatttctgtgtcttacacagaagatagaaaaaatagagtgtctccaattggatggattttttaaaaaatttggttattgtaatggatttattttttcttagagctgagctgattgtactttggccaactaatgggttaatactgtcaagggaaattagccctgactaaacattgccgctggctcatgaatgcactaggcttggggcagtataaaaactcagagaaatcagtgtgtaggagacacagaaatcagtgtcactcagtgacagaagcaacaataattgtgaaaaatacttcagcagttatggactcatctgtcattcaaaggaaaaaagtagctgtcattggtggtggcttggttggctcattacaagcatgctttcttgcaaagaggaatttccagattgatgtatatgaagctagggaagatactcgagtggctaccttcacacgtggaagaagcattaacttagccctttctcatagaggacgacaagccttgaaagctgttggcctggaagatcagattgtatcccaaggtattcccatgagagcaagaatgatccactctctttcaggaaaaaagtctgcaattccctatgggacaaagtctcagtatattctttctgtaagcagagaaaatctaaacaaggatctattgactgctgctgagaaataccccaatgtgaaaatgcaatctgacaaagttcccaaagatgtcacttgtgacctcattgtaggatgtgatggagcctattcaactgtcagatctcacctgatgaagaaacctcgctttgattacagtcagcagtacattcctcatgggtacatggagttgactattccacctaagaacggagattatgccatggaacctaattatctgcatatttggcctagaaatacctttatgatgattgcacttcctaacatgaacaaatcattcacatgtactttgttcatgccctttgaagagtttgaaaaacttctaaccagtaatgatgtggtagatttcttccagaaatactttccggatgccatccctctaattggagagaaactcctagtgcaagatttcttcctgttgcctgcccagcccatgatatctgtaaagtgctcttcatttcactttaaatctcactgtgtactgctgggagatgcagctcatgctatagtgccgttttttgggcaaggaatgaatgcgggctttgaagactgcttggtatttgatgagttaatggataaattcagtaacgaccttagtttgtgtcttcctgtgttctcaagattgagaatcccagatgatcacgcgatttcagacctatccatgtacaattacatagagatgcgagcacatgtcaactcaagctggttcatttttcagaagaacatggagagatttcttcatgcgattatgccatcgacctttatccctctctatacaatggtcactttttccagaataagataccatgaggctgtgcagcgttggcattggcaaaaaaaggtgataaacaaaggactctttttcttgggatcactgatagccatcagcagtacctacctacttatacactacatgtcaccacgatctttcctccgcttgagaagaccatggaactggatagctcacttccggaatacaacatgtttccccgcaaaggccgtggactccctagaacaaatttccaatctcattagcaggtgatagaaaggttttgtggtagcaaatgcatgatttctctgtgaccaaaattaagcatgaaaaaaatgtttccattgccatatttgattcactagtggaagatagtgttctgcttataattaaactgaatgtagagtatctctgtatgttaattgcaattactggttggggggtgcattttaaaagatgaaacatgcagcttccctacattacacacactcaggttgagtcattctaactataaaagtgcaatgactaagatccttcacttctctgaaagtaaggccctagatgcctcagggaagacagtaatcatgccttttctttaaaagacacaataggactcgcaacagcattgactcaacacctaggactaaaaatcacaacttaactagcatgttaactgcacttttcattacgtgaatggaacttacctaaccacagggctcagacttactagataaaaccagaaatggaaataaggaattcaggggagttccagagacttacaaaatgaactcattttattttcccaccttcaaatataagtattatcatctatctgtttatcgtctatctatctatcatctatctatctatctatcatctatctatctatctatctatctatctatctatctatctatctatctatctctatttatttatgtatttagagatcaggtctcactctgttgaccaggctggagtgcagtggtgagatctgggttcactgcaacctctgcctcctgggctcaagcaatcctcccacttcagcctcccaaatagctggggctaccatggtatttttcagtagagaccgggtcttgccatgctgcccaggccagtctcaaactcctggcctcatgtgatctgcccacctcagcctcccaaagtacagggattagagttgtgagccaccgctgccagcccagagttaccctctaaagataagaaaaaggctattaatatcatactaagtgaaggacaggaaagggttttattcataaattaaatgtctacatgtgccagaatggaaaggaaacaaggggagacaacttttatagaaatacaaagccattactttattcaatttcagaccctcagaagcaatttactaatttattcttcgactacatactgcagcagaaccagcaatacacttgatttttaaaagcacatttagtgaaatgttttctttggttcatccttctttaacaggctgctgagtcactcagaaatccttcaaacatgattaattatgaagatgaaacactagagtcatataagaaataaaaattgggcaataaaataaaatgattcagtgtttcttttctatattgtcaatgaaaaccttgagttctaataatccatgttcagtttgtagggaaagaaaaaataatttttccttctacccactttaggttccttggctggggcccctataacaaaagacagattgacaagagaaaaacaaacataaatttattagcgggtatatgtaatatatatgtgggaaatacaggggaatgagcaaatctcaaagagctggcgtcttagaactccctggcttatatagcatcgacaaagaacagtaaatttttagagaaacaacaaaacaaagaaaaagagctttgagtctgtaggggcagcaatttgggggaagcaaatatatgggagtttgccttgtagattcctctggtgctggtctccaggctgacaaggattcaaagttgtctctgaaactcctctttgtcatactgcacatataaaacgtcttttgtttccaacaagaggattttctttttcattctagaattatctccttgataacttgatcagatataggacatgacactgaatagagtccaacagtacaaaaaaaattcagtatgttctagctacttcacacatgtgtacgcgacagttatttttacagtaaggtattttcgagaaaaatgcattacgtgttttggaaaatagagtaatttaaaaaatatatttgaaatgaaaatctccaacacattagaagatgatgatgttagatgcccatcgtgtgccacaagtggttttttcattatgtaaagcacccgttgaattaaaagaatttgtttttgttcaacctcttcctgaggcccaagagcatatgggcaattcggatttcctgctggaccacaaggttctgttgatattacatagaacgggtattccagacacttcttatgatgaaagtccaaaagtggcatccaatttaaggccccatctttcgttgccattcttcattcctacaaaggacgaacttggattacatcaactttggacccattggttttgtcgctgtcgtcaactgacagtgattcatcactggtgatgataaaaatgatggaagaagagttgaaagtcacttttttctttggcctgtccccatctttctgtgacatcacaatgggtctgatctgcatttcacttccagctgctggtaggtctttagcaggcctctggcacctcagcagtcggaggcacagaagctgcaaaagggatcttcgaaactgggcagagaaaaaataaagtggaatattaagtaaaagttgggcactaatctggattaacattcgaggaaatcagttgagctgaatttaagttgttttttgtttgttagcaggtgtggatgtggggttatgtggtcatgctcagatctacctaaatcaccccagagctttatgtcttttattcattctaattcttattaaccggaatatgtaggaccatttcaataccttgtaatcctccaagcttcaatctgcacacactttctatgagggcaggtacaactattaagagattttgaacattaagttagtccacaaatattcagtgggcatctactaggtgacagccactgtgctataattagagactttttactataagcatcaaaaacagataaggctcttcctggcagagtttacagcctggtgtacttgctaatgtctctttaattaggtgaagaattttttttttctatcgaaattactaatcagttggggaaaaaaatactatagcagacagcactaatgtcatcaacaaacattgttcttctccgtgtcctgggtacaacatcgaataatatttcttggcctcctttccgcttctcctctctgctgttcctctctacaagaacctggggggccaacgcctaaagatcataatatcacacaatggaaggaacctagattcctaaatgactgcataggacagatcccatctcctccacccaatacattattagactgaactgtgacctgaaatgagcaataaactctgtattaattcactgaaatgttggggttgcttgttatagtagtcggtccatcatgaccagtaaaacataaatcaaaagttaatgtaattgttatcccattatttagagcgaaataaatgttgaatatatggactttctcagattaggaaataccaattaaaaatataataaat

SEQ ID NO: 349931 - DNA, 5357 bp, Homo sapiens
gcttaaaaatttctgtgtcttacacagaagatagaaaaaatagagtgtctccaattggatggattttttaaaaaatttggttattgtaatggatttattttttcttagagctgagctgattgtactttggccaactaatgggttaatactgtcaagggaaattagccctgactaaacattgccgctggctcatgaatgcactaggcttggggcagtataaaaactcagagaaatcagtgtgtaggagacacagaaatcagtgtcactcagtgacagaagcaacaataattgtgaaaaatacttcagcagttatggactcatctgtcattcaaaggaaaaaagtagctgtcattggtggtggcttggtatgacgaaagtgatcagagcaaaaaggcaccatttcagtgacagctaaagctactcaagacaccattttttgactgaagccaagagccttggttggctcattacaagcatgctttcttgcaaagaggaatttccagattgatgtatatgaagctagggaagatactcgagtggctaccttcacacgtggaagaagcattaacttagccctttctcatagaggacgacaagccttgaaagctgttggcctggaagatcagattgtatcccaaggtattcccatgagagcaagaatgatccactctctttcaggaaaaaagtctgcaattccctatgggacaaagtctcagtatattctttctgtaagcagagaaaatctaaacaaggatctattgactgctgctgagaaataccccaatgtgaaaatgcactttaaccacaggctgttgaaatgtaatccagaggaaggaatgatcacagtgcttggatctgacaaagttcccaaagatgtcacttgtgacctcattgtaggatgtgatggagcctattcaactgtcagatctcacctgatgaagaaacctcgctttgattacagtcagcagtacattcctcatgggtacatggagttgactattccacctaagaacggagattatgccatggaacctaattatctgcatatttggcctagaaatacctttatgatgattgcacttcctaacatgaacaaatcattcacatgtactttgttcatgccctttgaagagtttgaaaaacttctaaccagtaatgatgtggtagatttcttccagaaatactttccggatgccatccctctaattggagagaaactcctagtgcaagatttcttcctgttgcctgcccagcccatgatatctgtaaagtgctcttcatttcactttaaatctcactgtgtactgctgggagatgcagctcatgctatagtgccgttttttgggcaaggaatgaatgcgggctttgaagactgcttggtatttgatgagttaatggataaattcagtaacgaccttagtttgtgtcttcctgtgttctcaagattgagaatcccagatgatcacgcgatttcagacctatccatgtacaattacatagagatgcgagcacatgtcaactcaagctggttcatttttcagaagaacatggagagatttcttcatgcgattatgccatcgacctttatccctctctatacaatggtcactttttccagaataagataccatgaggctgtgcagcgttggcattggcaaaaaaaggtgataaacaaaggactctttttcttgggatcactgatagccatcagcagtacctacctacttatacactacatgtcaccacgatctttcctccgcttgagaagaccatggaactggatagctcacttccggaatacaacatgtttccccgcaaaggccgtggactccctagaacaaatttccaatctcattagcaggtgatagaaaggttttgtggtagcaaatgcatgatttctctgtgaccaaaattaagcatgaaaaaaatgtttccattgccatatttgattcactagtggaagatagtgttctgcttataattaaactgaatgtagagtatctctgtatgttaattgcaattactggttggggggtgcattttaaaagatgaaacatgcagcttccctacattacacacactcaggttgagtcattctaactataaaagtgcaatgactaagatccttcacttctctgaaagtaaggccctagatgcctcagggaagacagtaatcatgccttttctttaaaagacacaataggactcgcaacagcattgactcaacacctaggactaaaaatcacaacttaactagcatgttaactgcacttttcattacgtgaatggaacttacctaaccacagggctcagacttactagataaaaccagaaatggaaataaggaattcaggggagttccagagacttacaaaatgaactcattttattttcccaccttcaaatataagtattatcatctatctgtttatcgtctatctatctatcatctatctatctatctatcatctatctatctatctatctatctatctatctatctatctatctatctatctctatttatttatgtatttagagatcaggtctcactctgttgaccaggctggagtgcagtggtgagatctgggttcactgcaacctctgcctcctgggctcaagcaatcctcccacttcagcctcccaaatagctggggctaccatggtatttttcagtagagaccgggtcttgccatgctgcccaggccagtctcaaactcctggcctcatgtgatctgcccacctcagcctcccaaagtacagggattagagttgtgagccaccgctgccagcccagagttaccctctaaagataagaaaaaggctattaatatcatactaagtgaaggacaggaaagggttttattcataaattaaatgtctacatgtgccagaatggaaaggaaacaaggggagacaacttttatagaaatacaaagccattactttattcaatttcagaccctcagaagcaatttactaatttattcttcgactacatactgcagcagaaccagcaatacacttgatttttaaaagcacatttagtgaaatgttttctttggttcatccttctttaacaggctgctgagtcactcagaaatccttcaaacatgattaattatgaagatgaaacactagagtcatataagaaataaaaattgggcaataaaataaaatgattcagtgtttcttttctatattgtcaatgaaaaccttgagttctaataatccatgttcagtttgtagggaaagaaaaaataatttttccttctacccactttaggttccttggctggggcccctataacaaaagacagattgacaagagaaaaacaaacataaatttattagcgggtatatgtaatatatatgtgggaaatacaggggaatgagcaaatctcaaagagctggcgtcttagaactccctggcttatatagcatcgacaaagaacagtaaatttttagagaaacaacaaaacaaagaaaaagagctttgagtctgtaggggcagcaatttgggggaagcaaatatatgggagtttgccttgtagattcctctggtgctggtctccaggctgacaaggattcaaagttgtctctgaaactcctctttgtcatactgcacatataaaacgtcttttgtttccaacaagaggattttctttttcattctagaattatctccttgataacttgatcagatataggacatgacactgaatagagtccaacagtacaaaaaaaattcagtatgttctagctacttcacacatgtgtacgcgacagttatttttacagtaaggtattttcgagaaaaatgcattacgtgttttggaaaatagagtaatttaaaaaatatatttgaaatgaaaatctccaacacattagaagatgatgatgttagatgcccatcgtgtgccacaagtggttttttcattatgtaaagcacccgttgaattaaaagaatttgtttttgttcaacctcttcctgaggcccaagagcatatgggcaattcggatttcctgctggaccacaaggttctgttgatattacatagaacgggtattccagacacttcttatgatgaaagtccaaaagtggcatccaatttaaggccccatctttcgttgccattcttcattcctacaaaggacgaacttggattacatcaactttggacccattggttttgtcgctgtcgtcaactgacagtgattcatcactggtgatgataaaaatgatggaagaagagttgaaagtcacttttttctttggcctgtccccatctttctgtgacatcacaatgggtctgatctgcatttcacttccagctgctggtaggtctttagcaggcctctggcacctcagcagtcggaggcacagaagctgcaaaagggatcttcgaaactgggcagagaaaaaataaagtggaatattaagtaaaagttgggcactaatctggattaacattcgaggaaatcagttgagctgaatttaagttgttttttgtttgttagcaggtgtggatgtggggttatgtggtcatgctcagatctacctaaatcaccccagagctttatgtcttttattcattctaattcttattaaccggaatatgtaggaccatttcaataccttgtaatcctccaagcttcaatctgcacacactttctatgagggcaggtacaactattaagagattttgaacattaagttagtccacaaatattcagtgggcatctactaggtgacagccactgtgctataattagagactttttactataagcatcaaaaacagataaggctcttcctggcagagtttacagcctggtgtacttgctaatgtctctttaattaggtgaagaattttttttttctatcgaaattactaatcagttggggaaaaaaatactatagcagacagcactaatgtcatcaacaaacattgttcttctccgtgtcctgggtacaacatcgaataatatttcttggcctcctttccgcttctcctctctgctgttcctctctacaagaacctggggggccaacgcctaaagatcataatatcacacaatggaaggaacctagattcctaaatgactgcataggacagatcccatctcctccacccaatacattattagactgaactgtgacctgaaatgagcaataaactctgtattaattcactgaaatgttggggttgcttgttatagtagtcggtccatcatgaccagtaaaacataaatcaaaagttaatgtaattgttatcccattatttagagcgaaataaatgttgaatatatggactttctcagattaggaaataccaattaaaaatataataaat

SEQ ID NO: 349932 - DNA, 1905 bp, Homo sapiens
gcttaaaaatttctgtgtcttacacagaagatagaaaaaatagagtgtctccaattggatggattttttaaaaaatttggttattgtaatggatttattttttcttagagctgagctgattgtactttggccaactaatgggttaatactgtcaagggaaattagccctgactaaacattgccgctggctcatgaatgcactaggcttggggcagtataaaaactcagagaaatcagtgtgtaggagacacagaaatcagtgtcactcagtgacagaagcaacaataattgtgaaaaatacttcagcagttatggactcatctgtcattcaaaggaaaaaagtagctgtcattggtggtggcttggttggctcattacaagcatgctttcttgcaaagaggaatttccagattgatgtatatgaagctagggaagatactcgagtggctaccttcacacgtggaagaagcattaacttagccctttctcatagaggacgacaagccttgaaagctgttggcctggaagatcagattgtatcccaaggtattcccatgagagcaagaatgatccactctctttcaggaaaaaagtctgcaattccctatgggacaaagtctcagtatattctttctgtaagcagagaaaatctaaacaaggatctattgactgctgctgagaaataccccaatgtgaaaatgcactttaaccacaggctgttgaaatgtaatccagaggaaggaatgatcacagtgcttggatctgacaaagttcccaaagatgtcacttgtgacctcattgtaggatgtgatggagcctattcaactgtcagatctcacctgatgaagaaacctcgctttgattacagtcagcagtacattcctcatgggtacatggagttgactattccacctaagaacggagattatgccatggaacctaattatctgcatatttggcctagaaatacctttatgatgattgcacttcctaacatgaacaaatcattcacatgtactttgttcatgccctttgaagagtttgaaaaacttctaaccagtaatgatgtggtagatttcttccagaaatactttccggatgccatccctctaattggagagaaactcctagtgcaagatttcttcctgttgcctgcccagcccatgatatctgtaaagtgctcttcatttcactttaaatctcactgtgtactgctgggagatgcagctcatgctatagtgccgttttttgggcaaggaatgaatgcgggctttgaagactgcttggtatttgatgagttaatggataaattcagtaacgaccttagtttgtgtcttcctgtgttctcaagattgagaatcccagatgatcacgcgatttcagacctatccatgtacaattacatagagatgcgagcacatgtcaactcaagctggttcatttttcagaagaacatggagagatttcttcatgcgattatgccatcgacctttatccctctctatacaatggtcactttttccagaataagataccatgaggctgtgcagcgttggcattggcaaaaaaaggtgataaacaaaggactctttttcttgggatcactgatagccatcagcagtacctacctacttatacactacatgtcaccacgatctttcctccgcttgagaagaccatggaactggatagctcacttccggaatacaacatgtttccccgcaaaggccgtggactccctagaacaaatttccaatctcattagcaggtgatagaaaggttttgtggtagcaaatgcatgatttctctgtgaccaaaattaagcatgaaaaaaatgtttccattgccatatttgattcactagtggaagatagtgttctgcttataattaaactgaatgtagag

SEQ ID NO: 349933 - DNA, 822 bp, Homo sapiens
gcttaaaaatttctgtgtcttacacagaagatagaaaaaatagagtgtctccaattggatggattttttaaaaaatttggttattgtaatggatttattttttcttagagctgagctgattgtactttggccaactaatgggttaatactgtcaagggaaattagccctgactaaacattgccgctggctcatgaatgcactaggcttggggcagtataaaaactcagagaaatcagtgtgtaggagacacagaaatcagtgtcactcagtgacagaagcaacaataattgtgaaaaatacttcagcagttatggactcatctgtcattcaaaggaaaaaagtagctgtcattggtggtggcttggttggctcattacaagcatgctttcttgcaaagaggaatttccagattgatgtatatgaagctagggaagatactcgagtggctaccttcacacgtggaagaagcattaacttagccctttctcatagaggacgacaagccttgaaagctgttggcctggaagatcagattgtatcccaaggtattcccatgagagcaagaatgatccactctctttcaggaaaaaagtctgcaattccctatgggacaaagtctcagtatattctttctgtaagcagagaaaatctaaacaaggatctattgactggtaagtctaatgtttgattcatcagttgtcattttgagtaaagcacatgacactaatcttgtcatatgatttattggatttgtttgctgctcctttttatgggttatgaagagcaagactatgtacactacaaagtccttcttgaagcta

SEQ ID NO: 349934 - DNA, 2204 bp, Homo sapiens
  misc_feature (207)..(207): n is a, c, g, or t
cagctaccatggcccaagggctagaagtggccctcacagacctccagagctccagaaataatgtgcggcaccacacggaggagatcactgtggaccacctgcttgttcgccggggccaggccttcaacctcaccctgtacttcaggaaccggagcttccagccaggcctggacaacatcatcttcgtggttgaaactggaccgctgncagacctggccttggggactcgggctgtgttcagcctggcacgccatcacagccccagcccctggattgcctggctggagaccaatggggccacctccacagaggtgagcttgtgcgctcctcccacggcggccgtgggtcggtacctcttgaaaatccacatcgactccttccaggggtctgtgacggcctaccagctaggggagttcatcctgcttttcaatccctggtgcccagaggatgctgtctacttggacagtgaaccccagaggcaggagtatgtcatgaatgattatggcttcatctaccaaggcagcaagaactggatccgcccatgtccctggaactatggacagtttgaagacaaaatcatagacatctgcctgaagctgctagacaagagcctgcacttccagactgacccagccacagactgtgctctgcggggaagccccgtctacgtcagcagagtggtgtgtgccatgatcaacagcaatgatgataatggggtgctcaatggaaactggagtgagaattacacagacggcgccaaccctgcggagtggacgggcagcgtggccatcctgaagcagtggaacgccacaggctgccagcccgtgcgctacgggcaatgctgggtctttgctgccgtcatgtgcacagtgatgaggtgtctggggatccctacccgtgtgatcaccaacttcgactctggccacgatacagatggaaacctgatcatagatgagtattatgacaacacaggcaggattttggggaataagaagaaggatactatctggaacttccatgtctggaatgagtgctggatggcccggaaggatctgccccctgcatatggaggctggcaggtgctggacgccacacctcaggagatgagcaacggcgtctactgctgtggccctgcctctgtcagagccatcaaagaaggagaagtggacctgaactatgacacgccctttgtgttttcgatggtgaatgctgactgcatgtcctggctcgtccagggagggaaggagcagaagcttcaccaggacacgagttctgttggcaattttatcagcacaaagagcatccagagtgacgagcgggatgacatcacagagaactacaagtatgaagaaggatccctccaggagaggcaggtgtttctgaaggctctgcagaagctgaaggctagaagcttccatggctcccaaagaggagcagagttgcaaccttccaggcccacatcactgagccaggacagccctcggagcctgcatacaccttcccttcgacccagtgatgtggtgcaagtctccctgaaattcaagctgctcgacccgcccaacatgggccaggatatatgctttgtcctgctggccctcaacatgtcctcccagttcaaggacctcaaagtgaacctgagtgcccagtctctgctgcacgatggcagccccctgtccccattctggcaggacacagcgttcatcacactctctcctaaagaagcaaagacctacccctgcaaaatctcctattcccagtacagccagtacctgtcaacagacaagctgatccgcatcagtgccctgggtgaagagaaaagcagtcctgagaaaatcctggtgaacaagatcatcaccttatcttatccaagcatcacgattaatgttctaggagcagccgttgtgaaccagccactctccatacaggtgatattttcaaaccccctctcggagcaggttgaggactgtgtgctgactgtggaaggaagtggcctcttcaagaaacagcagaaagtcttccttggagtcctcaaaccccaacaccaagcaagcatcattctggagaccgtccccttcaagagtggacaaaggcagatccaagctaatatgagaagcaacaagtttaaggacattaagggttacaggaatgtttatgtagactttgcattataaattctggaacaacgcgccagacgtgtgagtttc

SEQ ID NO: 349935 - DNA, 1958 bp, Homo sapiens
cagctaccatggcccaagggctagaagtggccctcacagacctccagagctccagaaataatgtgcggcaccacacggaggagatcactgtggaccacctgcttgttcgccggggccaggccttcaacctcaccctgtacttcaggaaccggagcttccagccaggcctggacaacatcatcttcgtggttgaaactgaggatgctgtctacttggacagtgaaccccagaggcaggagtatgtcatgaatgattatggcttcatctaccaaggcagcaagaactggatccgcccatgtccctggaactatggacagtttgaagacaaaatcatagacatctgcctgaagctgctagacaagagcctgcacttccagactgacccagccacagactgtgctctgcggggaagccccgtctacgtcagcagagtggtgtgtgccatgatcaacagcaatgatgataatggggtgctcaatggaaactggagtgagaattacacagacggcgccaaccctgcggagtggacgggcagcgtggccatcctgaagcagtggaacgccacaggctgccagcccgtgcgctacgggcaatgctgggtctttgctgccgtcatgtgcacagtgatgaggtgtctggggatccctacccgtgtgatcaccaacttcgactctggccacgatacagatggaaacctgatcatagatgagtattatgacaacacaggcaggattttggggaataagaagaaggatactatctggaacttccatgtctggaatgagtgctggatggcccggaaggatctgccccctgcatatggaggctggcaggtgctggacgccacacctcaggagatgagcaacggcgtctactgctgtggccctgcctctgtcagagccatcaaagaaggagaagtggacctgaactatgacacgccctttgtgttttcgatggtgaatgctgactgcatgtcctggctcgtccagggagggaaggagcagaagcttcaccaggacacgagttctgttggcaattttatcagcacaaagagcatccagagtgacgagcgggatgacatcacagagaactacaagtatgaagaaggatccctccaggagaggcaggtgtttctgaaggctctgcagaagctgaaggctagaagcttccatggctcccaaagaggagcagagttgcaaccttccaggcccacatcactgagccaggacagccctcggagcctgcatacaccttcccttcgacccagtgatgtggtgcaagtctccctgaaattcaagctgctcgacccgcccaacatgggccaggatatatgctttgtcctgctggccctcaacatgtcctcccagttcaaggacctcaaagtgaacctgagtgcccagtctctgctgcacgatggcagccccctgtccccattctggcaggacacagcgttcatcacactctctcctaaagaagcaaagacctacccctgcaaaatctcctattcccagtacagccagtacctgtcaacagacaagctgatccgcatcagtgccctgggtgaagagaaaagcagtcctgagaaaatcctggtgaacaagatcatcaccttatcttatccaagcatcacgattaatgttctaggagcagccgttgtgaaccagccactctccatacaggtgatattttcaaaccccctctcggagcaggttgaggactgtgtgctgactgtggaaggaagtggcctcttcaagaaacagcagaaagtcttccttggagtcctcaaaccccaacaccaagcaagcatcattctggagaccgtccccttcaagagtggacaaaggcagatccaagctaatatgagaagcaacaagtttaaggacattaagggttacaggaatgtttatgtagactttgcattataaattctggaacaacgcgccagacgtgtgagtttc

SEQ ID NO: 349936 - DNA, 1672 bp, Homo sapiens
ggagactcttttctgggaggcaaagagaggtccacaagaggaagacctgtcactaattaattacttttttgagacaaggtctggctttgctgcccaggctggagcacagtggtatgatcaaggtcaagccttgatctcccaggctcaagtgatcctccacctcagcctcccaagtaggtgggactataggcatgtgccatgatgcctagttaatttttttttttttttgagacgagatcttccttttttgcccaggttaatcttgaactcctgagctcaagcaatcctctcacctcagactcccaaagtactaagattactggcatgagccatcgtgcctggctatccacagaggttttaagccctgtgtgtgctaagtctgtctttctatccaacagttcatttgctcatccctcccttgccttgttctagaaagaccaagcagtacaacgtctcccttggctctgtttgacacaggaacttccatgtctggaatgagtgctggatggcccggaaggatctgccccctgcatatggaggctggcaggtgctggacgccacacctcaggagatgagcaacggcgtctactgctgtggccctgcctctgtcagagccatcaaagaaggagaagtggacctgaactatgacacgccctttgtgttttcgatggtgaatgctgactgcatgtcctggctcgtccagggagggaaggagcagaagcttcaccaggacacgagttctgttggcaattttatcagcacaaagagcatccagagtgacgagcgggatgacatcacagagaactacaagtatgaagaaggatccctccaggagaggcaggtgtttctgaaggctctgcagaagctgaaggctagaagcttccatggctcccaaagaggagcagagttgcaaccttccaggcccacatcactgagccaggacagccctcggagcctgcatacaccttcccttcgacccagtgatgtggtgcaagtctccctgaaattcaagctgctcgacccgcccaacatgggccaggatatatgctttgtcctgctggccctcaacatgtcctcccagttcaaggacctcaaagtgaacctgagtgcccagtctctgctgcacgatggcagccccctgtccccattctggcaggacacagcgttcatcacactctctcctaaagaagcaaagacctacccctgcaaaatctcctattcccagtacagccagtacctgtcaacagacaagctgatccgcatcagtgccctgggtgaagagaaaagcagtcctgagaaaatcctggtgaacaagatcatcaccttatcttatccaagcatcacgattaatgttctaggagcagccgttgtgaaccagccactctccatacaggtgatattttcaaaccccctctcggagcaggttgaggactgtgtgctgactgtggaaggaagtggcctcttcaagaaacagcagaaagtcttccttggagtcctcaaaccccaacaccaagcaagcatcattctggagaccgtccccttcaagagtggacaaaggcagatccaagctaatatgagaagcaacaagtttaaggacattaagggttacaggaatgtttatgtagactttgcattataaattctggaacaacgcgccagacgtgtgagtttc

SEQ ID NO: 349937 - DNA, 679 bp, Homo sapiens
acgcgaggctgaggggcgggttgcgctgtgcgtccggaagtgtctcgcagatagtaaataatctcggaaaggcgagaaagaagctgtctccatcttgtctgtatccgctgctcttgtgacgttgtggagatggggagcgtcctggggctgtgctccatggcgagctggataccatgtttgtgtggaagtgccccgtgtttgctatgccgatgctgtcctagtggaaacaactccactgtaactagattgatctatgcacttttcttgcttgttggagtatgtgtagcttgtgtaatgttgataccaggaatggaagaacaactgaataagattcctggattttgtgagaatgagaaaggtgttgtcccttgtaacattttggttggctataaagctgtatatcgtttgtgctttggtttggctatgttctatcttcttctctctttactaatgatcaaagtgaagagtagcagtgatcctagagctgcagtgcacaatggattttggttctttaaatttgctgcagcaattgcaattattattggggcattcttcattccagaaggaacttttacaactgtgtggttttatgtaggcatggcaggtgccttttgtttcatcctcatacaactagtcttacttattgattttgcacattcatggaatgaatcgtgggttg

SEQ ID NO: 349938 - DNA, 3201 bp, Homo sapiens
acgcgaggctgaggggcgggttgcgctgtgcgtccggaagtgtctcgcagatagtaaataatctcggaaaggcgagaaagaagctgtctccatcttgtctgtatccgctgctcttgtgacgttgtggagatggggagcgtcctggggctgtgctccatggcgagctggataccatgtttgtgtggaagtgccccgtgtttgctatgccgatgctgtcctagtggaaacaactccactgtaactagattgatctatgcacttttcttgcttgttggagtatgtgtagcttgtgtaatgttgataccaggaatggaagaacaactgaataagattcctggattttgtgagaatgagaaaggtgttgtcccttgtaacattttggttggctataaagctgtatatcgtttgtgctttggtttggctatgttctatcttcttctctctttactaatgatcaaagtgaagagtagcagtgatcctagagctgcagtgcacaatggattttggttctttaaatttgctgcagcaattgcaattattattggggcattcttcattccagaaggaacttttacaactgtgtggttttatgtaggcatggcaggtgccttttgtttcatcctcatacaactagtcttacttattgattttgcacattcatggaatgaatcgtgggttgaaaaaatggaagaagggaactcgagatgttggtatgcagccttgttatcagctacagctctgaattatctgctgtctttagttgctatcgtcctgttctttgtctactacactcatccagccagttgttcagaaaacaaggcgttcatcagtgtcaacatgctcctctgcgttggtgcttctgtaatgtctatactgccaaaaatccaagaatcacaaccaagatctggtttgttacagtcttcagtaattacagtctacacaatgtatttgacatggtcagctatgaccaatgaaccagaaacaaattgcaacccaagtctactaagcataattggctacaatacaacaagcactgtcccaaaggaagggcagtcagtccagtggtggcatgctcaaggaattataggactaattctctttttgttgtgtgtattttattccagcatccgtacttcaaacaatagtcaggttaataaactgactctaacaagtgatgaatctacattaatagaagatggtggagctagaagtgatggatcactggaggatggggacgatgttcaccgagctgtagataatgaaagggatggtgtcacttacagttattccttctttcacttcatgcttttcctggcttcactttatatcatgatgacccttaccaactggtacaggtatgaaccctctcgtgagatgaaaagtcagtggacagctgtctgggtgaaaatctcttccagttggattggcatcgtgctgtatgtttggacactcgtggcaccacttgttcttacaaatcgtgattttgactgagtgagacttctagcatgaaagtcccactttgattattgcttatttgaaaacagtattcccaacttttgtaaagttgtgtatgtttttgcttcccatgtaacttctccagtgttctggcatgaattagattttactgcttgtcattttgttattttcttaccaagtgcattgatatgtgaagtagaatgaattgcagaggaaagttttatgaatatggtgatgagttagtaaaagtggccattattgggcttattctctgctctatagttgtgaaatgaagagtgaaaacaaatttgtttgactattttaaaattatattagaccttaagctgttttagcaagcattaaagcaaatgtatggctgccttttgaaatatttgatgtgttgcctggcaggatactgcaaagaacatggtttattttaaaatttataaacaagtcacttaaatgccagttgtctgaaaaatcttataaggttttacccttgatacggaatttacacaggtagggagtgtttagtggacaatagtgtaggttatggatggaggtgtcggtactaaattgaataacgagtaaataatcttacttgggtagagatggcctttgccaacaaagtgaactgttttggttgttttaaactcatgaagtatgggttcagtggaaatgtttggaactctgaaggatttagacaaggttttgaaaaggataatcatgggttagaaggaagtgtttgaaagtcactttgaaagttagttttgggccagcacggtagctcacccttgtaatcccagcactttgggaggctgaggtgggtagattacttgagcccaggaattcaagaccagcctgggcaacatggtgaaaccctgtttctataaaaaataatctgggctttgtagcatatgcctgtggtcccagctactgaggaggctgaggtgggaggattgcttgagcccaggaggcagaggttgcagtgagccaaggtcacgtcactgcactctagcctgggcaacagagtaagacaaaaaaatatatatatattgaaaatcaaaggaggcaaaattttgacagggaaggaagtaactgcaaaacactaggctttagtaggtacttatataaaatctagtccagttctctcatttaaaaaaatgaagacactgaagtacagacttaaatagctcagatagctaattaggaaatttcaagttggccaataatagcattctctctgacatttaaaaataatttctattcaaaatacatgcataattgattttacacctcattactggtggataatttatgtgatgtggattgctggtgtccagcatgacccataaacaggtcagaagaatgatggaatgttttagaataaactcctgcttatagtatactacacagttcaaaagatgtttaaaatgcttttgtatttactgccatgtaattgaaatatatagattattgtaacctttcaacctgaaaatcaagcagtatgagagtttagttatttgtatgtgtcactagtgtctaatgaagcttttaaaatctacaatttcttctttaaaaatatttattaatgtgaatggaatataacaattcagcttaattccccaaccttattctgtgtgtagacattgtattccacaattttgaatggctgtgttttacctctaaataaatgaattcagagaaaaaaaaaaatgtactgat

SEQ ID NO: 349939 - DNA, 374 bp, Homo sapiens
  misc_feature (40)..(40): n is a, c, g, or t
  misc_feature (124)..(124): n is a, c, g, or t
agcttttatttggttaggaatgagatagtaccatacatantgtctacaccttggtttcctactcatcatgacatctacatcatagaaacctccccaaatggacagacataaatgtaacattctntcaaatagctttcaacctgaaaatcaagcagtatgagagtttagttatttgtatgtgtcactagtgtctaatgaagcttttaaaatctacaatttcttctttaaaaatatttattaatgtgaatggaatataacaattcagcttaattccccaaccttattctgtgtgtagacattgtattccacaattttgaatggctgtgttttacctctaaataaatgaattcagagaaaaaaaaaaatgtactgat

SEQ ID NO: 349940 - DNA, 457 bp, Homo sapiens
acgcgaggctgaggggcgggttgcgctgtgcgtccggaagtgtctcgcagatagtaaataatctcggaaaggcgagaaagaagctgtctccatcttgtctgtatccgctgctcttgtgacgttgtggagatggggagcgtcctggggctgtgctccatggcgagctggataccatgtttgtgtggaagtgccccgtgtttgctatgccgatgctgtcctagtggaaacaactccactgtacctggcttatttcacttaacataatgacatccaattacatccatgtggttgcaaatgactgactcttgttctttttatggctgaattgtatttcattgtgtataagtaccacattttctttaccattcatctgttgaaggacatgcagtttgcttccacatcatagctgttgtaaacagagctgcaacagctaatttcctttctttggggtatatac

SEQ ID NO: 349941 - DNA, 3147 bp, Homo sapiens
acgcgaggctgaggggcgggttgcgctgtgcgtccggaagtgtctcgcagatagtaaataatctcggaaaggcgagaaagaagctgtctccatcttgtctgtatccgctgctcttgtgacgttgtggagatggggagcgtcctggggctgtgctccatggcgagctggataccatgtttgtgtggaagtgccccgtgtttgctatgccgatgctgtcctagtggaaacaactccactgtaactagattgatctatgcacttttcttgcttgttggagtatgtgtagcttgtgtaatgttgataccaggaatggaagaacaactgaataagattcctggattttgtgagaatgagaaaggtgttgtcccttgtaacattttggttggctataaagctgtatatcgtttgtgctttggtttggctatgttctatcttcttctctctttactaatgatcaaagtgaagagtagcagtgatcctagagctgcagtgcacaatggattttggttctttaaatttgctgcagcaattgcaattattattggggcattcttcattccagaaggaacttttacaactgtgtggttttatgtaggcatggcaggtgccttttgtttcatcctcatacaactagtcttacttattgattttgcacattcatggaatgaatcgtgggttgaaaaaatggaagaagggaactcgagatgttggtatgcagccttgttatcagctacagctctgaattatctgctgtctttagttgctatcgtcctgttctttgtctactacactcatccagccagttgttcagaaaacaaggcgttcatcagtgtcaacatgctcctctgcgttggtgcttctgtaatgtctatactgccaaaaatccaagaatcacaaccaagatctggtttgttacagtcttcagtaattacagtctacacaatgtatttgacatggtcagctatgaccaatgaaccagaaacaaattgcaacccaagtctactaagcataattggctacaatacaacaagcactgtcccaaaggaagggcagtcagtccagtggtggcatgctcaaggaattataggactaattctctttttgttgtgtgtattttattccagcatccgtacttcaaacaatagtcaggttaataaactgactctaacaagtgatgaatctacattaatagaagatggtggagctagaagtgatggatcactggaggatggggacgatgttcaccgagctgtagataatgaaagggatggtgtcacttacagttattccttctttcacttcatgcttttcctggcttcactttatatcatgatgacccttaccaactggtacaggtatgaaccctctcgtgagatgaaaagtcagtggacagctgtctgggtgaaaatctcttccagttggattggcatcgtgctgtatgtttggacactcgtggcaccacttgttcttacaaatcgtgattttgactgagtgagacttctagcatgaaagtcccactttgattattgcttatttgaaaacagtattcccaacttttgtaaagttgtgtatgtttttgcttcccatgtaacttctccagtgttctggcatgaattagattttactgcttgtcattttgttattttcttaccaagtgcattgatatgtgaagtagaatgaattgcagaggaaagttttatgaatatggtgatgagttagtaaaagtggccattattgggcttattctctgctctatagttgtgaaatgaagagtgaaaacaaatttgtttgactattttaaaattatattagaccttaagctgttttagcaagcattaaagcaaatgtatggctgccttttgaaatatttgatgtgttgcctggcaggatactgcaaagaacatggtttattttaaaatttataaacaagtcacttaaatgccagttgtctgatagtggacaatagtgtaggttatggatggaggtgtcggtactaaattgaataacgagtaaataatcttacttgggtagagatggcctttgccaacaaagtgaactgttttggttgttttaaactcatgaagtatgggttcagtggaaatgtttggaactctgaaggatttagacaaggttttgaaaaggataatcatgggttagaaggaagtgtttgaaagtcactttgaaagttagttttgggccagcacggtagctcacccttgtaatcccagcactttgggaggctgaggtgggtagattacttgagcccaggaattcaagaccagcctgggcaacatggtgaaaccctgtttctataaaaaataatctgggctttgtagcatatgcctgtggtcccagctactgaggaggctgaggtgggaggattgcttgagcccaggaggcagaggttgcagtgagccaaggtcacgtcactgcactctagcctgggcaacagagtaagacaaaaaaatatatatatattgaaaatcaaaggaggcaaaattttgacagggaaggaagtaactgcaaaacactaggctttagtaggtacttatataaaatctagtccagttctctcatttaaaaaaatgaagacactgaagtacagacttaaatagctcagatagctaattaggaaatttcaagttggccaataatagcattctctctgacatttaaaaataatttctattcaaaatacatgcataattgattttacacctcattactggtggataatttatgtgatgtggattgctggtgtccagcatgacccataaacaggtcagaagaatgatggaatgttttagaataaactcctgcttatagtatactacacagttcaaaagatgtttaaaatgcttttgtatttactgccatgtaattgaaatatatagattattgtaacctttcaacctgaaaatcaagcagtatgagagtttagttatttgtatgtgtcactagtgtctaatgaagcttttaaaatctacaatttcttctttaaaaatatttattaatgtgaatggaatataacaattcagcttaattccccaaccttattctgtgtgtagacattgtattccacaattttgaatggctgtgttttacctctaaataaatgaattcagagaaaaaaaaaaatgtactgat

SEQ ID NO: 349942 - DNA, 2988 bp, Homo sapiens
acgcgaggctgaggggcgggttgcgctgtgcgtccggaagtgtctcgcagatagtaaataatctcggaaaggcgagaaagaagctgtctccatcttgtctgtatccgctgctcttgtgacgttgtggagatggggagcgtcctggggctgtgctccatggcgagctggataccatgtttgtgtggaagtgccccgtgtttgctatgccgatgctgtcctagtggaaacaactccactgtaactagattgatctatgcacttttcttgcttgttggagtatgtgtagcttgtgtaatgttgataccaggaatggaagaacaactgaataagattcctggattttgtgagaatgagaaaggtgttgtcccttgtaacattttggttggctataaagctgtatatcgtttgtgctttggtttggctatgttctatcttcttctctctttactaatgatcaaagtgaagagtagcagtgatcctagagctgcagtgcacaatggattttggttctttaaatttgctgcagcaattgcaattattattggggcattcttcattccagaaggaacttttacaactgtgtggttttatgtaggcatggcaggtgccttttgtttcatcctcatacaactagtcttacttattgattttgcacattcatggaatgaatcgtgggttgaaaaaatggaagaagggaactcgagatgttggtatgcagccttgttatcagctacagctctgaattatctgctgtctttagttgctatcgtcctgttctttgtctactacactcatccagccagttgttcagaaaacaaggcgttcatcagtgtcaacatgctcctctgcgttggtgcttctgtaatgtctatactgccaaaaatccaagaatcacaaccaagatctggtttgttacagtcttcagtaattacagtctacacaatgtatttgacatggtcagctatgaccaatgaaccagaaacaaattgcaacccaagtctactaagcataattggctacaatacaacaagcactgtcccaaaggaagggcagtcagtccagtggtggcatgctcaaggaattataggactaattctctttttgttgtgtgtattttattccagcatccgtacttcaaacaatagtcaggttaataaactgactctaacaagtgatgaatctacattaatagaagatggtggagctagaagtgatggatcactggaggatggggacgatgttcaccgagctgtagataatgaaagggatggtgtcacttacagttattccttctttcacttcatgcttttcctggcttcactttatatcatgatgacccttaccaactggtacaggtatgaaccctctcgtgagatgaaaagtcagtggacagctgtctgggtgaaaatctcttccagttggattggcatcgtgctgtatgtttggacactcgtggcaccacttgttcttacaaatcgtgattttgactgagtgagacttctagcatgaaagtcccactttgattattgcttatttgaaaacagtattcccaacttttgtaaagttgtgtatgtttttgcttcccatgtaacttctccagtgttctggcatgaattagattttactgcttgtcattttgttattttcttaccaagtgcattgatatgtgaagtagaatgaattgcagaggaaagttttatgaatatggtgatgagttagtaaaagtggccattattgggcttattctctgctctatagttgtgaaatgaagagtgaaaacaaatttgtttgactattttaaaattatattagaccttaagctgttttagcaagcattaaagcaaatgtatggctgccttttgaaatatttgatgtgttgcctggcaggatactgcaaagaacatggtttattttaaaatttataaacaagtcacttaaatgccagttgtctgaaaaatcttataaggttttacccttgatacggaatttacacaggtagggagtgtttagtggacaatagtgtaggttatggatggaggtgtcggtactaaattgaataacgagtaaataatcttacttgggtagagatggcctttgccaacaaagtgaactgttttggttgttttaaactcatgaagtatgggttcagtggaaatgtttggaactctgaaggatttagacaaggttttgaaaaggataatcatgggttagaaggaagtgtttgaaagtcactttgaaagttagttttgggccagcacggtagctcacccttgtaatcccagcactttgggaggctgaggtgggtagattacttgagcccaggaattcaagaccagcctgggcaacatggtgaaaccctgtttctataaaaaataatctgggctttgtagcatatgcctgtggtcccagctactgaggaggctgaggtgggaggattgcttgagcccaggaggcagaggttgcagtgagccaaggtcacgtcactgcactctagcctgggcaacagagtaagacaaaaaaatatatatatattgaaaatcaaaggaggcaaaattttgacagggaaggaagtaactgcaaaacactaggctttagtaggtacttatataaaatctagtccagttctctcatttaaaaaaatgaagacactgaagtacagacttaaatagctcagatagctaattaggaaatttcaagttggccaataatagcattctctctgacatttaaaaataatttctattcaaaatacatgcataattgattttacacctcattactggtggataatttatgtgatgtggattgctggtgtccagcatgacccataaacaggtcagaagaatgatggaatgttttagaataaactcctgcttatagtatactacacagttcaaaagatgtttaaaatgcttttgtatttactgcctgaggattccattgtggtaatgtccattaactgtgctatgcttatttctagaccacaga

SEQ ID NO: 349943 - DNA, 2173 bp, Homo sapiens
acgcgaggctgaggggcgggttgcgctgtgcgtccggaagtgtctcgcagatagtaaataatctcggaaaggcgagaaagaagctgtctccatcttcatccgtacttcaaacaatagtcaggttaataaactgactctaacaagtgatgaatctacattaatagaagatggtggagctagaagtgatggatcactggaggatggggacgatgttcaccgagctgtagataatgaaagggatggtgtcacttacagttattccttctttcacttcatgcttttcctggcttcactttatatcatgatgacccttaccaactggtacaggtatgaaccctctcgtgagatgaaaagtcagtggacagctgtctgggtgaaaatctcttccagttggattggcatcgtgctgtatgtttggacactcgtggcaccacttgttcttacaaatcgtgattttgactgagtgagacttctagcatgaaagtcccactttgattattgcttatttgaaaacagtattcccaacttttgtaaagttgtgtatgtttttgcttcccatgtaacttctccagtgttctggcatgaattagattttactgcttgtcattttgttattttcttaccaagtgcattgatatgtgaagtagaatgaattgcagaggaaagttttatgaatatggtgatgagttagtaaaagtggccattattgggcttattctctgctctatagttgtgaaatgaagagtgaaaacaaatttgtttgactattttaaaattatattagaccttaagctgttttagcaagcattaaagcaaatgtatggctgccttttgaaatatttgatgtgttgcctggcaggatactgcaaagaacatggtttattttaaaatttataaacaagtcacttaaatgccagttgtctgaaaaatcttataaggttttacccttgatacggaatttacacaggtagggagtgtttagtggacaatagtgtaggttatggatggaggtgtcggtactaaattgaataacgagtaaataatcttacttgggtagagatggcctttgccaacaaagtgaactgttttggttgttttaaactcatgaagtatgggttcagtggaaatgtttggaactctgaaggatttagacaaggttttgaaaaggataatcatgggttagaaggaagtgtttgaaagtcactttgaaagttagttttgggccagcacggtagctcacccttgtaatcccagcactttgggaggctgaggtgggtagattacttgagcccaggaattcaagaccagcctgggcaacatggtgaaaccctgtttctataaaaaataatctgggctttgtagcatatgcctgtggtcccagctactgaggaggctgaggtgggaggattgcttgagcccaggaggcagaggttgcagtgagccaaggtcacgtcactgcactctagcctgggcaacagagtaagacaaaaaaatatatatatattgaaaatcaaaggaggcaaaattttgacagggaaggaagtaactgcaaaacactaggctttagtaggtacttatataaaatctagtccagttctctcatttaaaaaaatgaagacactgaagtacagacttaaatagctcagatagctaattaggaaatttcaagttggccaataatagcattctctctgacatttaaaaataatttctattcaaaatacatgcataattgattttacacctcattactggtggataatttatgtgatgtggattgctggtgtccagcatgacccataaacaggtcagaagaatgatggaatgttttagaataaactcctgcttatagtatactacacagttcaaaagatgtttaaaatgcttttgtatttactgccatgtaattgaaatatatagattattgtaacctttcaacctgaaaatcaagcagtatgagagtttagttatttgtatgtgtcactagtgtctaatgaagcttttaaaatctacaatttcttctttaaaaatatttattaatgtgaatggaatataacaattcagcttaattccccaaccttattctgtgtgtagacattgtattccacaattttgaatggctgtgttttacctctaaataaatgaattcagagaaaaaaaaaaatgtactgat

SEQ ID NO: 349944 - DNA, 2342 bp, Homo sapiens
acgcgaggctgaggggcgggttgcgctgtgcgtccggaagtgtctcgcagatagtaaataatctcggaaaggcgagaaagaagctgtctccatcttgtctgtatccgctgctcttgtgacgttgtggagatggggagcgtcctggggctgtgctccatggcgagctggataccatgtttgtgtggaagtgccccgtgtttgctatgccgatgctgtcctagtggaaacaactccactgtaactagattgatctatgcacttttcttgcttgttggagtatgtgtagcttgtgtaatgttgataccaggaatggaagaacaactgaataagattcctggattttgtgagaatgagaaaggtgttgtcccttgtaacattttggttggctataaagctgtatatcgtttgtgctttggtttggctatgttctatcttcttctctctttactaatgatcaaagtgaagagtagcagtgatcctagagctgcagtgcacaatggattttggttctttaaatttgctgcagcaattgcaattattattggggcattcttcattccagaaggaacttttacaactgtgtggttttatgtaggcatggcaggtgccttttgtttcatcctcatacaactagtcttacttattgattttgcacattcatggaatgaatcgtgggttgaaaaaatggaagaagggaactcgagatgttggtatgcagccttgttatcagctacagctctgaattatctgctgtctttagttgctatcgtcctgttctttgtctactacactcatccagccagttgttcagaaaacaaggcgttcatcagtgtcaacatgctcctctgcgttggtgcttctgtaatgtctatactgccaaaaatccaagaatcacaaccaagatctggtttgttacagtcttcagtaattacagtctacacaatgtatttgacatggtcagctatgaccaatgaaccagaaacaaattgcaacccaagtctactaagcataattggctacaatacaacaagcactgtcccaaaggaagggcagtcagtccagtggtggcatgctcaaggaattataggactaattctctttttgttgtgtgtattttattccagcatccgtacttcaaacaatagtcaggttaataaactgactctaacaagtgatgaatctacattaatagaagatggtggagctagaagtgatggatcactggaggatggggacgatgttcaccgagctgtagataatgaaagggatggtgtcacttacagttattccttctttcacttcatgcttttcctggcttcactttatatcatgatgacccttaccaactggtacaggtatgaaccctctcgtgagatgaaaagtcagtggacagctgtctgggtgaaaatctcttccagttggattggcatcgtgctgtatgtttggacactcgtggcaccacttgttcttacaaatcgtgattttgactgagtgagacttctagcatgaaagtcccactttgattattgcttatttgaaaacagtattcccaacttttgtaaagttgtgtatgtttttgcttcccatgtaacttctccagtgttctggcatgaattagattttactgcttgtcattttgttattttcttaccaagtgcattgatatgtgaagtagaatgaattgcagaggaaagttttatgaatatggtgatgagttagtaaaagtggccattattgggcttattctctgctctatagttgtgaaatgaagagtgaaaacaaatttgtttgactattttaaaattatattagaccttaagctgttttagcaagcattaaagcaaatgtatggctgccttttgaaatatttgatgtgttgcctggcaggatactgcaaagaacatggtttattttaaaatttataaacaagtcacttaaatgccagttgtctgaaaaatcttataaggttttacccttgatacggaatttacacaggtagggagtgtttagtggacaatagtgtaggttatggatggaggtgtcggtactaaattgaataacgagtaaataatcttacttgggtagagatggcctttgccaacaaagtgaactgttttggttgttttaaactcatgaagtatgggttcagtggaaatgtttaatgagggagttgtaccacaaacagtactacaatgattctgaagcacagtgtattcagacagatacagtgaaccaagtgcaatatgtaaggatgaaagaagaagagatgacaaagaaatccaagtaaatgccttgtctttgcaaatgtttttatattaaatcataaggaaggaactacttgc

SEQ ID NO: 349945 - DNA, 1002 bp, Homo sapiens
gggtgagctaccgtgctggcctggtaatcccagcacggtagctcacccttgtaatcccagcacggtagctcacccaaagtgctgggattacaaggctgaggtgggtagattacttgagcccaggaattcaagaccagcctgggcaacatggtgaaaccctgtttctataaaaaataatctgggctttgtagcatatgcctgtggtcccagctactgaggaggctgaggtgggaggattgcttgagcccaggaggcagaggttgcagtgagccaaggtcacgtcactgcactctagcctgggcaacagagtaagacaaaaaaatatatatatattgaaaatcaaaggaggcaaaattttgacagggaaggaagtaactgcaaaacactaggctttagtaggtacttatataaaatctagtccagttctctcatttaaaaaaatgaagacactgaagtacagacttaaatagctcagatagctaattaggaaatttcaagttggccaataatagcattctctctgacatttaaaaataatttctattcaaaatacatgcataattgattttacacctcattactggtggataatttatgtgatgtggattgctggtgtccagcatgacccataaacaggtcagaagaatgatggaatgttttagaataaactcctgcttatagtatactacacagttcaaaagatgtttaaaatgcttttgtatttactgccatgtaattgaaatatatagattattgtaacctttcaacctgaaaatcaagcagtatgagagtttagttatttgtatgtgtcactagtgtctaatgaagcttttaaaatctacaatttcttctttaaaaatatttattaatgtgaatggaatataacaattcagcttaattccccaaccttattctgtgtgtagacattgtattccacaattttgaatggctgtgttttacctctaaataaatgaattcagagaaaaaaaaaaatgtactgat

SEQ ID NO: 349946 - DNA, 810 bp, Homo sapiens
gggccgctcccacttcagcctcctcagtagctgggaccacaggcatatgctacaaagggaggcagaggttgcagtgagccaaggtcacgtcactgcactctagcctgggcaacagagtaagacaaaaaaatatatatatattgaaaatcaaaggaggcaaaattttgacagggaaggaagtaactgcaaaacactaggctttagtaggtacttatataaaatctagtccagttctctcatttaaaaaaatgaagacactgaagtacagacttaaatagctcagatagctaattaggaaatttcaagttggccaataatagcattctctctgacatttaaaaataatttctattcaaaatacatgcataattgattttacacctcattactggtggataatttatgtgatgtggattgctggtgtccagcatgacccataaacaggtcagaagaatgatggaatgttttagaataaactcctgcttatagtatactacacagttcaaaagatgtttaaaatgcttttgtatttactgccatgtaattgaaatatatagattattgtaacctttcaacctgaaaatcaagcagtatgagagtttagttatttgtatgtgtcactagtgtctaatgaagcttttaaaatctacaatttcttctttaaaaatatttattaatgtgaatggaatataacaattcagcttaattccccaaccttattctgtgtgtagacattgtattccacaattttgaatggctgtgttttacctctaaataaatgaattcagagaaaaaaaaaaatgtactgat

SEQ ID NO: 349947 - DNA, 804 bp, Homo sapiens
ttccaccagcagcctcaggcgtgcgcggacggtgtgcggagtctagctttgtaccaggctgcagtgcagtagtgccatctcagtcactgcactctagcctgggcaacagagtaagacaaaaaaatatatatatattgaaaatcaaaggaggcaaaattttgacagggaaggaagtaactgcaaaacactaggctttagtaggtacttatataaaatctagtccagttctctcatttaaaaaaatgaagacactgaagtacagacttaaatagctcagatagctaattaggaaatttcaagttggccaataatagcattctctctgacatttaaaaataatttctattcaaaatacatgcataattgattttacacctcattactggtggataatttatgtgatgtggattgctggtgtccagcatgacccataaacaggtcagaagaatgatggaatgttttagaataaactcctgcttatagtatactacacagttcaaaagatgtttaaaatgcttttgtatttactgccatgtaattgaaatatatagattattgtaacctttcaacctgaaaatcaagcagtatgagagtttagttatttgtatgtgtcactagtgtctaatgaagcttttaaaatctacaatttcttctttaaaaatatttattaatgtgaatggaatataacaattcagcttaattccccaaccttattctgtgtgtagacattgtattccacaattttgaatggctgtgttttacctctaaataaatgaattcagagaaaaaaaaaaatgtactgat

SEQ ID NO: 349948 - DNA, 663 bp, Homo sapiens
cgtgctcggcaccctggccaacttgaaatttcctaattagctatctgagctatttaagtctgtacttcagtgtcttcattttttaaatgagagaactggactagattttatataagtacctacttaaatagctcagatagctaattaggaaatttcaagttggccaataatagcattctctctgacatttaaaaataatttctattcaaaatacatgcataattgattttacacctcattactggtggataatttatgtgatgtggattgctggtgtccagcatgacccataaacaggtcagaagaatgatggaatgttttagaataaactcctgcttatagtatactacacagttcaaaagatgtttaaaatgcttttgtatttactgccatgtaattgaaatatatagattattgtaacctttcaacctgaaaatcaagcagtatgagagtttagttatttgtatgtgtcactagtgtctaatgaagcttttaaaatctacaatttcttctttaaaaatatttattaatgtgaatggaatataacaattcagcttaattccccaaccttattctgtgtgtagacattgtattccacaattttgaatggctgtgttttacctctaaataaatgaattcagagaaaaaaaaaaatgtactgat

SEQ ID NO: 349949 - DNA, 1494 bp, Homo sapiens
  misc_feature (1416)..(1416): n is a, c, g, or t
acgcgaggctgaggggcgggttgcgctgtgcgtccggaagtgtctcgcagatagtaaataatctcggaaaggcgagaaagaagctgtctccatcttgtctgtatccgctgctcttgtgacgttgtggagatggggagcgtcctggggctgtgctccatggcgagctggataccatgtttgtgtggaagtgccccgtgtttgctatgccgatgctgtcctagtggaaacaactccactgtaactagattgatctatgcacttttcttgcttgttggagtatgtgtagcttgtgtaatgttgataccaggaatggaagaacaactgaataagattcctggattttgtgagaatgagaaaggtgttgtcccttgtaacattttggttggctataaagctgtatatcgtttgtgctttggtttggctatgttctatcttcttctctctttactaatgatcaaagtgaagagtagcagtgatcctagagctgcagtgcacaatggattttggttctttaaatttgctgcagcaattgcaattattattggggcattcttcattccagaaggaacttttacaactgtgtggttttatgtaggcatggcaggtgccttttgtttcatcctcatacaactagtcttacttattgattttgcacattcatggaatgaatcgtgggttgaaaaaatggaagaagggaactcgagatgttggtatgcagccttgttatcagctacagctctgaattatctgctgtctttagttgctatcgtcctgttctttgtctactacactcatccagccagttgttcagaaaacaaggcgttcatcagtgtcaacatgctcctctgcgttggtgcttctgtaatgtctatactgccaaaaatccaagaatcacaaccaagatctggtttgttacagtcttcagtaattacagtctacacaatgtatttgacatggtcagctatgaccaatgaaccagaaacaaattgcaacccaagtctactaagcataattggctacaatacaacaagcactgtcccaaaggaagggcagtcagtccagtggtggcatgctcaaggaattataggactaattctctttttgttgtgtgtattttattccagcatccgtacttcaaacaatagtcaggttaataaactgactctaacaagtgatgaatctacattaatagaagatggtggagctagaagtgatggatcactggaggatggggacgatgttcaccgagctgtagataatgaaagggatggtgtcacttacagttattccttctttcacttcatgcttttcctggcttcactttatatcatgatgacccttaccaactggtacaggtatgaaccctctcgtgagatgaaaagtcagtggacagctgtcctagtggaaacaaccccnctgtaactagattgatctatgcacttttcttgctgttggagtatgtgtagcttgtgtaaactgatggggacctctaga

SEQ ID NO: 349950 - DNA, 518 bp, Homo sapiens
ccgctttagaggatccccataataatagcattctctctgacatttaaaaataatttctattcaaaatacatgcataattgattttacacctcattactggtggataatttatgtgatgtggattgctggtgtccagcatgacccataaacaggtcagaagaatgatggaatgttttagaataaactcctgcttatagtatactacacagttcaaaagatgtttaaaatgcttttgtatttactgccatgtaattgaaatatatagattattgtaacctttcaacctgaaaatcaagcagtatgagagtttagttatttgtatgtgtcactagtgtctaatgaagcttttaaaatctacaatttcttctttaaaaatatttattaatgtgaatggaatataacaattcagcttaattccccaaccttattctgtgtgtagacattgtattccacaattttgaatggctgtgttttacctctaaataaatgaattcagagaaaaaaaaaaatgtactgat

SEQ ID NO: 349951 - DNA, 196 bp, Homo sapiens
taatagaagatggtggagctagaagtgatggatcactggaggatggggacgatgttcaccgagctgtagataatgaaagggatggtgtcacttacagttattccttctttcacttcatgcttttcctggcttcactttatatcatgatgacccttaccaactggtacagggtatttatatttcatgaaaactctgg

SEQ ID NO: 349952 - DNA, 3147 bp, Homo sapiens
acgcgaggctgaggggcgggttgcgctgtgcgtccggaagtgtctcgcagatagtaaataatctcggaaaggcgagaaagaagctgtctccatcttgtctgtatccgctgctcttgtgacgttgtggagatggggagcgtcctggggctgtgctccatggcgagctggataccatgtttgtgtggaagtgccccgtgtttgctatgccgatgctgtcctagtggaaacaactccactgtaactagattgatctatgcacttttcttgcttgttggagtatgtgtagcttgtgtaatgttgataccaggaatggaagaacaactgaataagattcctggattttgtgagaatgagaaaggtgttgtcccttgtaacattttggttggctataaagctgtatatcgtttgtgctttggtttggctatgttctatcttcttctctctttactaatgatcaaagtgaagagtagcagtgatcctagagctgcagtgcacaatggattttggttctttaaatttgctgcagcaattgcaattattattggggcattcttcattccagaaggaacttttacaactgtgtggttttatgtaggcatggcaggtgccttttgtttcatcctcatacaactagtcttacttattgattttgcacattcatggaatgaatcgtgggttgaaaaaatggaagaagggaactcgagatgttggtatgcagccttgttatcagctacagctctgaattatctgctgtctttagttgctatcgtcctgttctttgtctactacactcatccagccagttgttcagaaaacaaggcgttcatcagtgtcaacatgctcctctgcgttggtgcttctgtaatgtctatactgccaaaaatccaagaatcacaaccaagatctggtttgttacagtcttcagtaattacagtctacacaatgtatttgacatggtcagctatgaccaatgaaccagaaacaaattgcaacccaagtctactaagcataattggctacaatacaacaagcactgtcccaaaggaagggcagtcagtccagtggtggcatgctcaaggaattataggactaattctctttttgttgtgtgtattttattccagcatccgtacttcaaacaatagtcaggttaataaactgactctaacaagtgatgaatctacattaatagaagatggtggagctagaagtgatggatcactggaggatggggacgatgttcaccgagctgtagataatgaaagggatggtgtcacttacagttattccttctttcacttcatgcttttcctggcttcactttatatcatgatgacccttaccaactggtacaggtatgaaccctctcgtgagatgaaaagtcagtggacagctgtctgggtgaaaatctcttccagttggattggcatcgtgctgtatgtttggacactcgtggcaccacttgttcttacaaatcgtgattttgactgagtgagacttctagcatgaaagtcccactttgattattgcttatttgaaaacagtattcccaacttttgtaaagttgtgtatgtttttgcttcccatgtaacttctccagtgttctggcatgaattagattttactgcttgtcattttgttattttcttaccaagtgcattgatatgtgaagtagaatgaattgcagaggaaagttttatgaatatggtgatgagttagtaaaagtggccattattgggcttattctctgctctatagttgtgaaatgaagagtgaaaacaaatttgtttgactatttttgccttttgaaatatttgatgtgttgcctggcaggatactgcaaagaacatggtttattttaaaatttataaacaagtcacttaaatgccagttgtctgaaaaatcttataaggttttacccttgatacggaatttacacaggtagggagtgtttagtggacaatagtgtaggttatggatggaggtgtcggtactaaattgaataacgagtaaataatcttacttgggtagagatggcctttgccaacaaagtgaactgttttggttgttttaaactcatgaagtatgggttcagtggaaatgtttggaactctgaaggatttagacaaggttttgaaaaggataatcatgggttagaaggaagtgtttgaaagtcactttgaaagttagttttgggccagcacggtagctcacccttgtaatcccagcactttgggaggctgaggtgggtagattacttgagcccaggaattcaagaccagcctgggcaacatggtgaaaccctgtttctataaaaaataatctgggctttgtagcatatgcctgtggtcccagctactgaggaggctgaggtgggaggattgcttgagcccaggaggcagaggttgcagtgagccaaggtcacgtcactgcactctagcctgggcaacagagtaagacaaaaaaatatatatatattgaaaatcaaaggaggcaaaattttgacagggaaggaagtaactgcaaaacactaggctttagtaggtacttatataaaatctagtccagttctctcatttaaaaaaatgaagacactgaagtacagacttaaatagctcagatagctaattaggaaatttcaagttggccaataatagcattctctctgacatttaaaaataatttctattcaaaatacatgcataattgattttacacctcattactggtggataatttatgtgatgtggattgctggtgtccagcatgacccataaacaggtcagaagaatgatggaatgttttagaataaactcctgcttatagtatactacacagttcaaaagatgtttaaaatgcttttgtatttactgccatgtaattgaaatatatagattattgtaacctttcaacctgaaaatcaagcagtatgagagtttagttatttgtatgtgtcactagtgtctaatgaagcttttaaaatctacaatttcttctttaaaaatatttattaatgtgaatggaatataacaattcagcttaattccccaaccttattctgtgtgtagacattgtattccacaattttgaatggctgtgttttacctctaaataaatgaattcagagaaaaaaaaaaatgtactgat

SEQ ID NO: 349953 - DNA, 3147 bp, Homo sapiens
acgcgaggctgaggggcgggttgcgctgtgcgtccggaagtgtctcgcagatagtaaataatctcggaaaggcgagaaagaagctgtctccatcttgtctgtatccgctgctcttgtgacgttgtggagatggggagcgtcctggggctgtgctccatggcgagctggataccatgtttgtgtggaagtgccccgtgtttgctatgccgatgctgtcctagtggaaacaactccactgtaactagattgatctatgcacttttcttgcttgttggagtatgtgtagcttgtgtaatgttgataccaggaatggaagaacaactgaataagattcctggattttgtgagaatgagaaaggtgttgtcccttgtaacattttggttggctataaagctgtatatcgtttgtgctttggtttggctatgttctatcttcttctctctttactaatgatcaaagtgaagagtagcagtgatcctagagctgcagtgcacaatggattttggttctttaaatttgctgcagcaattgcaattattattggggcattcttcattccagaaggaacttttacaactgtgtggttttatgtaggcatggcaggtgccttttgtttcatcctcatacaactagtcttacttattgattttgcacattcatggaatgaatcgtgggttgaaaaaatggaagaagggaactcgagatgttggtatgcagccttgttatcagctacagctctgaattatctgctgtctttagttgctatcgtcctgttctttgtctactacactcatccagccagttgttcagaaaacaaggcgttcatcagtgtcaacatgctcctctgcgttggtgcttctgtaatgtctatactgccaaaaatccaagaatcacaaccaagatctggtttgttacagtcttcagtaattacagtctacacaatgtatttgacatggtcagctatgaccaatgaaccagaaacaaattgcaacccaagtctactaagcataattggctacaatacaacaagcactgtcccaaaggaagggcagtcagtccagtggtggcatgctcaaggaattataggactaattctctttttgttgtgtgtattttattccagcatccgtacttcaaacaatagtcaggttaataaactgactctaacaagtgatgaatctacattaatagaagatggtggagctagaagtgatggatcactggaggatggggacgatgttcaccgagctgtagataatgaaagggatggtgtcacttacagttattccttctttcacttcatgcttttcctggcttcactttatatcatgatgacccttaccaactggtacaggtatgaaccctctcgtgagatgaaaagtcagtggacagctgtctgggtgaaaatctcttccagttggattggcatcgtgctgtatgtttggacactcgtggcaccacttgttcttacaaatcgtgattttgactgagtgagacttctagcatgaaagtcccactttgattattgcttatttgaaaacagtattcccaacttttgtaaagttgtgtatgtttttgcttcccatgtaacttctccagtgttctggcatgaattagattttactgcttgtcattttgttattttcttaccaagtgcattgatatgtgaagtagaatgaattgcagaggaaagttttatgaatatggtgatgagttagtaaaagtggccattattgggcttattctctgctctatagttgtgaaatgaagagtgaaaacaaatttgtttgactattttaaaattatattagaccttaagctgttttagcaagcattaaagcaaatgtatggctgccttttgaaatatttgatgtgttgcctggcaggatactgcaaagaacatggtttattttaaaatttataaacaagtcacttaaatgccagttgtctgaaaaatcttataaggttttacccttgatacggaatttacacaggtagggagtgtttagtggacaatagtgtaggttatggatggaggtgtcggtactaaattgaataacgagtaaataatcttacttgggtagagatggcctttgccaacaaagtgaactgttttggttgttttaaactcatgaagtatgggttcagtggaaatgtttggaactctgaaggatttagacaaggttttgaaaaggataatcatgggttagaaggaagtgtttgaaagtcactttgaaagttagttttgggccagcacggtagctcacccttgtaatcccagcactttgggaggctgaggtgggtagattacttgagcccaggaattcaagaccagcctgggcaacatggtgaaaccctgtttctataaaaaataatctgggctttgtagcatatgcctgtggtcccagctactgaggaggctgaggtgggaggattgcttgagcccaggaggcagaggttgcagtgagccaaggtcacgtcactgcactctagcctgggcaacagagtaagacaaaaaaatatatatatattgaaaatcaaaggaggcaaaattttgacagggaaggaagtaactgcaaaacactaggctttagtaggtacttatataaaatctagtccagttctctcatttaaaaaaatgaagacactgaagtacagacttaaatagctcagatagctaattaggaaatttcaagttggccaataatagcattctctctgacatttaaaaataatttctattcaaaatacatgcataattgattttacacctcattactggtggataatttatgtgatgtggattgctggtgtccagcatgacccataaacaggtcagaagaatgatggaatgttttagaataaactcctgcttatagtatactacacagttcaaaagatgtttaaaatgcttttgtatttactgccatgtaattgaaatatatagattattgtaacctttcaacctgaaaatcaagcagtatgagagtttagttatttgtatgtgtcactagtgtctaatgaagcttttaaaatctacaatttcttctttaaaatctgtgtgtagacattgtattccacaattttgaatggctgtgttttacctctaaataaatgaattcagagaaaaaaaaaaatgtactgat

SEQ ID NO: 349954 - DNA, 1936 bp, Homo sapiens
cccaatttctggacattttatagctgagcattacatgttcttaaagggtcatgaaacttatatcatgatgacccttaccaactggtacaggtatgaaccctctcgtgagatgaaaagtcagtggacagctgtctgggtgaaaatctcttccagttggattggcatcgtgctgtatgtttggacactcgtggcaccacttgttcttacaaatcgtgattttgactgagtgagacttctagcatgaaagtcccactttgattattgcttatttgaaaacagtattcccaacttttgtaaagttgtgtatgtttttgcttcccatgtaacttctccagtgttctggcatgaattagattttactgcttgtcattttgttattttcttaccaagtgcattgatatgtgaagtagaatgaattgcagaggaaagttttatgaatatggtgatgagttagtaaaagtggccattattgggcttattctctgctctatagttgtgaaatgaagagtgaaaacaaatttgtttgactattttaaaattatattagaccttaagctgttttagcaagcattaaagcaaatgtatggctgccttttgaaatatttgatgtgttgcctggcaggatactgcaaagaacatggtttattttaaaatttataaacaagtcacttaaatgccagttgtctgaaaaatcttataaggttttacccttgatacggaatttacacaggtagggagtgtttagtggacaatagtgtaggttatggatggaggtgtcggtactaaattgaataacgagtaaataatcttacttgggtagagatggcctttgccaacaaagtgaactgttttggttgttttaaactcatgaagtatgggttcagtggaaatgtttggaactctgaaggatttagacaaggttttgaaaaggataatcatgggttagaaggaagtgtttgaaagtcactttgaaagttagttttgggccagcacggtagctcacccttgtaatcccagcactttgggaggctgaggtgggtagattacttgagcccaggaattcaagaccagcctgggcaacatggtgaaaccctgtttctataaaaaataatctgggctttgtagcatatgcctgtggtcccagctactgaggaggctgaggtgggaggattgcttgagcccaggaggcagaggttgcagtgagccaaggtcacgtcactgcactctagcctgggcaacagagtaagacaaaaaaatatatatatattgaaaatcaaaggaggcaaaattttgacagggaaggaagtaactgcaaaacactaggctttagtaggtacttatataaaatctagtccagttctctcatttaaaaaaatgaagacactgaagtacagacttaaatagctcagatagctaattaggaaatttcaagttggccaataatagcattctctctgacatttaaaaataatttctattcaaaatacatgcataattgattttacacctcattactggtggataatttatgtgatgtggattgctggtgtccagcatgacccataaacaggtcagaagaatgatggaatgttttagaataaactcctgcttatagtatactacacagttcaaaagatgtttaaaatgcttttgtatttactgccatgtaattgaaatatatagattattgtaacctttcaacctgaaaatcaagcagtatgagagtttagttatttgtatgtgtcactagtgtctaatgaagcttttaaaatctacaatttcttctttaaaaatatttattaatgtgaatggaatataacaattcagcttaattccccaaccttattctgtgtgtagacattgtattccacaattttgaatggctgtgttttacctctaaataaatgaattcagagaaaaaaaaaaatgtactgat

SEQ ID NO: 349955 - DNA, 2097 bp, Homo sapiens
acgcgaggctgaggggcgggttgcgctgtgcgtccggaagtgtctcgcagatagtaaataatctcggaaaggcgagaaagaagctgtctccatcttgtctgtatccgctgctcttgtgacgttgtggagatggggagcgtcctggggctgtgctccatggcgagctggataccatgtttgtgtggaagtgccccgtgtttgctatgccgatgctgtcctagtggaaacaactccactgtaactagattgatctatgcacttttcttgcttgttggagtatgtgtagcttgtgtaatgttgataccaggaatggaagaacaactgaataagattcctggattttgtgagaatgagaaaggtgttgtcccttgtaacattttggttggctataaagctgtatatcgtttgtgctttggtttggctatgttctatcttcttctctctttactaatgatcaaagtgaagagtagcagtgatcctagagctgcagtgcacaatggattttggttctttaaatttgctgcagcaattgcaattattattggggcattcttcattccagaaggaacttttacaactgtgtggttttatgtaggcatggcaggtgccttttgtttcatcctcatacaactagtcttacttattgattttgcacattcatggaatgaatcgtgggttgaaaaaatggaagaagggaactcgagatgttggtatgcagccttgttatcagctacagctctgaattatctgctgtctttagttgctatcgtcctgttctttgtctactacactcatccagccagttgttcagaaaacaaggcgttcatcagtgtcaacatgctcctctgcgttggtgcttctgtaatgtctatactgccaaaaatccaagaatcacaaccaagatctggtttgttacagtcttcagtaattacagtctacacaatgtatttgacatggtcagctatgaccaatgaaccagaaacaaattgcaacccaagtctactaagcataattggctacaatacaacaagcactgtcccaaaggaagggcagtcagtccagtggtggcatgctcaaggaattataggactaattctctttttgttgtgtgtattttattccagcatccgtacttcaaacaatagtcaggttaataaactgactctaacaagtgatgaatctacattaatagaagatggtggagctagaagtgatggatcactggaggatggggacgatgttcaccgagctgtagataatgaaagggatggtgtcacttacagttattccttctttcacttcatgcttttcctggcttcactttatatcatgatgacccttaccaactggtacaggtatgaaccctctcgtgagatgaaaagtcagtggacagctgtctgggtgaaaatctcttccagttggattggcatcgtgctgtatgtttggacactcgtggcaccacttgttcttacaaatcgtgattttgactgagtgagacttctagcatgaaagtcccactttgattattgcttatttgaaaacagtattcccaacttttgtaaagttgtgtatgtttttgcttcccatgtaacttctccagtgttctggcatgaattagattttactgcttgtcattttgttattttcttaccaagtgcattgatatgtgaagtagaatgaattgcagaggaaagttttatgaatatggtgatgagttagtaaaagtggccattattgggcttattctctgctctatagttgtgaaatgaagagtgaaaacaaatttgtttgactattttaaaattatattagaccttaagctgttttagcaagcattaaagcaaatgtatggctgccttttgaaatatttgatgtgttgcctggcaggatactgcaaagaacatggtttattttaaaatttataaacaagtcacttaaatgccagttgtctgaaaaatcttataaggttttacccttgatacggaatttacacaggtagggagtgtttagtggacaaagtcctgggattacaggcatgaccaccacgcctagctgtgtacaatctttttagatattcaccagcctctgcagcctcac

SEQ ID NO: 349956 - DNA, 1611 bp, Homo sapiens
acgcgaggctgaggggcgggttgcgctgtgcgtccggaagtgtctcgcagatagtaaataatctcggaaaggcgagaaagaagctgtctccatcttgtctgtatccgctgctcttgtgacgttgtggagatggggagcgtcctggggctgtgctccatggcgagctggataccatgtttgtgtggaagtgccccgtgtttgctatgccgatgctgtcctagtggaaacaactccactgtaactagattgatctatgcacttttcttgcttgttggagtatgtgtagcttgtgtaatgttgataccaggaatggaagaacaactgaataagattcctggattttgtgagaatgagaaaggtgttgtcccttgtaacattttggttggctataaagctgtatatcgtttgtgctttggtttggctatgttctatcttcttctctctttactaatgatcaaagtgaagagtagcagtgatcctagagctgcagtgcacaatggattttggttctttaaatttgctgcagcaattgcaattattattggggcattcttcattccagaaggaacttttacaactgtgtggttttatgtaggcatggcaggtgccttttgtttcatcctcatacaactagtcttacttattgattttgcacattcatggaatgaatcgtgggttgaaaaaatggaagaagggaactcgagatgttggtatgcagccttgttatcagctacagctctgaattatctgctgtctttagttgctatcgtcctgttctttgtctactacactcatccagccagttgttcagaaaacaaggcgttcatcagtgtcaacatgctcctctgcgttggtgcttctgtaatgtctatactgccaaaaatccaagaatcacaaccaagatctggtttgttacagtcttcagtaattacagtctacacaatgtatttgacatggtcagctatgaccaatgaaccagaaacaaattgcaacccaagtctactaagcataattggctacaatacaacaagcactgtcccaaaggaagggcagtcagtccagtggtggcatgctcaaggaattataggactaattctctttttgttgtgtgtattttattccagcatccgtacttcaaacaatagtcaggttaataaactgactctaacaagtgatgaatctacattaatagaagatggtggagctagaagtgatggatcactggaggatggggacgatgttcaccgagctgtagataatgaaagggatggtgtcacttacagttattccttctttcacttcatgcttttcctggcttcactttatatcatgatgacccttaccaactggtacagaggacaaaacttctgatgatgctgttgtactcgcctgttcaacagaagaagcagggttcccatcgaggaatgcaagaagtggaaaggcggtatactggataagctgcttatctataaagatcagaaaaacactcttttatcaccagcttatactgagttcaagctgaggggaaaaaaatgaaaacagagatgtacacataggcaattactactctcatatagccaaacaagaaatgacatgatgcactatgtcaat

SEQ ID NO: 349957 - DNA, 605 bp, Homo sapiens
atcgactgagccactgcactccagcctgggcaacagggcaagaccttgtctcaaaaaaaaaaaattaatttgaacacttctgttttgtgcagttttctctgttatattttactttttaaaaagaaaaagcggctgggcgcggtggctcacgcctgtaatcccagcactttgggaggccgaggtgggcggatcacctgatgtcgggagttcgagaccagcctggccaacatggagaaacctcgtctctactaaaaacacaaagaattagctgggcgtggtggcgcatgcctgtagtcccagctactcgggaggctgaggcaggagaatcgcttgaacctgggaggcagaggttgcagtgagctgagattgcaccactgcaccccagcctgggcaataagagtgaaaactccatctcaaaacaaaaacaaaaccaaccaaacaaagaaaaagttttagggcagtaaggaaaggaggtaaagtacacttggaagagggtcaagcaggtgacttgagagagtcaagtgcactgtttgatcttggacttggggtttgataggttggcatccttccggggcttgcgttaactttcccctggttcttccctt

SEQ ID NO: 349958 - DNA, 791 bp, Homo sapiens
tggtctcaaactcctggcctcaagtgatcctcctgcctcggcctcccaaagtactgggattacaggtataccattatgtccagctaaacctgttccttgaagaaagtgtgaacctcaaattcaaagcccctctctttctcttccctcatcagaatcggctcccagacacctgccactcgtgaatgcatctgataaactcactcacactgaggccttggggactgagtgagcagggcccagcagtggggagatatatgggggaagtgttagtggtggattattacattaacactcctttgctcttgacatctcatgcttacgcagtcttttccaatgcttgcagaattgcgggctactctgttcattatgcctgtgcctttgatacttcttttaatggcataaatgtccgttctgctctatcatggactatcctcttaatacttcctggcctcttttataattcaaccctgctacacacgccttatttaacccgtgataattccgctgtaaactatctccatctgatatctccatcttctttcttacacttaactttgacttctaactcgtgcctcttctgtacgctgtacaattaccccatttcttttccctcctcctttcctatttccctcactgcattaccctctaaactcacctttctctatttccccttcatcaaggtccatttttctttatttctcaaattgtctcccctcacttcatatctgcactctttcatgtactactcttcgtcattattaatactccctcttttatacccactctctcct

SEQ ID NO: 349959 - DNA, 772 bp, Homo sapiens
gtcaggagtttgagaccagcctggctaacatggtgaaaccccatctctactaaaaatactaaataaataaataaataaataaataaataagctgggtgtggtggtggaggctgtagtcccagctactcaggaggctgaggtgggaggatcacgagctggggagacggaggctgcagtgagctgagatggctccactgcactccagcctgggtgacagagcaagactccatctccaaaagaaaaagaaactataaacatcattgaaagaaactaaagaagacctaaataaatggaaggaaatcatgttcatggattaaaagacttaatattattaaaatttcattacttcagaagtgatctacagattcaacacaatccctatcaaaatcccagctgtggctgggtgtggcggctcacttctgtaatcctggcacttcaagagccaaggtgggaggattgtttgagccgagaaatttgagaccagcctggcaacatgatctctacaaaaaatatagaaattagccaggcgttgtggtgccagcctgtagtcccagctacccaggaggctgaggaaggaggatcgcttgagtccaggagtttgaggctgcagtgggctatgatcacatcactgctctccggcctgggcaacagtgcaaggtcatgtctcaaaaaaaaaatcccagctggctttttttttttttttgagatggagtcttgctctgttgcccaagctggagtgcagtggcggacgatcagcctcagggcaggccat

SEQ ID NO: 349960 - DNA, 720 bp, Homo sapiens
cacgtaagcatgatggggcacgggtgcgaggtggggcgcacagtgggagcgcgtggggcgtgatgggacacatcgggaggctgaggcacaaggatcacttgaacccgagaggcagaggttacagtgagccgagatcatgccactgcactccagcctgggtgacagagcaagactccatctccaaaagaaaaagaaactataaacatcattgaaagaaactaaagaagacctaaataaatggaaggaaatcatgttcatggattaaaagacttaatattattaaaatttcattacttcagaagtgatctacagattcaacacaatccctatcaaaatcccagctgtggctgggtgtggcggctcacttctgtaatcctggcacttcaagagccaaggtgggaggattgtttgagccgagaaatttgagaccagcctggcaacatgatctctacaaaaaatatagaaattagccaggcgttgtggtgccagcctgtagtcccagctacccaggaggctgaggaaggaggatcgcttgagtccaggagtttgaggctgcagtgggctatgatcacatcactgctctccggcctgggcaacagtgcaaggtcatgtctcaaaaaaaaaatcccagctggctttttttttttttttgagatggagtcttgctctgttgcccaagctggagtgcagtggcggacgatcagcctcagggcaggccat

SEQ ID NO: 349961 - DNA, 448 bp, Homo sapiens
gcagcaccacacctggctaatttttttatttttagtggagattgggtttcatcatgttggccaggctgatctcgaaagcctgacctcaagtgatccgcccaccttaggctcccaaagtgtggggagccaccgtcccggcgtattattacttttagagacgaggtcttgctgtgttttccaggctggagtacagtggctcaatcatagctcactgcagcctcaaactcctggccttaagcaatcctcctgcttcagcctcccaaagtgctgagattataggtgtgagccactgcacctggcctctctattctctccttcctctttctagaatttctattaggcggatgttgaatctcctgaattaatctctaattttcttcccttccctttcccttctccttcccttcccttccccttctctcccctcccctcccctcccttcccctct

SEQ ID NO: 349962 - DNA, 687 bp, Homo sapiens
gcagcaccacacctggctaatttttttatttttagtggagattgggtttcatcatgttggccaggctgatctcgaaagcctgacctcaagtgatccgcccaccttaggctcccaaagtgtggggagccaccgtcccggcgtattattacttttagagacgaggtcttgctgtgttttccaggctggagtacagtggctcaatcatagctcactgcagcctcaaactcctggccttaagcaatcctcctgcttcagcctcccaaagtgctgagattataggtgtgagccaccgtgcccggccttgactaccatattttaaatttactggaggacttttttgttctcttcttttttctttttttaatagcatcccgctcttatttcagaataaaaaaaattttaaggtatgttgagtaagaatctatagagcaatgaaaatgcaagagcaatagctatgggcaccaaatggtcaatcttcttatcataatgttgagtggaagaagccaggtccaccagacacatgctgctcatttatgcaaagtttggacacaggcaaaacctaatcccagtgtccaggatgtaactagagagctacgggcatgcagaagttggaagatgagggaaggcatcacagaggctgtggggtgaactgacttcaaggaatgggtccttccctcagacccacaa

SEQ ID NO: 349963 - DNA, 3981 bp, Homo sapiens
  misc_feature (2811)..(2811): n is a, c, g, or t
  misc_feature (3785)..(3785): n is a, c, g, or t
ggttttttttccgaacgcccgcagcagggtcagaagggaggtggtcgccctccgtcgtggtctggcgtgtattccgagccttggtgtctggcggtttccgagcgttggtgtctggcggtttccgagcgttggtgtctggcggtttccgaccgttggtgtctggcggtttccgaccgttggtgtctggcacgcgccaccctctcttgctttggttgcgccatgccgatgtaccagacaagaagacaagaaaatgatttgaggacagcttcaatcgcggtgtgaagaagaaagcagcaaaacgaccactgaaaacaacgccggtggcaaaatatccaaagaaagggtcccaagcggtacatcgtcatagccggaaacagtcagagccaccagccaatgatcttttcaatgctgcgaaagctgccaaaagtgacatgcagcaccgagaagtccgcgtgaagtgcgtgaaggctctgaaagggctgtacggtaaccgggacctgaccgcacgcctggagctcttcactggccgcttcaaggactggatggtttccatgatcgtggacagagagtacagtgtggcagtggaggccgtcagattactgatacttatccttaagaacatggaaggggtgctgatggacgtggactgtgagagcgtctaccccattgtgtaggcctctaattgaggcctggcctctgctgtgggtgaatttctgtactggaaacttttctaccctgagtgcgagataagaacgatgggtggaagagagcaacgccagagcccaggtgcccagaggactttcttccagcttctgctgtccttctttgtggagagcaagctccacgaccacgctgcttacttagtagacaacctgtgggactgtgcagggactcagctgaaggactgggagggtctgacaagcctgctgctggagaaggaccagagcacgtgccacatggagccagggccagggaccttccacctcctagggtgaaaccaggagagattgcttgcttcacttgtacaagaatcggctcccagacacctgccactcgtgaatgcatctgataaactcactcacactgaggccttggggactgaggccctggcggatcacgggtgcccaggggctcggaggccgcctcctctgggaagcctgcccaggttccgatggactcccacaggcaatacccctgggccttcctcgcggcccctgttggccccaattcccccaccccctgcaaggtctgtgcctctcctgcagccccgccaccaactagggcgagaggagctcgcccccacccaaacgtattggttcgatgaaggaagggcccatggttctgccactggccctggacacccagtgctggtttcccgtggaagtccccctggactgagtggcggctgggtgctctagtgatttgcgacctggggcctctgactcccatcatgttgggaaagtcgttgaacctcaccggtgaaacgggcacagtgaagtcatttccccgaagtctcaggactctgtgtaaggctggggacaggggcttgttggggcctaagggcaccttgggaactgcaggagcccgttctgcctccataagacactcactcctggcagggtcccctctccgggcacagcccagatccacccccatcatccctctccatctgtggctccctgcccctcacagaggattcatcactctgttcagaatccccaggactccctagggaaggaggtcccagcctggcctcccaagaccgtgcttgcccaattccaggacttcctcacatggctcctacctccagcacagaagcggcactaaaccaggtggtcaatcagggagcaccaccgaggttctgaatggtccagggatgagcagtgatgcctcaagctaagccaatcaaagccttccctgggattgtctcaaggagtccgcagtgagattctgggtctcagtactgggaaagggtgaggctgaggctgcctgctgtcctgggggcctcaccctgccaccaacaggaagccacacagagggaagcagaaatgagacgcagccagtgagggcagggtacaaaggtgagatcccggagagacagatgctgggacatcatccttgggtactggttccaacagtgcctgcagatggagccaccctcggagagtccacaacagcagccaatccattctatgcgtgtctgagctactttaagtcgggtttttgactgtttgaatgagagtctcatcttggctaggcaccatggcgcaacaactggggaggtggaggtaggaagattgcttgaggccaagagtcccagagcagcctgggcaacctatcaagacgctgtctttacgaaaagaaaagaaactagctaggtgtggtggtgcgtgcctgtggtcccagctactggggaggctgaggtgggaggattgcttgagcccaggaagtggaggctgcagtgacctatgatggcaccactgtactccagcctgggtgacagagcaagacttcgtctcaaaaaaaaaaaaaaaggttggagaccagcctgggtaacagaccaagaccccgactctggaattaaaacaaaaaacaggatgtggttggtgttttgtaaccaagacgtttagagtaggatggttttcaggctatcaaatttactactatattgctcacaccagaagtccaaatatacacacaaattagatatatttttttgagatggagtcttgctttgtcacccaggatggagtgcagtggcacaatcatagctcactgcctcctccaatttctgggctcaagggatcctcntgcctcagctcacgcacacgcacacacacacacacacacacacacacactccattctctgtctccatgactctggagtaaactaacgtctcgagttgccattggaagccccattgtcctcattttgtttgtttgtttgtttattgagacggagttttgttcttgttgcccaggctggagtgcagtggcacgatctcggctcaccgcaacctctgcctcccaggttcaagcaattctcctgtctcagcctcccaagtagctgggattacaggtgtgcgccaccacgcctggctaattttgttatttttagtagagacggggtttcgccatgttggccgggctggtctcgaactcctgacctcgggtgatccacccacctcagcctcccaaagtgctgggattacaggtgtgagccaccgtgcccggccttgactaccatattttaaatttactggaggacttttttgttctcttcttttttctttttttaatagcatcccgctcttatttcagaataaaaaaaattttaaggtatgttgagtaagaatctatagagcaatgaaaatgcaagagcaatagctatgggcaccaaatggtcaatcttcttatcataatgttgagtggaagaagccaggtccaccagacacatgctgctcatttatgcaaagtttggacacaggcaaaacaaaactagtttgatcgtgatgggaaacattagagaaatgcaaagacatgaccatcataattgtcaggagaaggcattggttaggattgggaagcggcaagcagaagcatttagggattggctggcaatgttttacttctcggctgagtgagggttgcatcggtgtttatttgataacacgttctaggggctgggcaagatggctcatgtttgtagtctcagtactttgggaggccaaagatgggaggattgcttgagcccgtgagtttgagaccagcgtgggtgacatngcgagaccctgtctctacaaaaaaaaaaacgcgcacagtgaaacacaaaacctctgtttggagcgcctttggccccttagaaaggtttctgagacacatgctgttggcacgcggggcacacatgtgtacgcacccgtgggaaagggtggtccaaggagaaactcgggcagacaagtcggtggtcttccccataaag

SEQ ID NO: 349964 - DNA, 4081 bp, Homo sapiens
  misc_feature (2911)..(2911): n is a, c, g, or t
  misc_feature (3885)..(3885): n is a, c, g, or t
ggttttttttccgaacgcccgcagcagggtcagaagggaggtggtcgccctccgtcgtggtctggcgtgtattccgagccttggtgtctggcggtttccgagcgttggtgtctggcggtttccgaccgttggtgtctggcggtttccgaccgttggtgtctggcacgcgccaccctctcttgctttggttgcgccatgccgatgtaccagacaagaagacaagaaaatgatttgaggacagcttcaatcgcggtgtgaagaagaaagcagcaaaacgaccactgaaaacaacgccggtggcaaaatatccaaagaaagggtcccaagcggtacatcgtcatagccggaaacagtcagagccaccagccaatgatcttttcaatgctgcgaaagctgccaaaagtgacatgcagggatgtccttcctgagatccgtgctatctgcattgaggaaattgggtgttggatgcaaagctacagcacgtctttcctcaccgacagctatttaaaatatattggttggactctgcatgataagcaccgagaagtccgcgtgaagtgcgtgaaggctctgaaagggctgtacggtaaccgggacctgaccgcacgcctggagctcttcactggccgcttcaaggactggatggtttccatgatcgtggacagagagtacagtgtggcagtggaggccgtcagattactgatacttatccttaagaacatggaaggggtgctgatggacgtggactgtgagagcgtctaccccattgtgtaggcctctaattgaggcctggcctctgctgtgggtgaatttctgtactggaaacttttctaccctgagtgcgagataagaacgatgggtggaagagagcaacgccagagcccaggtgcccagaggactttcttccagcttctgctgtccttctttgtggagagcaagctccacgaccacgctgcttacttagtagacaacctgtgggactgtgcagggactcagctgaaggactgggagggtctgacaagcctgctgctggagaaggaccagagcacgtgccacatggagccagggccagggaccttccacctcctagggtgaaaccaggagagattgcttgcttcacttgtacaagaatcggctcccagacacctgccactcgtgaatgcatctgataaactcactcacactgaggccttggggactgaggccctggcggatcacgggtgcccaggggctcggaggccgcctcctctgggaagcctgcccaggttccgatggactcccacaggcaatacccctgggccttcctcgcggcccctgttggccccaattcccccaccccctgcaaggtctgtgcctctcctgcagccccgccaccaactagggcgagaggagctcgcccccacccaaacgtattggttcgatgaaggaagggcccatggttctgccactggccctggacacccagtgctggtttcccgtggaagtccccctggactgagtggcggctgggtgctctagtgatttgcgacctggggcctctgactcccatcatgttgggaaagtcgttgaacctcaccggtgaaacgggcacagtgaagtcatttccccgaagtctcaggactctgtgtaaggctggggacaggggcttgttggggcctaagggcaccttgggaactgcaggagcccgttctgcctccataagacactcactcctggcagggtcccctctccgggcacagcccagatccacccccatcatccctctccatctgtggctccctgcccctcacagaggattcatcactctgttcagaatccccaggactccctagggaaggaggtcccagcctggcctcccaagaccgtgcttgcccaattccaggacttcctcacatggctcctacctccagcacagaagcggcactaaaccaggtggtcaatcagggagcaccaccgaggttctgaatggtccagggatgagcagtgatgcctcaagctaagccaatcaaagccttccctgggattgtctcaaggagtccgcagtgagattctgggtctcagtactgggaaagggtgaggctgaggctgcctgctgtcctgggggcctcaccctgccaccaacaggaagccacacagagggaagcagaaatgagacgcagccagtgagggcagggtacaaaggtgagatcccggagagacagatgctgggacatcatccttgggtactggttccaacagtgcctgcagatggagccaccctcggagagtccacaacagcagccaatccattctatgcgtgtctgagctactttaagtcgggtttttgactgtttgaatgagagtctcatcttggctaggcaccatggcgcaacaactggggaggtggaggtaggaagattgcttgaggccaagagtcccagagcagcctgggcaacctatcaagacgctgtctttacgaaaagaaaagaaactagctaggtgtggtggtgcgtgcctgtggtcccagctactggggaggctgaggtgggaggattgcttgagcccaggaagtggaggctgcagtgacctatgatggcaccactgtactccagcctgggtgacagagcaagacttcgtctcaaaaaaaaaaaaaaaggttggagaccagcctgggtaacagaccaagaccccgactctggaattaaaacaaaaaacaggatgtggttggtgttttgtaaccaagacgtttagagtaggatggttttcaggctatcaaatttactactatattgctcacaccagaagtccaaatatacacacaaattagatatatttttttgagatggagtcttgctttgtcacccaggatggagtgcagtggcacaatcatagctcactgcctcctccaatttctgggctcaagggatcctcntgcctcagctcacgcacacgcacacacacacacacacacacacacacactccattctctgtctccatgactctggagtaaactaacgtctcgagttgccattggaagccccattgtcctcattttgtttgtttgtttgtttattgagacggagttttgttcttgttgcccaggctggagtgcagtggcacgatctcggctcaccgcaacctctgcctcccaggttcaagcaattctcctgtctcagcctcccaagtagctgggattacaggtgtgcgccaccacgcctggctaattttgttatttttagtagagacggggtttcgccatgttggccgggctggtctcgaactcctgacctcgggtgatccacccacctcagcctcccaaagtgctgggattacaggtgtgagccaccgtgcccggccttgactaccatattttaaatttactggaggacttttttgttctcttcttttttctttttttaatagcatcccgctcttatttcagaataaaaaaaattttaaggtatgttgagtaagaatctatagagcaatgaaaatgcaagagcaatagctatgggcaccaaatggtcaatcttcttatcataatgttgagtggaagaagccaggtccaccagacacatgctgctcatttatgcaaagtttggacacaggcaaaacaaaactagtttgatcgtgatgggaaacattagagaaatgcaaagacatgaccatcataattgtcaggagaaggcattggttaggattgggaagcggcaagcagaagcatttagggattggctggcaatgttttacttctcggctgagtgagggttgcatcggtgtttatttgataacacgttctaggggctgggcaagatggctcatgtttgtagtctcagtactttgggaggccaaagatgggaggattgcttgagcccgtgagtttgagaccagcgtgggtgacatngcgagaccctgtctctacaaaaaaaaaaacgcgcacagtgaaacacaaaacctctgtttggagcgcctttggccccttagaaaggtttctgagacacatgctgttggcacgcggggcacacatgtgtacgcacccgtgggaaagggtggtccaaggagaaactcgggcagacaagtcggtggtcttccccataaag

SEQ ID NO: 349965 - DNA, 4240 bp, Homo sapiens
  misc_feature (3070)..(3070): n is a, c, g, or t
  misc_feature (4044)..(4044): n is a, c, g, or t
ggttttttttccgaacgcccgcagcagggtcagaagggaggtggtcgccctccgtcgtggtctggcgtgtattccgagccttggtgtctggcggtttccgagcgttggtgtctggcggtttccgagcgttggtgtctggcggtttccgaccgttggtgtctggcggtttccgaccgttggtgtctggcacgcgccaccctctcttgctttggttgcgccatgccgatgtaccaggtaaagccctatcaccgggtctgcgcccctctccgtgtggagcccacctgcatgtactggctccccaacatgcacggcaggagcggcggcccagcacttggcactggccacttgcagtagagacggggttttgccatgttgaccaggctggtcttgaactcctgacctcaggcgatccgcccgccttgaactcccaaagtgctggattacaggtgtgagccactgtgcccggcacctaaacaacatagttttgatatagacaagaagacaagaaaatgatttgaggacagcttcaatcgcggtgtgaagaagaaagcagcaaaacgaccactgaaaacaacgccggtggcaaaatatccaaagaaagggtcccaagcggtacatcgtcatagccggaaacagtcagagccaccagccaatgatcttttcaatgctgcgaaagctgccaaaagtgacatgcagcaccgagaagtccgcgtgaagtgcgtgaaggctctgaaagggctgtacggtaaccgggacctgaccgcacgcctggagctcttcactggccgcttcaaggactggatggtttccatgatcgtggacagagagtacagtgtggcagtggaggccgtcagattactgatacttatccttaagaacatggaaggggtgctgatggacgtggactgtgagagcgtctaccccattgtgtaggcctctaattgaggcctggcctctgctgtgggtgaatttctgtactggaaacttttctaccctgagtgcgagataagaacgatgggtggaagagagcaacgccagagcccaggtgcccagaggactttcttccagcttctgctgtccttctttgtggagagcaagctccacgaccacgctgcttacttagtagacaacctgtgggactgtgcagggactcagctgaaggactgggagggtctgacaagcctgctgctggagaaggaccagagcacgtgccacatggagccagggccagggaccttccacctcctagggtgaaaccaggagagattgcttgcttcacttgtacaagaatcggctcccagacacctgccactcgtgaatgcatctgataaactcactcacactgaggccttggggactgaggccctggcggatcacgggtgcccaggggctcggaggccgcctcctctgggaagcctgcccaggttccgatggactcccacaggcaatacccctgggccttcctcgcggcccctgttggccccaattcccccaccccctgcaaggtctgtgcctctcctgcagccccgccaccaactagggcgagaggagctcgcccccacccaaacgtattggttcgatgaaggaagggcccatggttctgccactggccctggacacccagtgctggtttcccgtggaagtccccctggactgagtggcggctgggtgctctagtgatttgcgacctggggcctctgactcccatcatgttgggaaagtcgttgaacctcaccggtgaaacgggcacagtgaagtcatttccccgaagtctcaggactctgtgtaaggctggggacaggggcttgttggggcctaagggcaccttgggaactgcaggagcccgttctgcctccataagacactcactcctggcagggtcccctctccgggcacagcccagatccacccccatcatccctctccatctgtggctccctgcccctcacagaggattcatcactctgttcagaatccccaggactccctagggaaggaggtcccagcctggcctcccaagaccgtgcttgcccaattccaggacttcctcacatggctcctacctccagcacagaagcggcactaaaccaggtggtcaatcagggagcaccaccgaggttctgaatggtccagggatgagcagtgatgcctcaagctaagccaatcaaagccttccctgggattgtctcaaggagtccgcagtgagattctgggtctcagtactgggaaagggtgaggctgaggctgcctgctgtcctgggggcctcaccctgccaccaacaggaagccacacagagggaagcagaaatgagacgcagccagtgagggcagggtacaaaggtgagatcccggagagacagatgctgggacatcatccttgggtactggttccaacagtgcctgcagatggagccaccctcggagagtccacaacagcagccaatccattctatgcgtgtctgagctactttaagtcgggtttttgactgtttgaatgagagtctcatcttggctaggcaccatggcgcaacaactggggaggtggaggtaggaagattgcttgaggccaagagtcccagagcagcctgggcaacctatcaagacgctgtctttacgaaaagaaaagaaactagctaggtgtggtggtgcgtgcctgtggtcccagctactggggaggctgaggtgggaggattgcttgagcccaggaagtggaggctgcagtgacctatgatggcaccactgtactccagcctgggtgacagagcaagacttcgtctcaaaaaaaaaaaaaaaggttggagaccagcctgggtaacagaccaagaccccgactctggaattaaaacaaaaaacaggatgtggttggtgttttgtaaccaagacgtttagagtaggatggttttcaggctatcaaatttactactatattgctcacaccagaagtccaaatatacacacaaattagatatatttttttgagatggagtcttgctttgtcacccaggatggagtgcagtggcacaatcatagctcactgcctcctccaatttctgggctcaagggatcctcntgcctcagctcacgcacacgcacacacacacacacacacacacacacactccattctctgtctccatgactctggagtaaactaacgtctcgagttgccattggaagccccattgtcctcattttgtttgtttgtttgtttattgagacggagttttgttcttgttgcccaggctggagtgcagtggcacgatctcggctcaccgcaacctctgcctcccaggttcaagcaattctcctgtctcagcctcccaagtagctgggattacaggtgtgcgccaccacgcctggctaattttgttatttttagtagagacggggtttcgccatgttggccgggctggtctcgaactcctgacctcgggtgatccacccacctcagcctcccaaagtgctgggattacaggtgtgagccaccgtgcccggccttgactaccatattttaaatttactggaggacttttttgttctcttcttttttctttttttaatagcatcccgctcttatttcagaataaaaaaaattttaaggtatgttgagtaagaatctatagagcaatgaaaatgcaagagcaatagctatgggcaccaaatggtcaatcttcttatcataatgttgagtggaagaagccaggtccaccagacacatgctgctcatttatgcaaagtttggacacaggcaaaacaaaactagtttgatcgtgatgggaaacattagagaaatgcaaagacatgaccatcataattgtcaggagaaggcattggttaggattgggaagcggcaagcagaagcatttagggattggctggcaatgttttacttctcggctgagtgagggttgcatcggtgtttatttgataacacgttctaggggctgggcaagatggctcatgtttgtagtctcagtactttgggaggccaaagatgggaggattgcttgagcccgtgagtttgagaccagcgtgggtgacatngcgagaccctgtctctacaaaaaaaaaaacgcgcacagtgaaacacaaaacctctgtttggagcgcctttggccccttagaaaggtttctgagacacatgctgttggcacgcggggcacacatgtgtacgcacccgtgggaaagggtggtccaaggagaaactcgggcagacaagtcggtggtcttccccataaag

SEQ ID NO: 349966 - DNA, 4658 bp, Homo sapiens
  misc_feature (3488)..(3488): n is a, c, g, or t
  misc_feature (4462)..(4462): n is a, c, g, or t
ggttttttttccgaacgcccgcagcagggtcagaagggaggtggtcgccctccgtcgtggtctggcgtgtattccgagccttggtgtctggcggtttccgagcgttggtgtctggcggtttccgaccgttggtgtctggcggtttccgaccgttggtgtctggcacgcgccaccctctcttgctttggttgcgccatgccgatgtaccagacaagaagacaagaaaatgatttgaggacagcttcaatcgcggtgtgaagaagaaagcagcaaaacgaccactgaaaacaacgccggtggcaaaatatccaaagaaagggtcccaagcggtacatcgtcatagccggaaacagtcagagccaccagccaatgatcttttcaatgctgcgaaagctgccaaaagtgacatgcagggatgtccttcctgagatccgtgctatctgcattgaggaaattgggtgttggatgcaaagctacagcacgtctttcctcaccgacagctatttaaaatatattggttggactctgcatgataagcaccgagaagtccgcgtgaagtgcgtgaaggctctgaaagggctgtacggtaaccgggacctgaccgcacgcctggagctcttcactggccgcttcaaggactggatggtttccatgatcgtggacagagagtacagtgtggcagtggaggccgtcagattactgatacttatccttaagaacatggaaggggtgctgatggacgtggactgtgagagcgtctaccccattgtgtaggcctctaattgaggcctggcctctgctgtgggtgaatttctgtactggaagtgagtggggctccttttacgtttctttaacaccaccctctcggtttctctcccacatgtgctgctgccctacttaaggcctccccatctccgtggaagtctctctgctgtctcttttcctctctcagctccttggggctttccttagctctgcacctccttttcctttatcatctccttgggccatctcctccctctgtggtcatcattacacctccttgtttcctcctgtgctgagccctttccttgtgtccattccaccagacttttctaccctgagtgcgagataagaacgatgggtggaagagagcaacgccagagcccaggtgcccagaggactttcttccagcttctgctgtccttctttgtggagagcaaggtgacatacacagagataactctggctgttgtgcataggacctacaagtgggctggggttggtggttcacgcctgtaagcccaacactttgggaggctgaggtgggaggatcctttgagcccaggagtttgagaccagcttgggcaacatagtgagaccctgtctctaccaaaaaaaaaaaaaaaaaaaaaaaagacagatggagaaggatgggggtgtacactgtaggaaggagagcgatatttaatcagtaaccacttcctagggtattttaacatgccatcactaaatccccatgcacctccttccccagctccacgaccacgctgcttacttagtagacaacctgtgggactgtgcagggactcagctgaaggactgggagggtctgacaagcctgctgctggagaaggaccagagcacgtgccacatggagccagggccagggaccttccacctcctagggtgaaaccaggagagattgcttgcttcacttgtacaagaatcggctcccagacacctgccactcgtgaatgcatctgataaactcactcacactgaggccttggggactgaggccctggcggatcacgggtgcccaggggctcggaggccgcctcctctgggaagcctgcccaggttccgatggactcccacaggcaatacccctgggccttcctcgcggcccctgttggccccaattcccccaccccctgcaaggtctgtgcctctcctgcagccccgccaccaactagggcgagaggagctcgcccccacccaaacgtattggttcgatgaaggaagggcccatggttctgccactggccctggacacccagtgctggtttcccgtggaagtccccctggactgagtggcggctgggtgctctagtgatttgcgacctggggcctctgactcccatcatgttgggaaagtcgttgaacctcaccggtgaaacgggcacagtgaagtcatttccccgaagtctcaggactctgtgtaaggctggggacaggggcttgttggggcctaagggcaccttgggaactgcaggagcccgttctgcctccataagacactcactcctggcagggtcccctctccgggcacagcccagatccacccccatcatccctctccatctgtggctccctgcccctcacagaggattcatcactctgttcagaatccccaggactccctagggaaggaggtcccagcctggcctcccaagaccgtgcttgcccaattccaggacttcctcacatggctcctacctccagcacagaagcggcactaaaccaggtggtcaatcagggagcaccaccgaggttctgaatggtccagggatgagcagtgatgcctcaagctaagccaatcaaagccttccctgggattgtctcaaggagtccgcagtgagattctgggtctcagtactgggaaagggtgaggctgaggctgcctgctgtcctgggggcctcaccctgccaccaacaggaagccacacagagggaagcagaaatgagacgcagccagtgagggcagggtacaaaggtgagatcccggagagacagatgctgggacatcatccttgggtactggttccaacagtgcctgcagatggagccaccctcggagagtccacaacagcagccaatccattctatgcgtgtctgagctactttaagtcgggtttttgactgtttgaatgagagtctcatcttggctaggcaccatggcgcaacaactggggaggtggaggtaggaagattgcttgaggccaagagtcccagagcagcctgggcaacctatcaagacgctgtctttacgaaaagaaaagaaactagctaggtgtggtggtgcgtgcctgtggtcccagctactggggaggctgaggtgggaggattgcttgagcccaggaagtggaggctgcagtgacctatgatggcaccactgtactccagcctgggtgacagagcaagacttcgtctcaaaaaaaaaaaaaaaggttggagaccagcctgggtaacagaccaagaccccgactctggaattaaaacaaaaaacaggatgtggttggtgttttgtaaccaagacgtttagagtaggatggttttcaggctatcaaatttactactatattgctcacaccagaagtccaaatatacacacaaattagatatatttttttgagatggagtcttgctttgtcacccaggatggagtgcagtggcacaatcatagctcactgcctcctccaatttctgggctcaagggatcctcntgcctcagctcacgcacacgcacacacacacacacacacacacacacactccattctctgtctccatgactctggagtaaactaacgtctcgagttgccattggaagccccattgtcctcattttgtttgtttgtttgtttattgagacggagttttgttcttgttgcccaggctggagtgcagtggcacgatctcggctcaccgcaacctctgcctcccaggttcaagcaattctcctgtctcagcctcccaagtagctgggattacaggtgtgcgccaccacgcctggctaattttgttatttttagtagagacggggtttcgccatgttggccgggctggtctcgaactcctgacctcgggtgatccacccacctcagcctcccaaagtgctgggattacaggtgtgagccaccgtgcccggccttgactaccatattttaaatttactggaggacttttttgttctcttcttttttctttttttaatagcatcccgctcttatttcagaataaaaaaaattttaaggtatgttgagtaagaatctatagagcaatgaaaatgcaagagcaatagctatgggcaccaaatggtcaatcttcttatcataatgttgagtggaagaagccaggtccaccagacacatgctgctcatttatgcaaagtttggacacaggcaaaacaaaactagtttgatcgtgatgggaaacattagagaaatgcaaagacatgaccatcataattgtcaggagaaggcattggttaggattgggaagcggcaagcagaagcatttagggattggctggcaatgttttacttctcggctgagtgagggttgcatcggtgtttatttgataacacgttctaggggctgggcaagatggctcatgtttgtagtctcagtactttgggaggccaaagatgggaggattgcttgagcccgtgagtttgagaccagcgtgggtgacatngcgagaccctgtctctacaaaaaaaaaaacgcgcacagtgaaacacaaaacctctgtttggagcgcctttggccccttagaaaggtttctgagacacatgctgttggcacgcggggcacacatgtgtacgcacccgtgggaaagggtggtccaaggagaaactcgggcagacaagtcggtggtcttccccataaag

SEQ ID NO: 349967 - DNA, 4966 bp, Homo sapiens
  misc_feature (3796)..(3796): n is a, c, g, or t
  misc_feature (4770)..(4770): n is a, c, g, or t
ggttttttttccgaacgcccgcagcagggtcagaagggaggtggtcgccctccgtcgtggtctggcgtgtattccgagccttggtgtctggcggtttccgagcgttggtgtctggcggtttccgaccgttggtgtctggcggtttccgaccgttggtgtctggcacgcgccaccctctcttgctttggttgcgccatgccgatgtaccagacaagaagacaagaaaatgatttgaggacagcttcaatcgcggtgtgaagaagaaagcagcaaaacgaccactgaaaacaacgccggtggcaaaatatccaaagaaagggtcccaagcggtacatcgtcatagccggaaacagtcagagccaccagccaatgatcttttcaatgctgcgaaagctgccaaaagtgacatgcagggatgtccttcctgagatccgtgctatctgcattgaggaaattgggtgttggatgcaaagctacagcacgtctttcctcaccgacagctatttaaaatatattggttggactctgcatgataagcaccgagaagtccgcgtgaagtgcgtgaaggctctgaaagggctgtacggtaaccgggacctgaccgcacgcctggagctcttcactggccgcttcaaggactggatggtttccatgatcgtggacagagagtacagtgtggcagtggaggccgtcagattactgatacttatccttaagtgagtcctgggaagaggggaggccagtgtctcagacctttgcccttccagggtcatctccctccacctgtcacagctgactcttccatctgtgcaggttgactgaggtcattcctgagttgcagtatgttgagagggtaatatttctgtcttctctaactccccatactcccttgtcttccactctccatttaggagttttttgtgagttatgtccttgttgcttttgcctctttttctttctagccttgattgtgccagaagacaatgtccctattcacacactctttctgcttttctgtgggcaggaacatggaaggggtgctgatggacgtggactgtgagagcgtctaccccattgtgtaggcctctaattgaggcctggcctctgctgtgggtgaatttctgtactggaagtgagtggggctccttttacgtttctttaacaccaccctctcggtttctctcccacatgtgctgctgccctacttaaggcctccccatctccgtggaagtctctctgctgtctcttttcctctctcagctccttggggctttccttagctctgcacctccttttcctttatcatctccttgggccatctcctccctctgtggtcatcattacacctccttgtttcctcctgtgctgagccctttccttgtgtccattccaccagacttttctaccctgagtgcgagataagaacgatgggtggaagagagcaacgccagagcccaggtgcccagaggactttcttccagcttctgctgtccttctttgtggagagcaaggtgacatacacagagataactctggctgttgtgcataggacctacaagtgggctggggttggtggttcacgcctgtaagcccaacactttgggaggctgaggtgggaggatcctttgagcccaggagtttgagaccagcttgggcaacatagtgagaccctgtctctaccaaaaaaaaaaaaaaaaaaaaaaaagacagatggagaaggatgggggtgtacactgtaggaaggagagcgatatttaatcagtaaccacttcctagggtattttaacatgccatcactaaatccccatgcacctccttccccagctccacgaccacgctgcttacttagtagacaacctgtgggactgtgcagggactcagctgaaggactgggagggtctgacaagcctgctgctggagaaggaccagagcacgtgccacatggagccagggccagggaccttccacctcctagggtgaaaccaggagagattgcttgcttcacttgtacaagaatcggctcccagacacctgccactcgtgaatgcatctgataaactcactcacactgaggccttggggactgaggccctggcggatcacgggtgcccaggggctcggaggccgcctcctctgggaagcctgcccaggttccgatggactcccacaggcaatacccctgggccttcctcgcggcccctgttggccccaattcccccaccccctgcaaggtctgtgcctctcctgcagccccgccaccaactagggcgagaggagctcgcccccacccaaacgtattggttcgatgaaggaagggcccatggttctgccactggccctggacacccagtgctggtttcccgtggaagtccccctggactgagtggcggctgggtgctctagtgatttgcgacctggggcctctgactcccatcatgttgggaaagtcgttgaacctcaccggtgaaacgggcacagtgaagtcatttccccgaagtctcaggactctgtgtaaggctggggacaggggcttgttggggcctaagggcaccttgggaactgcaggagcccgttctgcctccataagacactcactcctggcagggtcccctctccgggcacagcccagatccacccccatcatccctctccatctgtggctccctgcccctcacagaggattcatcactctgttcagaatccccaggactccctagggaaggaggtcccagcctggcctcccaagaccgtgcttgcccaattccaggacttcctcacatggctcctacctccagcacagaagcggcactaaaccaggtggtcaatcagggagcaccaccgaggttctgaatggtccagggatgagcagtgatgcctcaagctaagccaatcaaagccttccctgggattgtctcaaggagtccgcagtgagattctgggtctcagtactgggaaagggtgaggctgaggctgcctgctgtcctgggggcctcaccctgccaccaacaggaagccacacagagggaagcagaaatgagacgcagccagtgagggcagggtacaaaggtgagatcccggagagacagatgctgggacatcatccttgggtactggttccaacagtgcctgcagatggagccaccctcggagagtccacaacagcagccaatccattctatgcgtgtctgagctactttaagtcgggtttttgactgtttgaatgagagtctcatcttggctaggcaccatggcgcaacaactggggaggtggaggtaggaagattgcttgaggccaagagtcccagagcagcctgggcaacctatcaagacgctgtctttacgaaaagaaaagaaactagctaggtgtggtggtgcgtgcctgtggtcccagctactggggaggctgaggtgggaggattgcttgagcccaggaagtggaggctgcagtgacctatgatggcaccactgtactccagcctgggtgacagagcaagacttcgtctcaaaaaaaaaaaaaaaggttggagaccagcctgggtaacagaccaagaccccgactctggaattaaaacaaaaaacaggatgtggttggtgttttgtaaccaagacgtttagagtaggatggttttcaggctatcaaatttactactatattgctcacaccagaagtccaaatatacacacaaattagatatatttttttgagatggagtcttgctttgtcacccaggatggagtgcagtggcacaatcatagctcactgcctcctccaatttctgggctcaagggatcctcntgcctcagctcacgcacacgcacacacacacacacacacacacacacactccattctctgtctccatgactctggagtaaactaacgtctcgagttgccattggaagccccattgtcctcattttgtttgtttgtttgtttattgagacggagttttgttcttgttgcccaggctggagtgcagtggcacgatctcggctcaccgcaacctctgcctcccaggttcaagcaattctcctgtctcagcctcccaagtagctgggattacaggtgtgcgccaccacgcctggctaattttgttatttttagtagagacggggtttcgccatgttggccgggctggtctcgaactcctgacctcgggtgatccacccacctcagcctcccaaagtgctgggattacaggtgtgagccaccgtgcccggccttgactaccatattttaaatttactggaggacttttttgttctcttcttttttctttttttaatagcatcccgctcttatttcagaataaaaaaaattttaaggtatgttgagtaagaatctatagagcaatgaaaatgcaagagcaatagctatgggcaccaaatggtcaatcttcttatcataatgttgagtggaagaagccaggtccaccagacacatgctgctcatttatgcaaagtttggacacaggcaaaacaaaactagtttgatcgtgatgggaaacattagagaaatgcaaagacatgaccatcataattgtcaggagaaggcattggttaggattgggaagcggcaagcagaagcatttagggattggctggcaatgttttacttctcggctgagtgagggttgcatcggtgtttatttgataacacgttctaggggctgggcaagatggctcatgtttgtagtctcagtactttgggaggccaaagatgggaggattgcttgagcccgtgagtttgagaccagcgtgggtgacatngcgagaccctgtctctacaaaaaaaaaaacgcgcacagtgaaacacaaaacctctgtttggagcgcctttggccccttagaaaggtttctgagacacatgctgttggcacgcggggcacacatgtgtacgcacccgtgggaaagggtggtccaaggagaaactcgggcagacaagtcggtggtcttccccataaag

SEQ ID NO: 349968 - DNA, 4866 bp, Homo sapiens
  misc_feature (3696)..(3696): n is a, c, g, or t
  misc_feature (4670)..(4670): n is a, c, g, or t
ggttttttttccgaacgcccgcagcagggtcagaagggaggtggtcgccctccgtcgtggtctggcgtgtattccgagccttggtgtctggcggtttccgagcgttggtgtctggcggtttccgagcgttggtgtctggcggtttccgaccgttggtgtctggcggtttccgaccgttggtgtctggcacgcgccaccctctcttgctttggttgcgccatgccgatgtaccagacaagaagacaagaaaatgatttgaggacagcttcaatcgcggtgtgaagaagaaagcagcaaaacgaccactgaaaacaacgccggtggcaaaatatccaaagaaagggtcccaagcggtacatcgtcatagccggaaacagtcagagccaccagccaatgatcttttcaatgctgcgaaagctgccaaaagtgacatgcagcaccgagaagtccgcgtgaagtgcgtgaaggctctgaaagggctgtacggtaaccgggacctgaccgcacgcctggagctcttcactggccgcttcaaggactggatggtttccatgatcgtggacagagagtacagtgtggcagtggaggccgtcagattactgatacttatccttaagtgagtcctgggaagaggggaggccagtgtctcagacctttgcccttccagggtcatctccctccacctgtcacagctgactcttccatctgtgcaggttgactgaggtcattcctgagttgcagtatgttgagagggtaatatttctgtcttctctaactccccatactcccttgtcttccactctccatttaggagttttttgtgagttatgtccttgttgcttttgcctctttttctttctagccttgattgtgccagaagacaatgtccctattcacacactctttctgcttttctgtgggcaggaacatggaaggggtgctgatggacgtggactgtgagagcgtctaccccattgtgtaggcctctaattgaggcctggcctctgctgtgggtgaatttctgtactggaagtgagtggggctccttttacgtttctttaacaccaccctctcggtttctctcccacatgtgctgctgccctacttaaggcctccccatctccgtggaagtctctctgctgtctcttttcctctctcagctccttggggctttccttagctctgcacctccttttcctttatcatctccttgggccatctcctccctctgtggtcatcattacacctccttgtttcctcctgtgctgagccctttccttgtgtccattccaccagacttttctaccctgagtgcgagataagaacgatgggtggaagagagcaacgccagagcccaggtgcccagaggactttcttccagcttctgctgtccttctttgtggagagcaaggtgacatacacagagataactctggctgttgtgcataggacctacaagtgggctggggttggtggttcacgcctgtaagcccaacactttgggaggctgaggtgggaggatcctttgagcccaggagtttgagaccagcttgggcaacatagtgagaccctgtctctaccaaaaaaaaaaaaaaaaaaaaaaaagacagatggagaaggatgggggtgtacactgtaggaaggagagcgatatttaatcagtaaccacttcctagggtattttaacatgccatcactaaatccccatgcacctccttccccagctccacgaccacgctgcttacttagtagacaacctgtgggactgtgcagggactcagctgaaggactgggagggtctgacaagcctgctgctggagaaggaccagagcacgtgccacatggagccagggccagggaccttccacctcctagggtgaaaccaggagagattgcttgcttcacttgtacaagaatcggctcccagacacctgccactcgtgaatgcatctgataaactcactcacactgaggccttggggactgaggccctggcggatcacgggtgcccaggggctcggaggccgcctcctctgggaagcctgcccaggttccgatggactcccacaggcaatacccctgggccttcctcgcggcccctgttggccccaattcccccaccccctgcaaggtctgtgcctctcctgcagccccgccaccaactagggcgagaggagctcgcccccacccaaacgtattggttcgatgaaggaagggcccatggttctgccactggccctggacacccagtgctggtttcccgtggaagtccccctggactgagtggcggctgggtgctctagtgatttgcgacctggggcctctgactcccatcatgttgggaaagtcgttgaacctcaccggtgaaacgggcacagtgaagtcatttccccgaagtctcaggactctgtgtaaggctggggacaggggcttgttggggcctaagggcaccttgggaactgcaggagcccgttctgcctccataagacactcactcctggcagggtcccctctccgggcacagcccagatccacccccatcatccctctccatctgtggctccctgcccctcacagaggattcatcactctgttcagaatccccaggactccctagggaaggaggtcccagcctggcctcccaagaccgtgcttgcccaattccaggacttcctcacatggctcctacctccagcacagaagcggcactaaaccaggtggtcaatcagggagcaccaccgaggttctgaatggtccagggatgagcagtgatgcctcaagctaagccaatcaaagccttccctgggattgtctcaaggagtccgcagtgagattctgggtctcagtactgggaaagggtgaggctgaggctgcctgctgtcctgggggcctcaccctgccaccaacaggaagccacacagagggaagcagaaatgagacgcagccagtgagggcagggtacaaaggtgagatcccggagagacagatgctgggacatcatccttgggtactggttccaacagtgcctgcagatggagccaccctcggagagtccacaacagcagccaatccattctatgcgtgtctgagctactttaagtcgggtttttgactgtttgaatgagagtctcatcttggctaggcaccatggcgcaacaactggggaggtggaggtaggaagattgcttgaggccaagagtcccagagcagcctgggcaacctatcaagacgctgtctttacgaaaagaaaagaaactagctaggtgtggtggtgcgtgcctgtggtcccagctactggggaggctgaggtgggaggattgcttgagcccaggaagtggaggctgcagtgacctatgatggcaccactgtactccagcctgggtgacagagcaagacttcgtctcaaaaaaaaaaaaaaaggttggagaccagcctgggtaacagaccaagaccccgactctggaattaaaacaaaaaacaggatgtggttggtgttttgtaaccaagacgtttagagtaggatggttttcaggctatcaaatttactactatattgctcacaccagaagtccaaatatacacacaaattagatatatttttttgagatggagtcttgctttgtcacccaggatggagtgcagtggcacaatcatagctcactgcctcctccaatttctgggctcaagggatcctcntgcctcagctcacgcacacgcacacacacacacacacacacacacacactccattctctgtctccatgactctggagtaaactaacgtctcgagttgccattggaagccccattgtcctcattttgtttgtttgtttgtttattgagacggagttttgttcttgttgcccaggctggagtgcagtggcacgatctcggctcaccgcaacctctgcctcccaggttcaagcaattctcctgtctcagcctcccaagtagctgggattacaggtgtgcgccaccacgcctggctaattttgttatttttagtagagacggggtttcgccatgttggccgggctggtctcgaactcctgacctcgggtgatccacccacctcagcctcccaaagtgctgggattacaggtgtgagccaccgtgcccggccttgactaccatattttaaatttactggaggacttttttgttctcttcttttttctttttttaatagcatcccgctcttatttcagaataaaaaaaattttaaggtatgttgagtaagaatctatagagcaatgaaaatgcaagagcaatagctatgggcaccaaatggtcaatcttcttatcataatgttgagtggaagaagccaggtccaccagacacatgctgctcatttatgcaaagtttggacacaggcaaaacaaaactagtttgatcgtgatgggaaacattagagaaatgcaaagacatgaccatcataattgtcaggagaaggcattggttaggattgggaagcggcaagcagaagcatttagggattggctggcaatgttttacttctcggctgagtgagggttgcatcggtgtttatttgataacacgttctaggggctgggcaagatggctcatgtttgtagtctcagtactttgggaggccaaagatgggaggattgcttgagcccgtgagtttgagaccagcgtgggtgacatngcgagaccctgtctctacaaaaaaaaaaacgcgcacagtgaaacacaaaacctctgtttggagcgcctttggccccttagaaaggtttctgagacacatgctgttggcacgcggggcacacatgtgtacgcacccgtgggaaagggtggtccaaggagaaactcgggcagacaagtcggtggtcttccccataaag

SEQ ID NO: 349969 - DNA, 4286 bp, Homo sapiens
  misc_feature (3116)..(3116): n is a, c, g, or t
  misc_feature (4090)..(4090): n is a, c, g, or t
ggttttttttccgaacgcccgcagcagggtcagaagggaggtggtcgccctccgtcgtggtctggcgtgtattccgagccttggtgtctggcggtttccgagcgttggtgtctggcggtttccgaccgttggtgtctggcggtttccgaccgttggtgtctggcacgcgccaccctctcttgctttggttgcgccatgccgatgtaccagacaagaagacaagaaaatgatttgaggacagcttcaatcgcggtgtgaagaagaaagcagcaaaacgaccactgaaaacaacgccggtggcaaaatatccaaagaaagggtcccaagcggtacatcgtcatagccggaaacagtcagagccaccagccaatgatcttttcaatgctgcgaaagctgccaaaagtgacatgcagggatgtccttcctgagatccgtgctatctgcattgaggaaattgggtgttggatgcaaagctacagcacgtctttcctcaccgacagctatttaaaatatattggttggactctgcatgataagcaccgagaagtccgcgtgaagtgcgtgaaggctctgaaagggctgtacggtaaccgggacctgaccgcacgcctggagctcttcactggccgcttcaaggactggatggtttccatgatcgtggacagagagtacagtgtggcagtggaggccgtcagattactgatacttatccttaaacttttctaccctgagtgcgagataagaacgatgggtggaagagagcaacgccagagcccaggtgcccagaggactttcttccagcttctgctgtccttctttgtggagagcaaggtgacatacacagagataactctggctgttgtgcataggacctacaagtgggctggggttggtggttcacgcctgtaagcccaacactttgggaggctgaggtgggaggatcctttgagcccaggagtttgagaccagcttgggcaacatagtgagaccctgtctctaccaaaaaaaaaaaaaaaaaaaaaaaagacagatggagaaggatgggggtgtacactgtaggaaggagagcgatatttaatcagtaaccacttcctagggtattttaacatgccatcactaaatccccatgcacctccttccccagctccacgaccacgctgcttacttagtagacaacctgtgggactgtgcagggactcagctgaaggactgggagggtctgacaagcctgctgctggagaaggaccagagcacgtgccacatggagccagggccagggaccttccacctcctagggtgaaaccaggagagattgcttgcttcacttgtacaagaatcggctcccagacacctgccactcgtgaatgcatctgataaactcactcacactgaggccttggggactgaggccctggcggatcacgggtgcccaggggctcggaggccgcctcctctgggaagcctgcccaggttccgatggactcccacaggcaatacccctgggccttcctcgcggcccctgttggccccaattcccccaccccctgcaaggtctgtgcctctcctgcagccccgccaccaactagggcgagaggagctcgcccccacccaaacgtattggttcgatgaaggaagggcccatggttctgccactggccctggacacccagtgctggtttcccgtggaagtccccctggactgagtggcggctgggtgctctagtgatttgcgacctggggcctctgactcccatcatgttgggaaagtcgttgaacctcaccggtgaaacgggcacagtgaagtcatttccccgaagtctcaggactctgtgtaaggctggggacaggggcttgttggggcctaagggcaccttgggaactgcaggagcccgttctgcctccataagacactcactcctggcagggtcccctctccgggcacagcccagatccacccccatcatccctctccatctgtggctccctgcccctcacagaggattcatcactctgttcagaatccccaggactccctagggaaggaggtcccagcctggcctcccaagaccgtgcttgcccaattccaggacttcctcacatggctcctacctccagcacagaagcggcactaaaccaggtggtcaatcagggagcaccaccgaggttctgaatggtccagggatgagcagtgatgcctcaagctaagccaatcaaagccttccctgggattgtctcaaggagtccgcagtgagattctgggtctcagtactgggaaagggtgaggctgaggctgcctgctgtcctgggggcctcaccctgccaccaacaggaagccacacagagggaagcagaaatgagacgcagccagtgagggcagggtacaaaggtgagatcccggagagacagatgctgggacatcatccttgggtactggttccaacagtgcctgcagatggagccaccctcggagagtccacaacagcagccaatccattctatgcgtgtctgagctactttaagtcgggtttttgactgtttgaatgagagtctcatcttggctaggcaccatggcgcaacaactggggaggtggaggtaggaagattgcttgaggccaagagtcccagagcagcctgggcaacctatcaagacgctgtctttacgaaaagaaaagaaactagctaggtgtggtggtgcgtgcctgtggtcccagctactggggaggctgaggtgggaggattgcttgagcccaggaagtggaggctgcagtgacctatgatggcaccactgtactccagcctgggtgacagagcaagacttcgtctcaaaaaaaaaaaaaaaggttggagaccagcctgggtaacagaccaagaccccgactctggaattaaaacaaaaaacaggatgtggttggtgttttgtaaccaagacgtttagagtaggatggttttcaggctatcaaatttactactatattgctcacaccagaagtccaaatatacacacaaattagatatatttttttgagatggagtcttgctttgtcacccaggatggagtgcagtggcacaatcatagctcactgcctcctccaatttctgggctcaagggatcctcntgcctcagctcacgcacacgcacacacacacacacacacacacacacactccattctctgtctccatgactctggagtaaactaacgtctcgagttgccattggaagccccattgtcctcattttgtttgtttgtttgtttattgagacggagttttgttcttgttgcccaggctggagtgcagtggcacgatctcggctcaccgcaacctctgcctcccaggttcaagcaattctcctgtctcagcctcccaagtagctgggattacaggtgtgcgccaccacgcctggctaattttgttatttttagtagagacggggtttcgccatgttggccgggctggtctcgaactcctgacctcgggtgatccacccacctcagcctcccaaagtgctgggattacaggtgtgagccaccgtgcccggccttgactaccatattttaaatttactggaggacttttttgttctcttcttttttctttttttaatagcatcccgctcttatttcagaataaaaaaaattttaaggtatgttgagtaagaatctatagagcaatgaaaatgcaagagcaatagctatgggcaccaaatggtcaatcttcttatcataatgttgagtggaagaagccaggtccaccagacacatgctgctcatttatgcaaagtttggacacaggcaaaacaaaactagtttgatcgtgatgggaaacattagagaaatgcaaagacatgaccatcataattgtcaggagaaggcattggttaggattgggaagcggcaagcagaagcatttagggattggctggcaatgttttacttctcggctgagtgagggttgcatcggtgtttatttgataacacgttctaggggctgggcaagatggctcatgtttgtagtctcagtactttgggaggccaaagatgggaggattgcttgagcccgtgagtttgagaccagcgtgggtgacatngcgagaccctgtctctacaaaaaaaaaaacgcgcacagtgaaacacaaaacctctgtttggagcgcctttggccccttagaaaggtttctgagacacatgctgttggcacgcggggcacacatgtgtacgcacccgtgggaaagggtggtccaaggagaaactcgggcagacaagtcggtggtcttccccataaag

SEQ ID NO: 349970 - DNA, 2758 bp, Homo sapiens
ggttttttttccgaacgcccgcagcagggtcagaagggaggtggtcgccctccgtcgtggtctggcgtgtattccgagccttggtgtctggcggtttccgagcgttggtgtctggcggtttccgaccgttggtgtctggcggtttccgaccgttggtgtctggcacgcgccaccctctcttgctttggttgcgccatgccgatgtaccagacaagaagacaagaaaatgatttgaggacagcttcaatcgcggtgtgaagaagaaagcagcaaaacgaccactgaaaacaacgccggtggcaaaatatccaaagaaagggtcccaagcggtacatcgtcatagccggaaacagtcagagccaccagccaatgatcttttcaatgctgcgaaagctgccaaaagtgacatgcagggatgtccttcctgagatccgtgctatctgcattgaggaaattgggtgttggatgcaaagctacagcacgtctttcctcaccgacagctatttaaaatatattggttggactctgcatgataagcaccgagaagtccgcgtgaagtgcgtgaaggctctgaaagggctgtacggtaaccgggacctgaccgcacgcctggagctcttcactggccgcttcaaggactggatggtttccatgatcgtggacagagagtacagtgtggcagtggaggccgtcagattactgatacttatccttaagaacatggaaggggtgctgatggacgtggactgtgagagcgtctaccccattgtgtaggcctctaattgaggcctggcctctgctgtgggtgaatttctgtactggaagtgagtggggctccttttacgtttctttaacaccaccctctcggtttctctcccacatgtgctgctgccctacttaaggcctccccatctccgtggaagtctctctgctgtctcttttcctctctcagctccttggggctttccttagctctgcacctccttttcctttatcatctccttgggccatctcctccctctgtggtcatcattacacctccttgtttcctcctgtgctgagccctttccttgtgtccattccaccagacttttctaccctgagtgcgagataagaacgatgggtggaagagagcaacgccagagcccaggtgcccagaggactttcttccagcttctgctgtccttctttgtggagagcaaggtgacatacacagagataactctggctgttgtgcataggacctacaagtgggctggggttggtggttcacgcctgtaagcccaacactttgggaggctgaggtgggaggatcctttgagcccaggagtttgagaccagcttgggcaacatagtgagaccctgtctctaccaaaaaaaaaaaaaaaaaaaaaaaagacagatggagaaggatgggggtgtacactgtaggaaggagagcgatatttaatcagtaaccacttcctagggtattttaacatgccatcactaaatccccatgcacctccttccccagctccacgaccacgctgcttacttagtagacaacctgtgggactgtgcagggactcagctgaaggactgggagggtctgacaagcctgctgctggagaaggaccagagcacgtgccacatggagccagggccagggaccttccacctcctagggtgaaaccaggagagattgcttgcttcacttgtacaaggcaggaacggtggcatggggtgggggaaacttggagttggaaggtggctaatctttgattctatgtttttgatcctcctggcactccagacctgggtgatgtgcaggagagcacactgatagaaatccttgtgtccagtgcccagcaactcctgcctcagcctcccgagcagctgggactacaggcgcccgccaccacgcctggctaacttttttgtatttttagtagagacgggttttcaccgtgttggccaggatggtcttgatctcttgaccttgtgatccacctgcctcagcctcccaaagtgctgggattacaggtgtgagccaccgtgcccggccttgactaccatattttaaatttactggaggacttttttgttctcttcttttttctttttttaatagcatcccgctcttatttcagaataaaaaaaattttaaggtatgttgagtaagaatctatagagcaatgaaaatgcaagagcaatagctatgggcaccaaatggtcaatcttcttatcataatgttgagtggaagaagccaggtccaccagacacatgctgctcatttatgcaaagtttggacacaggcaaaacaaaactagtttgatcgtgatgggaaacattagagaaatgcaaagacatgaccatcataattgtcaggagaaggcattggttaggattgggaagcggcaagcagaagcatttagggattggctggcaatgttttacttctcggctgagtgagggttgcatcggtgtttatttgataacacgttctaggggctgggcaagatggctcatgtttgtagtctcagtactttgggaggccaaagatgggaggattgcttgagcccgtgagtttgagaccagcgtgggtgacatagcgagaccctgtctctacaaaaaattaaaaaaaaaaaaaaaaacccagctgcgtgtggtggcacagcctcaaactcctgggctcaagcgatcctcccttggccttccagccactcaggaggctggggtgggaggatcgcttgaacccaggagtttgaggctgca

SEQ ID NO: 349971 - DNA, 3104 bp, Homo sapiens
  misc_feature (1934)..(1934): n is a, c, g, or t
  misc_feature (2908)..(2908): n is a, c, g, or t
tggtctcaaactcctggcctcaagtgatcctcctgcctcggcctcccaaagtactgggattacaggtataccattatgtccagctaaacctgttccttgaagaaagtgtgaacctcaaattcaaagcccctctctttctcttccctcatcagaatcggctcccagacacctgccactcgtgaatgcatctgataaactcactcacactgaggccttggggactgaggccctggcggatcacgggtgcccaggggctcggaggccgcctcctctgggaagcctgcccaggttccgatggactcccacaggcaatacccctgggccttcctcgcggcccctgttggccccaattcccccaccccctgcaaggtctgtgcctctcctgcagccccgccaccaactagggcgagaggagctcgcccccacccaaacgtattggttcgatgaaggaagggcccatggttctgccactggccctggacacccagtgctggtttcccgtggaagtccccctggactgagtggcggctgggtgctctagtgatttgcgacctggggcctctgactcccatcatgttgggaaagtcgttgaacctcaccggtgaaacgggcacagtgaagtcatttccccgaagtctcaggactctgtgtaaggctggggacaggggcttgttggggcctaagggcaccttgggaactgcaggagcccgttctgcctccataagacactcactcctggcagggtcccctctccgggcacagcccagatccacccccatcatccctctccatctgtggctccctgcccctcacagaggattcatcactctgttcagaatccccaggactccctagggaaggaggtcccagcctggcctcccaagaccgtgcttgcccaattccaggacttcctcacatggctcctacctccagcacagaagcggcactaaaccaggtggtcaatcagggagcaccaccgaggttctgaatggtccagggatgagcagtgatgcctcaagctaagccaatcaaagccttccctgggattgtctcaaggagtccgcagtgagattctgggtctcagtactgggaaagggtgaggctgaggctgcctgctgtcctgggggcctcaccctgccaccaacaggaagccacacagagggaagcagaaatgagacgcagccagtgagggcagggtacaaaggtgagatcccggagagacagatgctgggacatcatccttgggtactggttccaacagtgcctgcagatggagccaccctcggagagtccacaacagcagccaatccattctatgcgtgtctgagctactttaagtcgggtttttgactgtttgaatgagagtctcatcttggctaggcaccatggcgcaacaactggggaggtggaggtaggaagattgcttgaggccaagagtcccagagcagcctgggcaacctatcaagacgctgtctttacgaaaagaaaagaaactagctaggtgtggtggtgcgtgcctgtggtcccagctactggggaggctgaggtgggaggattgcttgagcccaggaagtggaggctgcagtgacctatgatggcaccactgtactccagcctgggtgacagagcaagacttcgtctcaaaaaaaaaaaaaaaggttggagaccagcctgggtaacagaccaagaccccgactctggaattaaaacaaaaaacaggatgtggttggtgttttgtaaccaagacgtttagagtaggatggttttcaggctatcaaatttactactatattgctcacaccagaagtccaaatatacacacaaattagatatatttttttgagatggagtcttgctttgtcacccaggatggagtgcagtggcacaatcatagctcactgcctcctccaatttctgggctcaagggatcctcntgcctcagctcacgcacacgcacacacacacacacacacacacacacactccattctctgtctccatgactctggagtaaactaacgtctcgagttgccattggaagccccattgtcctcattttgtttgtttgtttgtttattgagacggagttttgttcttgttgcccaggctggagtgcagtggcacgatctcggctcaccgcaacctctgcctcccaggttcaagcaattctcctgtctcagcctcccaagtagctgggattacaggtgtgcgccaccacgcctggctaattttgttatttttagtagagacggggtttcgccatgttggccgggctggtctcgaactcctgacctcgggtgatccacccacctcagcctcccaaagtgctgggattacaggtgtgagccaccgtgcccggccttgactaccatattttaaatttactggaggacttttttgttctcttcttttttctttttttaatagcatcccgctcttatttcagaataaaaaaaattttaaggtatgttgagtaagaatctatagagcaatgaaaatgcaagagcaatagctatgggcaccaaatggtcaatcttcttatcataatgttgagtggaagaagccaggtccaccagacacatgctgctcatttatgcaaagtttggacacaggcaaaacaaaactagtttgatcgtgatgggaaacattagagaaatgcaaagacatgaccatcataattgtcaggagaaggcattggttaggattgggaagcggcaagcagaagcatttagggattggctggcaatgttttacttctcggctgagtgagggttgcatcggtgtttatttgataacacgttctaggggctgggcaagatggctcatgtttgtagtctcagtactttgggaggccaaagatgggaggattgcttgagcccgtgagtttgagaccagcgtgggtgacatngcgagaccctgtctctacaaaaaaaaaaacgcgcacagtgaaacacaaaacctctgtttggagcgcctttggccccttagaaaggtttctgagacacatgctgttggcacgcggggcacacatgtgtacgcacccgtgggaaagggtggtccaaggagaaactcgggcagacaagtcggtggtcttccccataaag

SEQ ID NO: 349972 - DNA, 3069 bp, Homo sapiens
ggttttttttccgaacgcccgcagcagggtcagaagggaggtggtcgccctccgtcgtggtctggcgtgtattccgagccttggtgtctggcggtttccgagcgttggtgtctggcggtttccgaccgttggtgtctggcggtttccgaccgttggtgtctggcacgcgccaccctctcttgctttggttgcgccatgccgatgtaccagacaagaagacaagaaaatgatttgaggacagcttcaatcgcggtgtgaagaagaaagcagcaaaacgaccactgaaaacaacgccggtggcaaaatatccaaagaaagggtcccaagcggtacatcgtcatagccggaaacagtcagagccaccagccaatgatcttttcaatgctgcgaaagctgccaaaagtgacatgcagggatgtccttcctgagatccgtgctatctgcattgaggaaattgggtgttggatgcaaagctacagcacgtctttcctcaccgacagctatttaaaatatattggttggactctgcatgataagcaccgagaagtccgcgtgaagtgcgtgaaggctctgaaagggctgtacggtaaccgggacctgaccgcacgcctggagctcttcactggccgcttcaaggactggatggtttccatgatcgtggacagagagtacagtgtggcagtggaggccgtcagattactgatacttatccttaagaacatggaaggggtgctgatggacgtggactgtgagagcgtctaccccattgtgtaggcctctaattgaggcctggcctctgctgtgggtgaatttctgtactggaagtgagtggggctccttttacgtttctttaacaccaccctctcggtttctctcccacatgtgctgctgccctacttaaggcctccccatctccgtggaagtctctctgctgtctcttttcctctctcagctccttggggctttccttagctctgcacctccttttcctttatcatctccttgggccatctcctccctctgtggtcatcattacacctccttgtttcctcctgtgctgagccctttccttgtgtccattccaccagacttttctaccctgagtgcgagataagaacgatgggtggaagagagcaacgccagagcccaggtgcccagaggactttcttccagcttctgctgtccttctttgtggagagcaaggtgacatacacagagataactctggctgttgtgcataggacctacaagtgggctggggttggtggttcacgcctgtaagcccaacactttgggaggctgaggtgggaggatcctttgagcccaggagtttgagaccagcttgggcaacatagtgagaccctgtctctaccaaaaaaaaaaaaaaaaaaaaaaaagacagatggagaaggatgggggtgtacactgtaggaaggagagcgatatttaatcagtaaccacttcctagggtattttaacatgccatcactaaatccccatgcacctccttccccagctccacgaccacgctgcttacttagtagacaacctgtgggactgtgcagggactcagctgaaggactgggagggtctgacaagcctgctgctggagaaggaccagagcacgtgccacatggagccagggccagggaccttccacctcctagggtgaaaccaggagagattgcttgcttcacttgtacaagaatcggctcccagacacctgccactcgtgaatgcatctgataaactcactcacactgaggccttggggactgagagtgcgatgacatggatcctgcggacaaaccgccccagggcgtacctagcaccgaagcatcaggcgccactaggtctccagctccttctcggatgacgtccttcagcacgccccggtcccccgagatgtccagcatcctctgacttaaccgctcgtacagggactgatggagaatgaaagccaggcctcagagccgcagacccacccggccacccctcagcgtctacgcccccgaaacgtctgggccctcacctggccgggggcgtcgtccccttccaggactccctggtttaacgcgcttccccccatgtcctagctgccctccctgtggcgtgagccttcggcctggtgcgccccgctgcccttcctggctgtgactctggtggggttccgaaggcccctttatgcccggcagacccctaccgacggcggcattacattctggggccacgaggaggcactcatcgtttcgttccaaccgccgccaacggccctggccctcgcgagctctggaactacagaggtcgcacgcccgggcagtgagtgtggatggcttggcaggtgagcctgctggagctggaggaccggcttcagtgtcccatctgcctggaggtcttcaaggagtccctaatgctacagtgcggccactcctactgcaagggctgcctggtttccctgtcctaccacctggacaccaaggtgcgctgccccatgtgctggcaggtggtggacggcagcagctccttgcccaacgtctccctggcctgggtgatcgaagccctgaggctccctggggacccggagcccaaggtctgcgtgcaccaccggaacccgctcagccttttctgcgagaaggaccaggagctcatctgtggcctctgcggtctgctgggctcccaccaacaccacccggtcacgcccgtctccaccgtctgcagccgcatgaaggaggagctcgcagccctcttctctgagctgaagcaggagcagaagaaggtggatgagctcatcgccaaactggtgaaaaaccggacccgaatcgtcaatgagtcggatgtcttcagctgggtgatccgccgcgagttccaggagctgcgccacccggtggacgaggagaaggcccgctgcctggaggggatagggggtcacacccgtggcctggtggcctccctggacatgcagctggagcaggcccagggaacccgggagcggctggcccaagccgagtgtgtgctggaacagttcggcaatgaggaccaccatgagttcatctgggtgagtggacaggg

SEQ ID NO: 349973 - DNA, 2853 bp, Homo sapiens
ggttttttttccgaacgcccgcagcagggtcagaagggaggtggtcgccctccgtcgtggtctggcgtgtattccgagccttggtgtctggcggtttccgagcgttggtgtctggcggtttccgaccgttggtgtctggcggtttccgaccgttggtgtctggcacgcgccaccctctcttgctttggttgcgccatgccgatgtaccagacaagaagacaagaaaatgatttgaggacagcttcaatcgcggtgtgaagaagaaagcagcaaaacgaccactgaaaacaacgccggtggcaaaatatccaaagaaagggtcccaagcggtacatcgtcatagccggaaacagtcagagccaccagccaatgatcttttcaatgctgcgaaagctgccaaaagtgacatgcagggatgtccttcctgagatccgtgctatctgcattgaggaaattgggtgttggatgcaaagctacagcacgtctttcctcaccgacagctatttaaaatatattggttggactctgcatgataagcaccgagaagtccgcgtgaagtgcgtgaaggctctgaaagggctgtacggtaaccgggacctgaccgcacgcctggagctcttcactggccgcttcaaggactggatggtttccatgatcgtggacagagagtacagtgtggcagtggaggccgtcagattactgatacttatccttaagaacatggaaggggtgctgatggacgtggactgtgagagcgtctaccccattgtgtaggcctctaattgaggcctggcctctgctgtgggtgaatttctgtactggaagtgagtggggctccttttacgtttctttaacaccaccctctcggtttctctcccacatgtgctgctgccctacttaaggcctccccatctccgtggaagtctctctgctgtctcttttcctctctcagctccttggggctttccttagctctgcacctccttttcctttatcatctccttgggccatctcctccctctgtggtcatcattacacctccttgtttcctcctgtgctgagccctttccttgtgtccattccaccagacttttctaccctgagtgcgagataagaacgatgggtggaagagagcaacgccagagcccaggtgcccagaggactttcttccagcttctgctgtccttctttgtggagagcaaggtgacatacacagagataactctggctgttgtgcataggacctacaagtgggctggggttggtggttcacgcctgtaagcccaacactttgggaggctgaggtgggaggatcctttgagcccaggagtttgagaccagcttgggcaacatagtgagaccctgtctctaccaaaaaaaaaaaaaaaaaaaaaaaagacagatggagaaggatgggggtgtacactgtaggaaggagagcgatatttaatcagtaaccacttcctagggtattttaacatgccatcactaaatccccatgcacctccttccccagctccacgaccacgctgcttacttagtagacaacctgtgggactgtgcagggactcagctgaaggactgggagggtctgacaagcctgctgctggagaaggaccagagcacgtgccacatggagccagggccagggaccttccacctcctagggtgaaaccaggagagattgcttgcttcacttgtacaagaatcggctcccagacacctgccactcgtgaatgcatctgataaactcactcacactgaggccttggggactgagagtgcgatgacatggatcctgcggacaaaccgccccagggcgtacctagcaccgaagcatcaggcgccactaggtctccagctccttctcggatgacgtccttcagcacgccccggtcccccgagatgtccagcatcctctgacttaaccgctcgtacagggactgatggagaatgaaagccaggcctcagagccgcagacccacccggccacccctcagcgtctacgcccccgaaacgtctgggccctcacctggccgggggcgtcgtccccttccaggactccctggtttaacgcgcttccccccatgtcctagctgccctccctgtggcgtgagccttcggcctggtgcgccccgctgcccttcctggctgtgactctggtggggttccgaaggcccctttatgcccggcagacccctaccgacggcggcattacattctggggccacgaggaggcactcatcgtttcgttccaaccgccgccaacggccctggccctcgcgagctctggaactacagaggtcgcacgcccgggcagtgagtgtggatggcttggcaggtggtggacggcagcagctccttgcccaacgtctccctggcctgggtgatcgaagccctgaggctccctggggacccggagcccaaggtctgcgtgcaccaccggaacccgctcagccttttctgcgagaaggaccaggagctcatctgtggcctctgcggtctgctgggctcccaccaacaccacccggtcacgcccgtctccaccgtctgcagccgcatgaaggaggagctcgcagccctcttctctgagctgaagcaggagcagaagaaggtggatgagctcatcgccaaactggtgagcgagttccaggagctgcgccacccggtggacgaggagaaggcccgctgcctggaggggatagggggtcacacccgtggcctggtggcctccctggacatgcagctggagcaggcccagggaacccgggagcggctggcccaagccgagtgtgtgctggaacagttcggcaatgaggaccaccatgagttcatctgggtgagtggacaggg

SEQ ID NO: 349974 - DNA, 2033 bp, Homo sapiens
ggttttttttccgaacgcccgcagcagggtcagaagggaggtggtcgccctccgtcgtggtctggcgtgtattccgagccttggtgtctggcggtttccgagcgttggtgtctggcggtttccgaccgttggtgtctggcggtttccgaccgttggtgtctggcacgcgccaccctctcttgctttggttgcgccatgccgatgtaccagacaagaagacaagaaaatgatttgaggacagcttcaatcgcggtgtgaagaagaaagcagcaaaacgaccactgaaaacaacgccggtggcaaaatatccaaagaaagggtcccaagcggtacatcgtcatagccggaaacagtcagagccaccagccaatgatcttttcaatgctgcgaaagctgccaaaagtgacatgcagggatgtccttcctgagatccgtgctatctgcattgaggaaattgggtgttggatgcaaagctacagcacgtctttcctcaccgacagctatttaaaatatattggttggactctgcatgataagcaccgagaagtccgcgtgaagtgcgtgaaggctctgaaagggctgtacggtaaccgggacctgaccgcacgcctggagctcttcactggccgcttcaaggactggatggtttccatgatcgtggacagagagtacagtgtggcagtggaggccgtcagattactgatacttatccttaagaacatggaaggggtgctgatggacgtggactgtgagagcgtctaccccattgtgtaggcctctaattgaggcctggcctctgctgtgggtgaatttctgtactggaagtgagtggggctccttttacgtttctttaacaccaccctctcggtttctctcccacatgtgctgctgccctacttaaggcctccccatctccgtggaagtctctctgctgtctcttttcctctctcagctccttggggctttccttagctctgcacctccttttcctttatcatctccttgggccatctcctccctctgtggtcatcattacacctccttgtttcctcctgtgctgagccctttccttgtgtccattccaccagacttttctaccctgagtgcgagataagaacgatgggtggaagagagcaacgccagagcccaggtgcccagaggactttcttccagcttctgctgtccttctttgtggagagcaaggtgacatacacagagataactctggctgttgtgcataggacctacaagtgggctggggttggtggttcacgcctgtaagcccaacactttgggaggctgaggtgggaggatcctttgagcccaggagtttgagaccagcttgggcaacatagtgagaccctgtctctaccaaaaaaaaaaaaaaaaaaaaaaaagacagatggagaaggatgggggtgtacactgtaggaaggagagcgatatttaatcagtaaccacttcctagggtattttaacatgccatcactaaatccccatgcacctccttccccagctccacgaccacgctgcttacttagtagacaacctgtgggactgtgcagggactcagctgaaggactgggagggtctgacaagcctgctgctggagaaggaccagagcacgtgccacatggagccagggccagggaccttccacctcctagggtgaaaccaggagagattgcttgcttcacttgtacaaggcaggaacggtggcatggggtgggggaaacttggagttggaaggtggctaatctttgattctatgtttttgatcctcctggcactccagacctgggtgatgtgcaggagagcacactgatagaaatccttgtgtccagtgcccagcaactcctgcctcagctcccagctacttgagaggctgaggtgggaggattgtttgaacccaggaggttgaggctacagtgagctgtgattgtgccactgcactccaggttgggtaatgcagcgagactgcgtctcaaaaaataaataaaataaaaaataaataaaagctccacctgtcttcc

SEQ ID NO: 349975 - DNA, 1497 bp, Homo sapiens
ggttttttttccgaacgcccgcagcagggtcagaagggaggtggtcgccctccgtcgtggtctggcgtgtattccgagccttggtgtctggcggtttccgagcgttggtgtctggcggtttccgaccgttggtgtctggcggtttccgaccgttggtgtctggcacgcgccaccctctcttgctttggttgcgccatgccgatgtaccagacaagaagacaagaaaatgatttgaggacagcttcaatcgcggtgtgaagaagaaagcagcaaaacgaccactgaaaacaacgccggtggcaaaatatccaaagaaagggtcccaagcggtacatcgtcatagccggaaacagtcagagccaccagccaatgatcttttcaatgctgcgaaagctgccaaaagtgacatgcagggatgtccttcctgagatccgtgctatctgcattgaggaaattgggtgttggatgcaaagctacagcacgtctttcctcaccgacagctatttaaaatatattggttggactctgcatgataagcaccgagaagtccgcgtgaagtgcgtgaaggctctgaaagggctgtacggtaaccgggacctgaccgcacgcctggagctcttcactggccgcttcaaggactggatggtttccatgatcgtggacagagagtacagtgtggcagtggaggccgtcagattactgatacttatccttaagaacatggaaggggtgctgatggacgtggactgtgagagcgtctaccccattgtgtaggcctctaattgaggcctggcctctgctgtgggtgaatttctgtactggaagtgagtggggctccttttacgtttctttaacaccaccctctcggtttctctcccacatgtgctgctgccctacttaaggcctccccatctccgtggaagtctctctgctgtctcttttcctctctcagctccttggggctttccttagctctgcacctccttttcctttatcatctccttgggccatctcctccctctgtggtcatcattacacctccttgtttcctcctgtgctgagccctttccttgtgtccattccaccagacttttctaccctgagtgcgagataagaacgatgggtggaagagagcaacgccagagcccaggtgcccagaggactttcttccagcttctgctgtccttctttgtggagagcaagtctcattctgtcacccaggctggagtgcagtggcagaggttgcagtgagctgagattgcaccactgcaccccagcctgggcaataagagtgaaaactccatctcaaaacaaaaacaaaaccaaccaaacaaagaaaaagttttagggcagtaaggaaaggaggtaaagtacacttggaagagggtcaagcaggtgacttgagagagtcaagtgcactgtttgatcttggacttggggtttgataggttggcatccttccggggcttgcgttaactttcccctggttcttccctt

SEQ ID NO: 349976 - DNA, 1651 bp, Homo sapiens
ggttttttttccgaacgcccgcagcagggtcagaagggaggtggtcgccctccgtcgtggtctggcgtgtattccgagccttggtgtctggcggtttccgagcgttggtgtctggcggtttccgaccgttggtgtctggcggtttccgaccgttggtgtctggcacgcgccaccctctcttgctttggttgcgccatgccgatgtaccagacaagaagacaagaaaatgatttgaggacagcttcaatcgcggtgtgaagaagaaagcagcaaaacgaccactgaaaacaacgccggtggcaaaatatccaaagaaagggtcccaagcggtacatcgtcatagccggaaacagtcagagccaccagccaatgatcttttcaatgctgcgaaagctgccaaaagtgacatgcagggatgtccttcctgagatccgtgctatctgcattgaggaaattgggtgttggatgcaaagctacagcacgtctttcctcaccgacagctatttaaaatatattggttggactctgcatgataagcaccgagaagtccgcgtgaagtgcgtgaaggctctgaaagggctgtacggtaaccgggacctgaccgcacgcctggagctcttcactggccgcttcaaggactggatggtttccatgatcgtggacagagagtacagtgtggcagtggaggccgtcagattactgatacttatccttaaacttttctaccctgagtgcgagataagaacgatgggtggaagagagcaacgccagagcccaggtgcccagaggactttcttccagcttctgctgtccttctttgtggagagcaagctccacgaccacgctgcttacttagtagacaacctgtgggactgtgcagggactcagctgaaggactgggagggtctgacaagcctgctgctggagaaggaccagagcacgtgccacatggagccagggccagggaccttccacctcctagggtgaaaccaggagagattgcttgcttcacttgtacaaggcaggaacggtggcatggggtgggggaaacttggagttggaaggtggctaatctttgattctatgtttttgatcctcctggcactccagacctgggtgatgtgcaggagagcacactgatagaaatccttgtgtccagtgcccagcaactcctgcctcagcctcccgagcagctgggactacaggcgcccgccaccacgcctggctaacttttttgtatttttagtagagacgggttttcaccgtgttggccaggatggtcttgatctcttgaccttgtgatccacctgcctcagcctcccaaagtgctgggattacaggtgtgagccaccgtgcccggccttgactaccatattttaaatttactggaggacttttttgttctcttcttttttctttttttaatagcatcccgctcttatttcagaataaaaaaaattttaaggtatgttgagtaagaatctatagagcaatgaaaatgcaagagcaatagctatgggcacgaagatcactgcagtgagctgagatcatgccactgcacttcagcctgggcgtcagagtgagaccctgtttctaaaataataataattttaaaaaatgatatttatggttgcattgggacggaagatca

SEQ ID NO: 349977 - DNA, 1266 bp, Homo sapiens
caaagtactgggattacaggtataccattatgtccagctaaacctgttccttgaagaaagtgtgaacctcaaattcaaagcccctctctttctcttccctcatcagaatcggctcccagacacctgccactcgtgaatgcatctgataaactcactcacactgaggccttggggactgaggtgagcagggcccagcagtggggagatatatgggggaagtgttagtggtggtgaatccatatggattcactcagtccttgcctcctcagaagaaagaattccaccaaggggcatgaggcagagtgagggaccgaggcaagttttagagcaggagtgaaagtttattaaaatgttttggggcaggtgctgggcgcggtggctcacgcctgtaatcccagcactttgggaggccgaggtgggcggatcacctgatgtcgggagttcgagaccagcctggccaacatggagaaacctcgtctctactaaaaacacaaagaattagctgggcgtggtggcgcatgcctgtagtcccagctactcgggaggctgaggcaggagaatcgcttgaacctgggaggcagaggttgcagtgagctgagattgcaccactgcaccccagcctgggcaataagagtgaaactccatctcaaaaaaaaaaaaaaaaaaaggtgcatgaaacatatgaagcaaaaagtgaaagtccccattcttttcctttttccagaggtgatttttgtggccaatctggtttcattccctcccagacacttttctaggcatctatgcgcctctattcacatataaacaaaataggagttttcctgtgcttcccttaaatggcatatgtatctttcactcttttttttcacctagtggatctttaataccttaaaagctcaacctgggcttggtgcggtggctcatacgtgtaatcccaggcctttgggaggccaaggtgggaggatcacttgagctcaggagttccagaccattccaaagcaaaaacaaaaggattttgagatcagtgtgggcaacttagcaaaacaccatctcttaaaaaaaaaaaaaaattagccaagcttggtggtgtaagcctgtagtcccagctacttgagaggctgaggtgggaggattgtttgaacccaggaggttgaggctacagtgagctgtgattgtgccactgcactccaggttgggtaatgcagcgagactgcgtctcaaaaaataaataaaataaaaaataaataaaagctccacctgtcttcc

SEQ ID NO: 349978 - DNA, 906 bp, Homo sapiens
  misc_feature (846)..(846): n is a, c, g, or t
  misc_feature (848)..(848): n is a, c, g, or t
  misc_feature (856)..(856): n is a, c, g, or t
  misc_feature (858)..(858): n is a, c, g, or t
  misc_feature (906)..(906): n is a, c, g, or t
ggttttttttccgaacgcccgcagcagggtcagaagggaggtggtcgccctccgtcgtggtctggcgtgtattccgagccttggtgtctggcggtttccgagcgttggtgtctggcggtttccgagcgttggtgtctggcggtttccgaccgttggtgtctggcggtttccgaccgttggtgtctggcacgcgccaccctctcttgctttggttgcgccatgccgatgtaccagacaagaagacaagaaaatgatttgaggacagcttcaatcgcggtgtgaagaagaaagcagcaaaacgaccactgaaaacaacgccggtggcaaaatatccaaagaaagggtcccaagcggtacatcgtcatagccggaaacagtcagagccaccagccaatgatcttttcaatgctgcgaaagctgccaaaagtgacatgcagcaccgagaagtccgcgtgaagtgcgtgaaggctctgaaagggctgtacggtaaccgggacctgaccgcacgcctggagctcttcactggccgcttcaaggactggatggtttccatgatcgtggacagagagtacagtgtggcagtggaggccgtcagattactgatacttatccttaagaacatggaaggggtgctgatggacgtggactgtgagagcgtctaccccattgtgtaggcctctaattgaggcctggcctctgctgtgggtgaatttctgtactggaaacttttctaccctgagtgcgagataagaacgatgggtggaagagagcaacgccagagcccaggtgcccagaggactttcttccagcttctgctgtccttctttgtggagagcaagctccacnancacgctgntnacttagtagaaaaccctggggtaggaggtggggctgctctagagtcgn

SEQ ID NO: 349979 - DNA, 1711 bp, Homo sapiens
ggttttttttccgaacgcccgcagcagggtcagaagggaggtggtcgccctccgtcgtggtctggcgtgtattccgagccttggtgtctggcggtttccgagcgttggtgtctggcggtttccgagcgttggtgtctggcggtttccgaccgttggtgtctggcggtttccgaccgttggtgtctggcacgcgccaccctctcttgctttggttgcgccatgccgatgtaccaggtaaagccctatcaccgggtctgcgcccctctccgtgtggagcccacctgcatgtactggctccccaacatgcacggcaggagcggcggcccagcacttggcactggccacttgcagtagagacggggttttgccatgttgaccaggctggtcttgaactcctgacctcaggcgatccgcccgccttgaactcccaaagtgctggattacaggtgtgagccactgtgcccggcacctaaacaacatagttttgatatagacaagaagacaagaaaatgatttgaggacagcttcaatcgcggtgtgaagaagaaagcagcaaaacgaccactgaaaacaacgccggtggcaaaatatccaaagaaagggtcccaagcggtacatcgtcatagccggaaacagtcagagccaccagccaatgatcttttcaatgctgcgaaagctgccaaaagtgacatgcagcaccgagaagtccgcgtgaagtgcgtgaaggctctgaaagggctgtacggtaaccgggacctgaccgcacgcctggagctcttcactggccgcttcaaggactggatggtttccatgatcgtggacagagagtacagtgtggcagtggaggccgtcagattactgatacttatccttaaacttttctaccctgagtgcgagataagaacgatgggtggaagagagcaacgccagagcccaggtgcccagaggactttcttccagcttctgctgtccttctttgtggagagcaagtctcattctgtcacccaggctggagtgcagtggcagaggttgcagtgagctgagattgcaccactgcaccccagcctgggcaataagagtgaaactccatctcaaaaaaaaaaaaaaaaaaaggtgcatgaaacatatgaagcaaaaagtgaaagtccccattcttttcctttttccagaggtgatttttgtggccaatctggtttcattccctcccagacacttttctaggcatctatgcgcctctattcacatataaacaaaataggagttttcctgtgcttcccttaaatggcatatgtatctttcactcttttttttcacctagtggatctttaataccttaaaagctcaacctgggcttggtgcggtggctcatacgtgtaatcccaggcctttgggaggccaaggtgggaggatcacttgagctcaggagttccagaccattccaaagcaaaaacaaaaggattttgagatcagtgtgggcaacttagcaaaacaccatctcttaaaaaaaaaaaaaaattagccaagcttggtggtgtaagcctgtagtcccagctacttgagaggctgaggtgggaggattgtttgaacccaggaggttgaggctacagtgagctgtgattgtgccactgcactccaggttgggtaatgcagcgagactgcgtctcaaaaaataaataaaataaaaaataaataaaagctccacctgtcttcc

SEQ ID NO: 349980 - DNA, 1147 bp, Homo sapiens
  misc_feature (1087)..(1087): n is a, c, g, or t
  misc_feature (1089)..(1089): n is a, c, g, or t
  misc_feature (1097)..(1097): n is a, c, g, or t
  misc_feature (1099)..(1099): n is a, c, g, or t
  misc_feature (1147)..(1147): n is a, c, g, or t
ggttttttttccgaacgcccgcagcagggtcagaagggaggtggtcgccctccgtcgtggtctggcgtgtattccgagccttggtgtctggcggtttccgagcgttggtgtctggcggtttccgagcgttggtgtctggcggtttccgaccgttggtgtctggcggtttccgaccgttggtgtctggcacgcgccaccctctcttgctttggttgcgccatgccgatgtaccaggtaaagccctatcaccgggtctgcgcccctctccgtgtggagcccacctgcatgtactggctccccaacatgcacggcaggagcggcggcccagcacttggcactggccacttgcagacaagaagacaagaaaatgatttgaggacagcttcaatcgcggtgtgaagaagaaagcagcaaaacgaccactgaaaacaacgccggtggcaaaatatccaaagaaagggtcccaagcggtacatcgtcatagccggaaacagtcagagccaccagccaatgatcttttcaatgctgcgaaagctgccaaaagtgacatgcagggatgtccttcctgagatccgtgctatctgcattgaggaaattgggtgttggatgcaaagctacagcacgtctttcctcaccgacagctatttaaaatatattggttggactctgcatgataagcaccgagaagtccgcgtgaagtgcgtgaaggctctgaaagggctgtacggtaaccgggacctgaccgcacgcctggagctcttcactggccgcttcaaggactggatggtttccatgatcgtggacagagagtacagtgtggcagtggaggccgtcagattactgatacttatccttaagaacatggaaggggtgctgatggacgtggactgtgagagcgtctaccccattgtgtaggcctctaattgaggcctggcctctgctgtgggtgaatttctgtactggaaacttttctaccctgagtgcgagataagaacgatgggtggaagagagcaacgccagagcccaggtgcccagaggactttcttccagcttctgctgtccttctttgtggagagcaagctccacnancacgctgntnacttagtagaaaaccctggggtaggaggtggggctgctctagagtcgn

SEQ ID NO: 349981 - DNA, 924 bp, Homo sapiens
gactaggctgggcaacatagtgagacctcatctctaaaattaaaaaaataaaagccaccagaaaaaaacctaaaaacatgccaagtgacatcagtctttgatgaaaatggcagcagaagagtgatgccatgggtgggggtgggaaatgctatttcagcagagagggagctgtcatggaagacaccatgtgcctgggcacggtggctcacgcctgtaatcccagcactttgggaggccgaggcgggtggatcacctgaggttaggagttcgagaccagcctgggcaataagagtgaaactccatctcaaaaaaaaaaaaaaaaaaaggtgcatgaaacatatgaagcaaaaagtgaaagtccccattcttttcctttttccagaggtgatttttgtggccaatctggtttcattccctcccagacacttttctaggcatctatgcgcctctattcacatataaacaaaataggagttttcctgtgcttcccttaaatggcatatgtatctttcactcttttttttcacctagtggatctttaataccttaaaagctcaacctgggcttggtgcggtggctcatacgtgtaatcccaggcctttgggaggccaaggtgggaggatcacttgagctcaggagttccagaccattccaaagcaaaaacaaaaggattttgagatcagtgtgggcaacttagcaaaacaccatctcttaaaaaaaaaaaaaaattagccaagcttggtggtgtaagcctgtagtcccagctacttgagaggctgaggtgggaggattgtttgaacccaggaggttgaggctacagtgagctgtgattgtgccactgcactccaggttgggtaatgcagcgagactgcgtctcaaaaaataaataaaataaaaaataaataaaagctccacctgtcttcc

SEQ ID NO: 349982 - DNA, 775 bp, Homo sapiens
aaaaaaattctccgccccgccttggggggccaaccccaaaaaacccccccccttgggggccccgcccggggggaacaccctggggccccggggttaaaaacggccccgggcacaaaaaaaaggagacccctttctcccccccaaaaaactccatctcaaaaaaaaaaaaaaaaaaaggtgcatgaaacatatgaagcaaaaagtgaaagtccccattcttttcctttttccagaggtgatttttgtggccaatctggtttcattccctcccagacacttttctaggcatctatgcgcctctattcacatataaacaaaataggagttttcctgtgcttcccttaaatggcatatgtatctttcactcttttttttcacctagtggatctttaataccttaaaagctcaacctgggcttggtgcggtggctcatacgtgtaatcccaggcctttgggaggccaaggtgggaggatcacttgagctcaggagttccagaccattccaaagcaaaaacaaaaggattttgagatcagtgtgggcaacttagcaaaacaccatctcttaaaaaaaaaaaaaaattagccaagcttggtggtgtaagcctgtagtcccagctacttgagaggctgaggtgggaggattgtttgaacccaggaggttgaggctacagtgagctgtgattgtgccactgcactccaggttgggtaatgcagcgagactgcgtctcaaaaaataaataaaataaaaaataaataaaagctccacctgtcttcc

SEQ ID NO: 349983 - DNA, 921 bp, Homo sapiens
  misc_feature (921)..(921): n is a, c, g, or t
agatcactggcatcagacatgcttctgctgatacatgtacacttcttttatttgtcttttcacagagacagagtctcgctctgtcacccaggctggagtgcagtggcgcagtctcagctcactgcaacctctgcctcccgggttcaagcgattctcctgcctcggcctcccaagtagctgggattacaagcgcacaccaccatgcctgactaaatttttatatttttggtagagatggggtttcaccatgttggccaggtggtctcgaactcctgacctcgggtgatccacccacctcagcctcccaaagtgctgggattacaggtgtgagccaccgtgcccggccttgactaccatattttaaatttactggaggacttttttgttctcttcttttttctttttttaatagcatcccgctcttatttcagaataatagctatgggcaccaaatggtcaatcttcttatcataatgttgagtggaagaagccaggtccaccagacacatgctgctcatttatgcaaagtttggacacaggcaaaacaaaactagtttgatcgtgatgggaaacattagagaaatgcaaagacatgaccatcataattgtcaggagaaggcattggttaggattgggaagcggcaagcagaagcatttagggattggctggcaatgttttacttctcggctgagtgagggttgcatcggtgtttatttgataacacgttctaggggctgggcaagatggctcatgtttgtagtctcagtactttgggaggccaaagatgggaggattgcttgagcccgtgagtttgagaccagcgtgggtgacatagcgagaccctgtctctacaaaaaacaaccccccccagctgcgtgtggtgcaccagcttaagttctgggctttcaggcccttcttcn

SEQ ID NO: 349984 - DNA, 885 bp, Homo sapiens
tagctgggattacgggtgcacaccaccacacctggctgatttatgtatttttttcgtagagacggggttttgccatgttggccgggctggtctcgaactcctgacctcgggtgatccacccacctcagcctcccaaagtgctgggattacaggtgtgagccaccgtgcccggccttgactaccatattttaaatttactggaggacttttttgttctcttcttttttctttttttaatagcatcccgctcttatttcagaataaaaaaaattttaaggtatgttgagtaagaatctatagagcaatgaaaatgcaagagcaatagctatgggcaccaaatggtcaatcttcttatcataatgttgagtggaagaagccaggtccaccagacacatgctgctcatttatgcaaagtttggacacaggcaaaacaaaactagtttgatcgtgatgggaaacattagagaaatgcaaagacatgaccatcataattgtcaggagaaggcattggttaggattgggaagcggcaagcagaagcatttagggattggctggcaatgttttacttctcggctgagtgagggttgcatcggtgtttatttgataacacgttctaggggctgggcaagatggctcatgtttgtagtctcagtactttgggaggccaaagatgggaggattgcttgagcccgtgagtttgagaccagcgtgggtgacatagcgagaccctgtctctacaaaaaattaaaaaaaaaaaaaaaaacccagctgcgtgtggtggcacagcctcaaactcctgggctcaagcgatcctcccttggccttccagccactcaggaggctggggtgggaggatcgcttgaacccaggagtttgaggctgca

SEQ ID NO: 349985 - DNA, 831 bp, Homo sapiens
tagctgggattacgggtgcacaccaccacacctggctgatttatgtatttttttcgtagagacggggttttgccatgttggccgggctggtctcgaactcctgacctcgggtgatccacccacctcagcctcccaaagtgctgggattacaggtgtgagccaccgtgcccggccttgactaccatattttaaatttactggaggacttttttgttctcttcttttttctttttttaatagcatcccgctcttatttcagaataaaaaaaattttaaggtatgttgagtaagaatctatagagcaatgaaaatgcaagagcaatagctatgggcaccaaatggtcaatcttcttatcataatgttgagtggaagaagccaggtccaccagacacatgctgctcatttatgcaaagtttggacacaggcaaaaccataattgtcaggagaaggcattggttaggattgggaagcggcaagcagaagcatttagggattggctggcaatgttttacttctcggctgagtgagggttgcatcggtgtttatttgataacacgttctaggggctgggcaagatggctcatgtttgtagtctcagtactttgggaggccaaagatgggaggattgcttgagcccgtgagtttgagaccagcgtgggtgacatagcgagaccctgtctctacaaaaaattaaaaaaaaaaaaaaaaacccagctgcgtgtggtggcacagcctcaaactcctgggctcaagcgatcctcccttggccttccagccactcaggaggctggggtgggaggatcgcttgaacccaggagtttgaggctgca

SEQ ID NO: 349986 - DNA, 688 bp, Homo sapiens
gactaggctgggcaacatagtgagacctcatctctaaaattaaaaaaataaaagccaccagaaaaaaacctaaaaacatgccaagtgacatcagtctttgatgaaaatggcagcagaagagtgatgccatgggtgggggtgggaaatgctatttcagcagagagggagctgtcatggaagacaccatgtgcctgggcacggtggctcacgcctgtaatcccagcactttgggaggccgaggcgggtggatcacctgaggttaggagttcgagaccagcctgggcaataagagtgaaactccatctcaaaaaaaaaaaaaaaaaaaggtgcatgaaacatatgaagcaaaaagtgaaagtccccattcttttcctttttccagaggtgatttttgtggccaatctggtttcattccctcccagacacttttctaggcatctatgcgcctctattcacatataaacaaaataggagttttcctgtgcttcccttaaatggcatatgtatctttcactcttttttttcacctagtggatctttaataccttaaaagctcaacctgggcttggtgcggtggctcatacgtgtaatcccaggcctttgggaggccaaggtgggaggatcacttgacccaggagttcgagaccagcctgggcaatatggtgaaatcccatctctaccaaaaaaa

SEQ ID NO: 349987 - DNA, 442 bp, Homo sapiens
ggttttttttccgaacgcccgcagcagggtcagaagggaggtggtcgccctccgtcgtggtctggcgtgtattccgagccttggtgtctggcggtttccgagcgttggtgtctggcggtttccgagcgttggtgtctggcggtttccgaccgttggtgtctggcggtttccgaccgttggtgtctggcacgcgccaccctctcttgctttggttgcgccatgccgatgtaccagacttcgtctcaaaaaaaaaaaaaaaggttggagaccagcctgggtaacagaccaagaccccgactctggaattaaaacaaaaaacaggatgtggttggtgttttgtaaccaagacgtttagagtaggatggttttcaggctatcaaatttactactatattgctcacaccagaagtccaaatatacacacaaattagatatatttttt

SEQ ID NO: 349988 - DNA, 654 bp, Homo sapiens
ggttttttttccgaacgcccgcagcagggtcagaagggaggtggtcgccctccgtcgtggtctggcgtgtattccgagccttggtgtctggcggtttccgagcgttggtgtctggcggtttccgagcgttggtgtctggcggtttccgaccgttggtgtctggcggtttccgaccgttggtgtctggcacgcgccaccctctcttgctttggttgcgccatgccgatgtaccaggtaaagccctatcaccgggtctgcgcccctctccgtgtggagcccacctgcatgtactggctccccaacatgcacggcaggagcggcggcccagcacttggcactggccacttgcagtagagacggggttttgccatgttgaccaggctggtcttgaactcctgacctcaggcgatccgcccgccttgaactcccaaagtgctggattacaggtgtgagccactgtgcccggcacctaaacaacatagttttgatataggtaagcatacagcatatattttgatgtatttcaggtaatttagtctaagaacaggaaaggacagaaaatgaacacaatttgtagttctttgttcttaacaaactaagaatactttgcttaaataagtagcaatgagaatgtaactcagtaattcatacaaa

SEQ ID NO: 349989 - DNA, 220 bp, Homo sapiens
taatttttgtatttttagtagagacggggttttgccatgttgaccaggctggtcttgaactcctgacctcaggcgatccgcccgccttgaactcccaaagtgctggattacaggtgtgagccactgtgcccggcacctaaacaacatagttttgatataggtaagcatacagcatatattttgatgtatttcaggtaatttagtctaagaacaggaaagg

SEQ ID NO: 349990 - DNA, 407 bp, Homo sapiens
gcatggggtacatggcatttcaagaaaataaattcttccatgagagggagttaactggtaggatggaaagtgagtttggagagagggtggctctaagagtcaacttatctgtctgtgtctagggatgtccttcctgagatccgtgctatctgcattgaggaaattgggtgttggatgcaaagctacagcacgtctttcctcaccgacagctatttaaaatatattggttggactctgcatgataaggtgggattcgagtcagtttccctttccgtttccttcatctttttcctgtcctaggacacttcaccttttcctgggcctgccactgagatattttacctagtgaccaatgattaacccatcaaggcgctgaaccttgaaactccgctagcactggggagggt

SEQ ID NO: 349991 - DNA, 484 bp, Homo sapiens
gtcttgaactcctgacctcaggcgatccgcccgccttgaactcccaaagtgctggattacaggtgtgagccactgtgcccggcacctaaacaacatagttttgatataggtaagcatacagcatatattttgatgtatttcaggtaatttagtctaagaacaggaaaggacagaaaatgaacacaatttgtagttctttgttcttaacaaactaagaatactttgcttaaataagtagcaatgagaatgtaactcagtaattcatacaaatagacaagaagacaagaaaatgatttgaggacagcttcaatcgcggtgtgaagaagaaagcagcaaaacgaccactgaaaacaacgccggtgagtcagccagttttcttttgtttttgaatcttgtgggggaagcagcccagctattcgggaggctgaggcaggagaatggcacgaaccccgggggcagagctggcagtgagccgagatcacgc

SEQ ID NO: 349992 - DNA, 135 bp, Homo sapiens
cagggcccagcagtggggagatatatgggggaagtgttagtggtggtgaatccatatggattcacctcagtccttgcctcctcagaagaaagaattccaccaaggggcatgaggcagagtgagggaccgaggcaa

SEQ ID NO: 349993 - DNA, 1993 bp, Homo sapiens
  misc_feature (1563)..(1563): n is a, c, g, or t
  misc_feature (1751)..(1751): n is a, c, g, or t
  misc_feature (1864)..(1864): n is a, c, g, or t
  misc_feature (1869)..(1871): n is a, c, g, or t
ggttttttttccgaacgcccgcagcagggtcagaagggaggtggtcgccctccgtcgtggtctggcgtgtattccgagccttggtgtctggcggtttccgagcgttggtgtctggcggtttccgagcgttggtgtctggcggtttccgaccgttggtgtctggcggtttccgaccgttggtgtctggcacgcgccaccctctcttgctttggttgcgccatgccgatgtaccagacaagaagacaagaaaatgatttgaggacagcttcaatcgcggtgtgaagaagaaagcagcaaaacgaccactgaaaacaacgccggtggcaaaatatccaaagaaagggtcccaagcggtacatcgtcatagccggaaacagtcagagccaccagccaatgatcttttcaatgctgcgaaagctgccaaaagtgacatgcagcaccgagaagtccgcgtgaagtgcgtgaaggctctgaaagggctgtacggtaaccgggacctgaccgcacgcctggagctcttcactggccgcttcaaggactggatggtttccatgatcgtggacagagagtacagtgtggcagtggaggccgtcagattactgatacttatccttaagaacatggaaggggtgctgatggacgtggactgtgagagcgtctaccccattgtgtaggcctctaattgaggcctggcctctgctgtgggtgaatttctgtactggaaacttttctaccctgagtgcgagataagaacgatgggtggaagagagcaacgccagagcccaggtgcccagaggactttcttccagcttctgctgtccttctttgtggagagcaagctccacgaccacgctgcttacttagtagacaacctgtgggactgtgcagggactcagctgaaggactgggagggtctgacaagcctgctgctggagaaggaccagagcacgtgccacatggagccagggccagggaccttccacctcctagggtgaaaccaggagagattgcttgcttcacttgtacaaggcaggaacggtggcatggggtgggggaaacttggagttggaaggtggctaatctttgattctatgtttttgatcctcctggcactccagacctgggtgatgtgcaggagagcacactgatagaaatccttgtgtccagtgcccagcaactcctgcctcagcctcccgagcagctgggactacaggcgcccgccaccacgcctggctaacttttttgtatttttagtagagacgggttttcaccgtgttggccaggatggtcttgatctcttgaccttgtgatccacctgcctcatcatcccaaagtgctgggattacaggcgtgagccactgcgcccagcatgttagacaatttttaattcatcctctctgtgctgttgttttctcagctgtgaaaggaatattctggtggggacaaggttacagagttgctgagagggtctcatgacatgaaggtactggccttggcacagtgcctgggggggcggggactccgcacatgcctgtgatgtcacagttactgtcagttcacagngaaccttccctccttttcctgttgactttcccacactcctgtaaccctccctccctcccttcttcctctctctctctctcactcacgcacacgcacacacacacacacacacacaacacacacactccattcactgtctccatgactctggagtaaactaacgtctcgagttgccattggaagccccnttgtcctcatttagactttcatgggttataggcacttttgacttcctggggtccttcttcagttaaaaaaaaaaattagaaaattaggccgggcgtggtggcacatgcctgtnatccnnncaccttggcctcccaaagtgctgggattacaggagtgagccaccatgcccagcctccgttgtcctcatttagactttcatgggttataggcacttttgacttcctggggtccttcttcagtt

SEQ ID NO: 349994 - DNA, 4222 bp, Homo sapiens
  misc_feature (3052)..(3052): n is a, c, g, or t
  misc_feature (4026)..(4026): n is a, c, g, or t
ggttttttttccgaacgcccgcagcagggtcagaagggaggtggtcgccctccgtcgtggtctggcgtgtattccgagccttggtgtctggcggtttccgagcgttggtgtctggcggtttccgagcgttggtgtctggcggtttccgaccgttggtgtctggcggtttccgaccgttggtgtctggcacgcgccaccctctcttgctttggttgcgccatgccgatgtaccaggtaaagccctatcaccgggtctgcgcccctctccgtgtggagcccacctgcatgtactggctccccaacatgcacggcaggagcggcggcccagcacttggcactggccacttgcagacaagaagacaagaaaatgatttgaggacagcttcaatcgcggtgtgaagaagaaagcagcaaaacgaccactgaaaacaacgccggtggcaaaatatccaaagaaagggtcccaagcggtacatcgtcatagccggaaacagtcagagccaccagccaatgatcttttcaatgctgcgaaagctgccaaaagtgacatgcagggatgtccttcctgagatccgtgctatctgcattgaggaaattgggtgttggatgcaaagctacagcacgtctttcctcaccgacagctatttaaaatatattggttggactctgcatgataagcaccgagaagtccgcgtgaagtgcgtgaaggctctgaaagggctgtacggtaaccgggacctgaccgcacgcctggagctcttcactggccgcttcaaggactggatggtttccatgatcgtggacagagagtacagtgtggcagtggaggccgtcagattactgatacttatccttaagaacatggaaggggtgctgatggacgtggactgtgagagcgtctaccccattgtgtaggcctctaattgaggcctggcctctgctgtgggtgaatttctgtactggaaacttttctaccctgagtgcgagataagaacgatgggtggaagagagcaacgccagagcccaggtgcccagaggactttcttccagcttctgctgtccttctttgtggagagcaagctccacgaccacgctgcttacttagtagacaacctgtgggactgtgcagggactcagctgaaggactgggagggtctgacaagcctgctgctggagaaggaccagagcacgtgccacatggagccagggccagggaccttccacctcctagggtgaaaccaggagagattgcttgcttcacttgtacaagaatcggctcccagacacctgccactcgtgaatgcatctgataaactcactcacactgaggccttggggactgaggccctggcggatcacgggtgcccaggggctcggaggccgcctcctctgggaagcctgcccaggttccgatggactcccacaggcaatacccctgggccttcctcgcggcccctgttggccccaattcccccaccccctgcaaggtctgtgcctctcctgcagccccgccaccaactagggcgagaggagctcgcccccacccaaacgtattggttcgatgaaggaagggcccatggttctgccactggccctggacacccagtgctggtttcccgtggaagtccccctggactgagtggcggctgggtgctctagtgatttgcgacctggggcctctgactcccatcatgttgggaaagtcgttgaacctcaccggtgaaacgggcacagtgaagtcatttccccgaagtctcaggactctgtgtaaggctggggacaggggcttgttggggcctaagggcaccttgggaactgcaggagcccgttctgcctccataagacactcactcctggcagggtcccctctccgggcacagcccagatccacccccatcatccctctccatctgtggctccctgcccctcacagaggattcatcactctgttcagaatccccaggactccctagggaaggaggtcccagcctggcctcccaagaccgtgcttgcccaattccaggacttcctcacatggctcctacctccagcacagaagcggcactaaaccaggtggtcaatcagggagcaccaccgaggttctgaatggtccagggatgagcagtgatgcctcaagctaagccaatcaaagccttccctgggattgtctcaaggagtccgcagtgagattctgggtctcagtactgggaaagggtgaggctgaggctgcctgctgtcctgggggcctcaccctgccaccaacaggaagccacacagagggaagcagaaatgagacgcagccagtgagggcagggtacaaaggtgagatcccggagagacagatgctgggacatcatccttgggtactggttccaacagtgcctgcagatggagccaccctcggagagtccacaacagcagccaatccattctatgcgtgtctgagctactttaagtcgggtttttgactgtttgaatgagagtctcatcttggctaggcaccatggcgcaacaactggggaggtggaggtaggaagattgcttgaggccaagagtcccagagcagcctgggcaacctatcaagacgctgtctttacgaaaagaaaagaaactagctaggtgtggtggtgcgtgcctgtggtcccagctactggggaggctgaggtgggaggattgcttgagcccaggaagtggaggctgcagtgacctatgatggcaccactgtactccagcctgggtgacagagcaagacttcgtctcaaaaaaaaaaaaaaaggttggagaccagcctgggtaacagaccaagaccccgactctggaattaaaacaaaaaacaggatgtggttggtgttttgtaaccaagacgtttagagtaggatggttttcaggctatcaaatttactactatattgctcacaccagaagtccaaatatacacacaaattagatatatttttttgagatggagtcttgctttgtcacccaggatggagtgcagtggcacaatcatagctcactgcctcctccaatttctgggctcaagggatcctcntgcctcagctcacgcacacgcacacacacacacacacacacacacacactccattctctgtctccatgactctggagtaaactaacgtctcgagttgccattggaagccccattgtcctcattttgtttgtttgtttgtttattgagacggagttttgttcttgttgcccaggctggagtgcagtggcacgatctcggctcaccgcaacctctgcctcccaggttcaagcaattctcctgtctcagcctcccaagtagctgggattacaggtgtgcgccaccacgcctggctaattttgttatttttagtagagacggggtttcgccatgttggccgggctggtctcgaactcctgacctcgggtgatccacccacctcagcctcccaaagtgctgggattacaggtgtgagccaccgtgcccggccttgactaccatattttaaatttactggaggacttttttgttctcttcttttttctttttttaatagcatcccgctcttatttcagaataaaaaaaattttaaggtatgttgagtaagaatctatagagcaatgaaaatgcaagagcaatagctatgggcaccaaatggtcaatcttcttatcataatgttgagtggaagaagccaggtccaccagacacatgctgctcatttatgcaaagtttggacacaggcaaaacaaaactagtttgatcgtgatgggaaacattagagaaatgcaaagacatgaccatcataattgtcaggagaaggcattggttaggattgggaagcggcaagcagaagcatttagggattggctggcaatgttttacttctcggctgagtgagggttgcatcggtgtttatttgataacacgttctaggggctgggcaagatggctcatgtttgtagtctcagtactttgggaggccaaagatgggaggattgcttgagcccgtgagtttgagaccagcgtgggtgacatngcgagaccctgtctctacaaaaaaaaaaacgcgcacagtgaaacacaaaacctctgtttggagcgcctttggccccttagaaaggtttctgagacacatgctgttggcacgcggggcacacatgtgtacgcacccgtgggaaagggtggtccaaggagaaactcgggcagacaagtcggtggtcttccccataaag

SEQ ID NO: 349995 - DNA, 4105 bp, Homo sapiens
  misc_feature (2935)..(2935): n is a, c, g, or t
  misc_feature (3909)..(3909): n is a, c, g, or t
ggttttttttccgaacgcccgcagcagggtcagaagggaggtggtcgccctccgtcgtggtctggcgtgtattccgagccttggtgtctggcggtttccgagcgttggtgtctggcggtttccgagcgttggtgtctggcggtttccgaccgttggtgtctggcggtttccgaccgttggtgtctggcacgcgccaccctctcttgctttggttgcgccatgccgatgtaccagacaagaagacaagaaaatgatttgaggacagcttcaatcgcggtgtgaagaagaaagcagcaaaacgaccactgaaaacaacgccggtggcaaaatatccaaagaaagggtcccaagcggtacatcgtcatagccggaaacagtcagagccaccagccaatgatcttttcaatgctgcgaaagctgccaaaagtgacatgcagggatgtccttcctgagatccgtgctatctgcattgaggaaattgggtgttggatgcaaagctacagcacgtctttcctcaccgacagctatttaaaatatattggttggactctgcatgataagcaccgagaagtccgcgtgaagtgcgtgaaggctctgaaagggctgtacggtaaccgggacctgaccgcacgcctggagctcttcactggccgcttcaaggactggatggtttccatgatcgtggacagagagtacagtgtggcagtggaggccgtcagattactgatacttatccttaagaacatggaaggggtgctgatggacgtggactgtgagagcgtctaccccattgtgtaggcctctaattgaggcctggcctctgctgtgggtgaatttctgtactggaaacttttctaccctgagtgcgagataagaacgatgggtggaagagagcaacgccagagcccaggtgcccagaggactttcttccagcttctgctgtccttctttgtggagagcaagctccacgaccacgctgcttacttagtagacaacctgtgggactgtgcagggactcagctgaaggactgggagggtctgacaagcctgctgctggagaaggaccagagcacgtgccacatggagccagggccagggaccttccacctcctagggtgaaaccaggagagattgcttgcttcacttgtacaagaatcggctcccagacacctgccactcgtgaatgcatctgataaactcactcacactgaggccttggggactgaggccctggcggatcacgggtgcccaggggctcggaggccgcctcctctgggaagcctgcccaggttccgatggactcccacaggcaatacccctgggccttcctcgcggcccctgttggccccaattcccccaccccctgcaaggtctgtgcctctcctgcagccccgccaccaactagggcgagaggagctcgcccccacccaaacgtattggttcgatgaaggaagggcccatggttctgccactggccctggacacccagtgctggtttcccgtggaagtccccctggactgagtggcggctgggtgctctagtgatttgcgacctggggcctctgactcccatcatgttgggaaagtcgttgaacctcaccggtgaaacgggcacagtgaagtcatttccccgaagtctcaggactctgtgtaaggctggggacaggggcttgttggggcctaagggcaccttgggaactgcaggagcccgttctgcctccataagacactcactcctggcagggtcccctctccgggcacagcccagatccacccccatcatccctctccatctgtggctccctgcccctcacagaggattcatcactctgttcagaatccccaggactccctagggaaggaggtcccagcctggcctcccaagaccgtgcttgcccaattccaggacttcctcacatggctcctacctccagcacagaagcggcactaaaccaggtggtcaatcagggagcaccaccgaggttctgaatggtccagggatgagcagtgatgcctcaagctaagccaatcaaagccttccctgggattgtctcaaggagtccgcagtgagattctgggtctcagtactgggaaagggtgaggctgaggctgcctgctgtcctgggggcctcaccctgccaccaacaggaagccacacagagggaagcagaaatgagacgcagccagtgagggcagggtacaaaggtgagatcccggagagacagatgctgggacatcatccttgggtactggttccaacagtgcctgcagatggagccaccctcggagagtccacaacagcagccaatccattctatgcgtgtctgagctactttaagtcgggtttttgactgtttgaatgagagtctcatcttggctaggcaccatggcgcaacaactggggaggtggaggtaggaagattgcttgaggccaagagtcccagagcagcctgggcaacctatcaagacgctgtctttacgaaaagaaaagaaactagctaggtgtggtggtgcgtgcctgtggtcccagctactggggaggctgaggtgggaggattgcttgagcccaggaagtggaggctgcagtgacctatgatggcaccactgtactccagcctgggtgacagagcaagacttcgtctcaaaaaaaaaaaaaaaggttggagaccagcctgggtaacagaccaagaccccgactctggaattaaaacaaaaaacaggatgtggttggtgttttgtaaccaagacgtttagagtaggatggttttcaggctatcaaatttactactatattgctcacaccagaagtccaaatatacacacaaattagatatatttttttgagatggagtcttgctttgtcacccaggatggagtgcagtggcacaatcatagctcactgcctcctccaatttctgggctcaagggatcctcntgcctcagctcacgcacacgcacacacacacacacacacacacacacactccattctctgtctccatgactctggagtaaactaacgtctcgagttgccattggaagccccattgtcctcattttgtttgtttgtttgtttattgagacggagttttgttcttgttgcccaggctggagtgcagtggcacgatctcggctcaccgcaacctctgcctcccaggttcaagcaattctcctgtctcagcctcccaagtagctgggattacaggtgtgcgccaccacgcctggctaattttgttatttttagtagagacggggtttcgccatgttggccgggctggtctcgaactcctgacctcgggtgatccacccacctcagcctcccaaagtgctgggattacaggtgtgagccaccgtgcccggccttgactaccatattttaaatttactggaggacttttttgttctcttcttttttctttttttaatagcatcccgctcttatttcagaataaaaaaaattttaaggtatgttgagtaagaatctatagagcaatgaaaatgcaagagcaatagctatgggcaccaaatggtcaatcttcttatcataatgttgagtggaagaagccaggtccaccagacacatgctgctcatttatgcaaagtttggacacaggcaaaacaaaactagtttgatcgtgatgggaaacattagagaaatgcaaagacatgaccatcataattgtcaggagaaggcattggttaggattgggaagcggcaagcagaagcatttagggattggctggcaatgttttacttctcggctgagtgagggttgcatcggtgtttatttgataacacgttctaggggctgggcaagatggctcatgtttgtagtctcagtactttgggaggccaaagatgggaggattgcttgagcccgtgagtttgagaccagcgtgggtgacatngcgagaccctgtctctacaaaaaaaaaaacgcgcacagtgaaacacaaaacctctgtttggagcgcctttggccccttagaaaggtttctgagacacatgctgttggcacgcggggcacacatgtgtacgcacccgtgggaaagggtggtccaaggagaaactcgggcagacaagtcggtggtcttccccataaag

SEQ ID NO: 349996 - DNA, 5107 bp, Homo sapiens
  misc_feature (3937)..(3937): n is a, c, g, or t
  misc_feature (4911)..(4911): n is a, c, g, or t
ggttttttttccgaacgcccgcagcagggtcagaagggaggtggtcgccctccgtcgtggtctggcgtgtattccgagccttggtgtctggcggtttccgagcgttggtgtctggcggtttccgagcgttggtgtctggcggtttccgaccgttggtgtctggcggtttccgaccgttggtgtctggcacgcgccaccctctcttgctttggttgcgccatgccgatgtaccaggtaaagccctatcaccgggtctgcgcccctctccgtgtggagcccacctgcatgtactggctccccaacatgcacggcaggagcggcggcccagcacttggcactggccacttgcagacaagaagacaagaaaatgatttgaggacagcttcaatcgcggtgtgaagaagaaagcagcaaaacgaccactgaaaacaacgccggtggcaaaatatccaaagaaagggtcccaagcggtacatcgtcatagccggaaacagtcagagccaccagccaatgatcttttcaatgctgcgaaagctgccaaaagtgacatgcagggatgtccttcctgagatccgtgctatctgcattgaggaaattgggtgttggatgcaaagctacagcacgtctttcctcaccgacagctatttaaaatatattggttggactctgcatgataagcaccgagaagtccgcgtgaagtgcgtgaaggctctgaaagggctgtacggtaaccgggacctgaccgcacgcctggagctcttcactggccgcttcaaggactggatggtttccatgatcgtggacagagagtacagtgtggcagtggaggccgtcagattactgatacttatccttaagtgagtcctgggaagaggggaggccagtgtctcagacctttgcccttccagggtcatctccctccacctgtcacagctgactcttccatctgtgcaggttgactgaggtcattcctgagttgcagtatgttgagagggtaatatttctgtcttctctaactccccatactcccttgtcttccactctccatttaggagttttttgtgagttatgtccttgttgcttttgcctctttttctttctagccttgattgtgccagaagacaatgtccctattcacacactctttctgcttttctgtgggcaggaacatggaaggggtgctgatggacgtggactgtgagagcgtctaccccattgtgtaggcctctaattgaggcctggcctctgctgtgggtgaatttctgtactggaagtgagtggggctccttttacgtttctttaacaccaccctctcggtttctctcccacatgtgctgctgccctacttaaggcctccccatctccgtggaagtctctctgctgtctcttttcctctctcagctccttggggctttccttagctctgcacctccttttcctttatcatctccttgggccatctcctccctctgtggtcatcattacacctccttgtttcctcctgtgctgagccctttccttgtgtccattccaccagacttttctaccctgagtgcgagataagaacgatgggtggaagagagcaacgccagagcccaggtgcccagaggactttcttccagcttctgctgtccttctttgtggagagcaaggtgacatacacagagataactctggctgttgtgcataggacctacaagtgggctggggttggtggttcacgcctgtaagcccaacactttgggaggctgaggtgggaggatcctttgagcccaggagtttgagaccagcttgggcaacatagtgagaccctgtctctaccaaaaaaaaaaaaaaaaaaaaaaaagacagatggagaaggatgggggtgtacactgtaggaaggagagcgatatttaatcagtaaccacttcctagggtattttaacatgccatcactaaatccccatgcacctccttccccagctccacgaccacgctgcttacttagtagacaacctgtgggactgtgcagggactcagctgaaggactgggagggtctgacaagcctgctgctggagaaggaccagagcacgtgccacatggagccagggccagggaccttccacctcctagggtgaaaccaggagagattgcttgcttcacttgtacaagaatcggctcccagacacctgccactcgtgaatgcatctgataaactcactcacactgaggccttggggactgaggccctggcggatcacgggtgcccaggggctcggaggccgcctcctctgggaagcctgcccaggttccgatggactcccacaggcaatacccctgggccttcctcgcggcccctgttggccccaattcccccaccccctgcaaggtctgtgcctctcctgcagccccgccaccaactagggcgagaggagctcgcccccacccaaacgtattggttcgatgaaggaagggcccatggttctgccactggccctggacacccagtgctggtttcccgtggaagtccccctggactgagtggcggctgggtgctctagtgatttgcgacctggggcctctgactcccatcatgttgggaaagtcgttgaacctcaccggtgaaacgggcacagtgaagtcatttccccgaagtctcaggactctgtgtaaggctggggacaggggcttgttggggcctaagggcaccttgggaactgcaggagcccgttctgcctccataagacactcactcctggcagggtcccctctccgggcacagcccagatccacccccatcatccctctccatctgtggctccctgcccctcacagaggattcatcactctgttcagaatccccaggactccctagggaaggaggtcccagcctggcctcccaagaccgtgcttgcccaattccaggacttcctcacatggctcctacctccagcacagaagcggcactaaaccaggtggtcaatcagggagcaccaccgaggttctgaatggtccagggatgagcagtgatgcctcaagctaagccaatcaaagccttccctgggattgtctcaaggagtccgcagtgagattctgggtctcagtactgggaaagggtgaggctgaggctgcctgctgtcctgggggcctcaccctgccaccaacaggaagccacacagagggaagcagaaatgagacgcagccagtgagggcagggtacaaaggtgagatcccggagagacagatgctgggacatcatccttgggtactggttccaacagtgcctgcagatggagccaccctcggagagtccacaacagcagccaatccattctatgcgtgtctgagctactttaagtcgggtttttgactgtttgaatgagagtctcatcttggctaggcaccatggcgcaacaactggggaggtggaggtaggaagattgcttgaggccaagagtcccagagcagcctgggcaacctatcaagacgctgtctttacgaaaagaaaagaaactagctaggtgtggtggtgcgtgcctgtggtcccagctactggggaggctgaggtgggaggattgcttgagcccaggaagtggaggctgcagtgacctatgatggcaccactgtactccagcctgggtgacagagcaagacttcgtctcaaaaaaaaaaaaaaaggttggagaccagcctgggtaacagaccaagaccccgactctggaattaaaacaaaaaacaggatgtggttggtgttttgtaaccaagacgtttagagtaggatggttttcaggctatcaaatttactactatattgctcacaccagaagtccaaatatacacacaaattagatatatttttttgagatggagtcttgctttgtcacccaggatggagtgcagtggcacaatcatagctcactgcctcctccaatttctgggctcaagggatcctcntgcctcagctcacgcacacgcacacacacacacacacacacacacacactccattctctgtctccatgactctggagtaaactaacgtctcgagttgccattggaagccccattgtcctcattttgtttgtttgtttgtttattgagacggagttttgttcttgttgcccaggctggagtgcagtggcacgatctcggctcaccgcaacctctgcctcccaggttcaagcaattctcctgtctcagcctcccaagtagctgggattacaggtgtgcgccaccacgcctggctaattttgttatttttagtagagacggggtttcgccatgttggccgggctggtctcgaactcctgacctcgggtgatccacccacctcagcctcccaaagtgctgggattacaggtgtgagccaccgtgcccggccttgactaccatattttaaatttactggaggacttttttgttctcttcttttttctttttttaatagcatcccgctcttatttcagaataaaaaaaattttaaggtatgttgagtaagaatctatagagcaatgaaaatgcaagagcaatagctatgggcaccaaatggtcaatcttcttatcataatgttgagtggaagaagccaggtccaccagacacatgctgctcatttatgcaaagtttggacacaggcaaaacaaaactagtttgatcgtgatgggaaacattagagaaatgcaaagacatgaccatcataattgtcaggagaaggcattggttaggattgggaagcggcaagcagaagcatttagggattggctggcaatgttttacttctcggctgagtgagggttgcatcggtgtttatttgataacacgttctaggggctgggcaagatggctcatgtttgtagtctcagtactttgggaggccaaagatgggaggattgcttgagcccgtgagtttgagaccagcgtgggtgacatngcgagaccctgtctctacaaaaaaaaaaacgcgcacagtgaaacacaaaacctctgtttggagcgcctttggccccttagaaaggtttctgagacacatgctgttggcacgcggggcacacatgtgtacgcacccgtgggaaagggtggtccaaggagaaactcgggcagacaagtcggtggtcttccccataaag

SEQ ID NO: 349997 - DNA, 4294 bp, Homo sapiens
  misc_feature (3124)..(3124): n is a, c, g, or t
  misc_feature (4098)..(4098): n is a, c, g, or t
ggttttttttccgaacgcccgcagcagggtcagaagggaggtggtcgccctccgtcgtggtctggcgtgtattccgagccttggtgtctggcggtttccgagcgttggtgtctggcggtttccgagcgttggtgtctggcggtttccgaccgttggtgtctggcggtttccgaccgttggtgtctggcacgcgccaccctctcttgctttggttgcgccatgccgatgtaccagacaagaagacaagaaaatgatttgaggacagcttcaatcgcggtgtgaagaagaaagcagcaaaacgaccactgaaaacaacgccggtggcaaaatatccaaagaaagggtcccaagcggtacatcgtcatagccggaaacagtcagagccaccagccaatgatcttttcaatgctgcgaaagctgccaaaagtgacatgcagcaccgagaagtccgcgtgaagtgcgtgaaggctctgaaagggctgtacggtaaccgggacctgaccgcacgcctggagctcttcactggccgcttcaaggactggatggtttccatgatcgtggacagagagtacagtgtggcagtggaggccgtcagattactgatacttatccttaagaacatggaaggggtgctgatggacgtggactgtgagagcgtctaccccattgtgtaggcctctaattgaggcctggcctctgctgtgggtgaatttctgtactggaaacttttctaccctgagtgcgagataagaacgatgggtggaagagagcaacgccagagcccaggtgcccagaggactttcttccagcttctgctgtccttctttgtggagagcaaggtgacatacacagagataactctggctgttgtgcataggacctacaagtgggctggggttggtggttcacgcctgtaagcccaacactttgggaggctgaggtgggaggatcctttgagcccaggagtttgagaccagcttgggcaacatagtgagaccctgtctctaccaaaaaaaaaaaaaaaaaaaaaaaagacagatggagaaggatgggggtgtacactgtaggaaggagagcgatatttaatcagtaaccacttcctagggtattttaacatgccatcactaaatccccatgcacctccttccccagctccacgaccacgctgcttacttagtagacaacctgtgggactgtgcagggactcagctgaaggactgggagggtctgacaagcctgctgctggagaaggaccagagcacgtgccacatggagccagggccagggaccttccacctcctagggtgaaaccaggagagattgcttgcttcacttgtacaagaatcggctcccagacacctgccactcgtgaatgcatctgataaactcactcacactgaggccttggggactgaggccctggcggatcacgggtgcccaggggctcggaggccgcctcctctgggaagcctgcccaggttccgatggactcccacaggcaatacccctgggccttcctcgcggcccctgttggccccaattcccccaccccctgcaaggtctgtgcctctcctgcagccccgccaccaactagggcgagaggagctcgcccccacccaaacgtattggttcgatgaaggaagggcccatggttctgccactggccctggacacccagtgctggtttcccgtggaagtccccctggactgagtggcggctgggtgctctagtgatttgcgacctggggcctctgactcccatcatgttgggaaagtcgttgaacctcaccggtgaaacgggcacagtgaagtcatttccccgaagtctcaggactctgtgtaaggctggggacaggggcttgttggggcctaagggcaccttgggaactgcaggagcccgttctgcctccataagacactcactcctggcagggtcccctctccgggcacagcccagatccacccccatcatccctctccatctgtggctccctgcccctcacagaggattcatcactctgttcagaatccccaggactccctagggaaggaggtcccagcctggcctcccaagaccgtgcttgcccaattccaggacttcctcacatggctcctacctccagcacagaagcggcactaaaccaggtggtcaatcagggagcaccaccgaggttctgaatggtccagggatgagcagtgatgcctcaagctaagccaatcaaagccttccctgggattgtctcaaggagtccgcagtgagattctgggtctcagtactgggaaagggtgaggctgaggctgcctgctgtcctgggggcctcaccctgccaccaacaggaagccacacagagggaagcagaaatgagacgcagccagtgagggcagggtacaaaggtgagatcccggagagacagatgctgggacatcatccttgggtactggttccaacagtgcctgcagatggagccaccctcggagagtccacaacagcagccaatccattctatgcgtgtctgagctactttaagtcgggtttttgactgtttgaatgagagtctcatcttggctaggcaccatggcgcaacaactggggaggtggaggtaggaagattgcttgaggccaagagtcccagagcagcctgggcaacctatcaagacgctgtctttacgaaaagaaaagaaactagctaggtgtggtggtgcgtgcctgtggtcccagctactggggaggctgaggtgggaggattgcttgagcccaggaagtggaggctgcagtgacctatgatggcaccactgtactccagcctgggtgacagagcaagacttcgtctcaaaaaaaaaaaaaaaggttggagaccagcctgggtaacagaccaagaccccgactctggaattaaaacaaaaaacaggatgtggttggtgttttgtaaccaagacgtttagagtaggatggttttcaggctatcaaatttactactatattgctcacaccagaagtccaaatatacacacaaattagatatatttttttgagatggagtcttgctttgtcacccaggatggagtgcagtggcacaatcatagctcactgcctcctccaatttctgggctcaagggatcctcntgcctcagctcacgcacacgcacacacacacacacacacacacacacactccattctctgtctccatgactctggagtaaactaacgtctcgagttgccattggaagccccattgtcctcattttgtttgtttgtttgtttattgagacggagttttgttcttgttgcccaggctggagtgcagtggcacgatctcggctcaccgcaacctctgcctcccaggttcaagcaattctcctgtctcagcctcccaagtagctgggattacaggtgtgcgccaccacgcctggctaattttgttatttttagtagagacggggtttcgccatgttggccgggctggtctcgaactcctgacctcgggtgatccacccacctcagcctcccaaagtgctgggattacaggtgtgagccaccgtgcccggccttgactaccatattttaaatttactggaggacttttttgttctcttcttttttctttttttaatagcatcccgctcttatttcagaataaaaaaaattttaaggtatgttgagtaagaatctatagagcaatgaaaatgcaagagcaatagctatgggcaccaaatggtcaatcttcttatcataatgttgagtggaagaagccaggtccaccagacacatgctgctcatttatgcaaagtttggacacaggcaaaacaaaactagtttgatcgtgatgggaaacattagagaaatgcaaagacatgaccatcataattgtcaggagaaggcattggttaggattgggaagcggcaagcagaagcatttagggattggctggcaatgttttacttctcggctgagtgagggttgcatcggtgtttatttgataacacgttctaggggctgggcaagatggctcatgtttgtagtctcagtactttgggaggccaaagatgggaggattgcttgagcccgtgagtttgagaccagcgtgggtgacatngcgagaccctgtctctacaaaaaaaaaaacgcgcacagtgaaacacaaaacctctgtttggagcgcctttggccccttagaaaggtttctgagacacatgctgttggcacgcggggcacacatgtgtacgcacccgtgggaaagggtggtccaaggagaaactcgggcagacaagtcggtggtcttccccataaag

SEQ ID NO: 349998 - DNA, 4394 bp, Homo sapiens
  misc_feature (3224)..(3224): n is a, c, g, or t
  misc_feature (4198)..(4198): n is a, c, g, or t
ggttttttttccgaacgcccgcagcagggtcagaagggaggtggtcgccctccgtcgtggtctggcgtgtattccgagccttggtgtctggcggtttccgagcgttggtgtctggcggtttccgaccgttggtgtctggcggtttccgaccgttggtgtctggcacgcgccaccctctcttgctttggttgcgccatgccgatgtaccagacaagaagacaagaaaatgatttgaggacagcttcaatcgcggtgtgaagaagaaagcagcaaaacgaccactgaaaacaacgccggtggcaaaatatccaaagaaagggtcccaagcggtacatcgtcatagccggaaacagtcagagccaccagccaatgatcttttcaatgctgcgaaagctgccaaaagtgacatgcagggatgtccttcctgagatccgtgctatctgcattgaggaaattgggtgttggatgcaaagctacagcacgtctttcctcaccgacagctatttaaaatatattggttggactctgcatgataagcaccgagaagtccgcgtgaagtgcgtgaaggctctgaaagggctgtacggtaaccgggacctgaccgcacgcctggagctcttcactggccgcttcaaggactggatggtttccatgatcgtggacagagagtacagtgtggcagtggaggccgtcagattactgatacttatccttaagaacatggaaggggtgctgatggacgtggactgtgagagcgtctaccccattgtgtaggcctctaattgaggcctggcctctgctgtgggtgaatttctgtactggaaacttttctaccctgagtgcgagataagaacgatgggtggaagagagcaacgccagagcccaggtgcccagaggactttcttccagcttctgctgtccttctttgtggagagcaaggtgacatacacagagataactctggctgttgtgcataggacctacaagtgggctggggttggtggttcacgcctgtaagcccaacactttgggaggctgaggtgggaggatcctttgagcccaggagtttgagaccagcttgggcaacatagtgagaccctgtctctaccaaaaaaaaaaaaaaaaaaaaaaaagacagatggagaaggatgggggtgtacactgtaggaaggagagcgatatttaatcagtaaccacttcctagggtattttaacatgccatcactaaatccccatgcacctccttccccagctccacgaccacgctgcttacttagtagacaacctgtgggactgtgcagggactcagctgaaggactgggagggtctgacaagcctgctgctggagaaggaccagagcacgtgccacatggagccagggccagggaccttccacctcctagggtgaaaccaggagagattgcttgcttcacttgtacaagaatcggctcccagacacctgccactcgtgaatgcatctgataaactcactcacactgaggccttggggactgaggccctggcggatcacgggtgcccaggggctcggaggccgcctcctctgggaagcctgcccaggttccgatggactcccacaggcaatacccctgggccttcctcgcggcccctgttggccccaattcccccaccccctgcaaggtctgtgcctctcctgcagccccgccaccaactagggcgagaggagctcgcccccacccaaacgtattggttcgatgaaggaagggcccatggttctgccactggccctggacacccagtgctggtttcccgtggaagtccccctggactgagtggcggctgggtgctctagtgatttgcgacctggggcctctgactcccatcatgttgggaaagtcgttgaacctcaccggtgaaacgggcacagtgaagtcatttccccgaagtctcaggactctgtgtaaggctggggacaggggcttgttggggcctaagggcaccttgggaactgcaggagcccgttctgcctccataagacactcactcctggcagggtcccctctccgggcacagcccagatccacccccatcatccctctccatctgtggctccctgcccctcacagaggattcatcactctgttcagaatccccaggactccctagggaaggaggtcccagcctggcctcccaagaccgtgcttgcccaattccaggacttcctcacatggctcctacctccagcacagaagcggcactaaaccaggtggtcaatcagggagcaccaccgaggttctgaatggtccagggatgagcagtgatgcctcaagctaagccaatcaaagccttccctgggattgtctcaaggagtccgcagtgagattctgggtctcagtactgggaaagggtgaggctgaggctgcctgctgtcctgggggcctcaccctgccaccaacaggaagccacacagagggaagcagaaatgagacgcagccagtgagggcagggtacaaaggtgagatcccggagagacagatgctgggacatcatccttgggtactggttccaacagtgcctgcagatggagccaccctcggagagtccacaacagcagccaatccattctatgcgtgtctgagctactttaagtcgggtttttgactgtttgaatgagagtctcatcttggctaggcaccatggcgcaacaactggggaggtggaggtaggaagattgcttgaggccaagagtcccagagcagcctgggcaacctatcaagacgctgtctttacgaaaagaaaagaaactagctaggtgtggtggtgcgtgcctgtggtcccagctactggggaggctgaggtgggaggattgcttgagcccaggaagtggaggctgcagtgacctatgatggcaccactgtactccagcctgggtgacagagcaagacttcgtctcaaaaaaaaaaaaaaaggttggagaccagcctgggtaacagaccaagaccccgactctggaattaaaacaaaaaacaggatgtggttggtgttttgtaaccaagacgtttagagtaggatggttttcaggctatcaaatttactactatattgctcacaccagaagtccaaatatacacacaaattagatatatttttttgagatggagtcttgctttgtcacccaggatggagtgcagtggcacaatcatagctcactgcctcctccaatttctgggctcaagggatcctcntgcctcagctcacgcacacgcacacacacacacacacacacacacacactccattctctgtctccatgactctggagtaaactaacgtctcgagttgccattggaagccccattgtcctcattttgtttgtttgtttgtttattgagacggagttttgttcttgttgcccaggctggagtgcagtggcacgatctcggctcaccgcaacctctgcctcccaggttcaagcaattctcctgtctcagcctcccaagtagctgggattacaggtgtgcgccaccacgcctggctaattttgttatttttagtagagacggggtttcgccatgttggccgggctggtctcgaactcctgacctcgggtgatccacccacctcagcctcccaaagtgctgggattacaggtgtgagccaccgtgcccggccttgactaccatattttaaatttactggaggacttttttgttctcttcttttttctttttttaatagcatcccgctcttatttcagaataaaaaaaattttaaggtatgttgagtaagaatctatagagcaatgaaaatgcaagagcaatagctatgggcaccaaatggtcaatcttcttatcataatgttgagtggaagaagccaggtccaccagacacatgctgctcatttatgcaaagtttggacacaggcaaaacaaaactagtttgatcgtgatgggaaacattagagaaatgcaaagacatgaccatcataattgtcaggagaaggcattggttaggattgggaagcggcaagcagaagcatttagggattggctggcaatgttttacttctcggctgagtgagggttgcatcggtgtttatttgataacacgttctaggggctgggcaagatggctcatgtttgtagtctcagtactttgggaggccaaagatgggaggattgcttgagcccgtgagtttgagaccagcgtgggtgacatngcgagaccctgtctctacaaaaaaaaaaacgcgcacagtgaaacacaaaacctctgtttggagcgcctttggccccttagaaaggtttctgagacacatgctgttggcacgcggggcacacatgtgtacgcacccgtgggaaagggtggtccaaggagaaactcgggcagacaagtcggtggtcttccccataaag

SEQ ID NO: 349999 - DNA, 2336 bp, Homo sapiens
ggttttttttccgaacgcccgcagcagggtcagaagggaggtggtcgccctccgtcgtggtctggcgtgtattccgagccttggtgtctggcggtttccgagcgttggtgtctggcggtttccgaccgttggtgtctggcggtttccgaccgttggtgtctggcacgcgccaccctctcttgctttggttgcgccatgccgatgtaccagacaagaagacaagaaaatgatttgaggacagcttcaatcgcggtgtgaagaagaaagcagcaaaacgaccactgaaaacaacgccggtggcaaaatatccaaagaaagggtcccaagcggtacatcgtcatagccggaaacagtcagagccaccagccaatgatcttttcaatgctgcgaaagctgccaaaagtgacatgcagggatgtccttcctgagatccgtgctatctgcattgaggaaattgggtgttggatgcaaagctacagcacgtctttcctcaccgacagctatttaaaatatattggttggactctgcatgataagcaccgagaagtccgcgtgaagtgcgtgaaggctctgaaagggctgtacggtaaccgggacctgaccgcacgcctggagctcttcactggccgcttcaaggactggatggtttccatgatcgtggacagagagtacagtgtggcagtggaggccgtcagattactgatacttatccttaagaacatggaaggggtgctgatggacgtggactgtgagagcgtctaccccattgtgtaggcctctaattgaggcctggcctctgctgtgggtgaatttctgtactggaagtgagtggggctccttttacgtttctttaacaccaccctctcggtttctctcccacatgtgctgctgccctacttaaggcctccccatctccgtggaagtctctctgctgtctcttttcctctctcagctccttggggctttccttagctctgcacctccttttcctttatcatctccttgggccatctcctccctctgtggtcatcattacacctccttgtttcctcctgtgctgagccctttccttgtgtccattccaccagacttttctaccctgagtgcgagataagaacgatgggtggaagagagcaacgccagagcccaggtgcccagaggactttcttccagcttctgctgtccttctttgtggagagcaaggtgacatacacagagataactctggctgttgtgcataggacctacaagtgggctggggttggtggttcacgcctgtaagcccaacactttgggaggctgaggtgggaggatcctttgagcccaggagtttgagaccagcttgggcaacatagtgagaccctgtctctaccaaaaaaaaaaaaaaaaaaaaaaaagacagatggagaaggatgggggtgtacactgtaggaaggagagcgatatttaatcagtaaccacttcctagggtattttaacatgccatcactaaatccccatgcacctccttccccagctccacgaccacgctgcttacttagtagacaacctgtgggactgtgcagggactcagctgaaggactgggagggtctgacaagcctgctgctggagaaggaccagagcacgtgccacatggagccagggccagggaccttccacctcctagggtgaaaccaggagagattgcttgcttcacttgtacaaggcaggaacggtggcatggggtgggggaaacttggagttggaaggtggctaatctttgattctatgtttttgatcctcctggcactccagacctgggtgatgtgcaggagagcacactgatagaaatccttgtgtccagtgcccagcaactcctgcctcagcctcccgagcagctgggactacaggcgcccgccaccacgcctggctaacttttttgtatttttagtagagacgggttttcaccgtgttggccaggatggtcttgatctcttgaccttgtgatccacctgcctcagcctcccaaagtgctgggattacaggtgtgagccaccgtgcccggccttgactaccatattttaaatttactggaggacttttttgttctcttcttttttctttttttaatagcatcccgctcttatttcagaataaaaaaaattttaaggtatgttgagtaagaatctatagagcaatgaaaatgcaagagcaatagctatgggcacgaagatcactgcagtgagctgagatcatgccactgcacttcagcctgggcgtcagagtgagaccctgtttctaaaataataataattttaaaaaatgatatttatggttgcattgggacggaagatca

SEQ ID NO: 350000 - DNA, 2877 bp, Homo sapiens
ggttttttttccgaacgcccgcagcagggtcagaagggaggtggtcgccctccgtcgtggtctggcgtgtattccgagccttggtgtctggcggtttccgagcgttggtgtctggcggtttccgaccgttggtgtctggcggtttccgaccgttggtgtctggcacgcgccaccctctcttgctttggttgcgccatgccgatgtaccagacaagaagacaagaaaatgatttgaggacagcttcaatcgcggtgtgaagaagaaagcagcaaaacgaccactgaaaacaacgccggtggcaaaatatccaaagaaagggtcccaagcggtacatcgtcatagccggaaacagtcagagccaccagccaatgatcttttcaatgctgcgaaagctgccaaaagtgacatgcagggatgtccttcctgagatccgtgctatctgcattgaggaaattgggtgttggatgcaaagctacagcacgtctttcctcaccgacagctatttaaaatatattggttggactctgcatgataagcaccgagaagtccgcgtgaagtgcgtgaaggctctgaaagggctgtacggtaaccgggacctgaccgcacgcctggagctcttcactggccgcttcaaggactggatggtttccatgatcgtggacagagagtacagtgtggcagtggaggccgtcagattactgatacttatccttaagaacatggaaggggtgctgatggacgtggactgtgagagcgtctaccccattgtgtaggcctctaattgaggcctggcctctgctgtgggtgaatttctgtactggaagtgagtggggctccttttacgtttctttaacaccaccctctcggtttctctcccacatgtgctgctgccctacttaaggcctccccatctccgtggaagtctctctgctgtctcttttcctctctcagctccttggggctttccttagctctgcacctccttttcctttatcatctccttgggccatctcctccctctgtggtcatcattacacctccttgtttcctcctgtgctgagccctttccttgtgtccattccaccagacttttctaccctgagtgcgagataagaacgatgggtggaagagagcaacgccagagcccaggtgcccagaggactttcttccagcttctgctgtccttctttgtggagagcaaggtgacatacacagagataactctggctgttgtgcataggacctacaagtgggctggggttggtggttcacgcctgtaagcccaacactttgggaggctgaggtgggaggatcctttgagcccaggagtttgagaccagcttgggcaacatagtgagaccctgtctctaccaaaaaaaaaaaaaaaaaaaaaaaagacagatggagaaggatgggggtgtacactgtaggaaggagagcgatatttaatcagtaaccacttcctagggtattttaacatgccatcactaaatccccatgcacctccttccccagctccacgaccacgctgcttacttagtagacaacctgtgggactgtgcagggactcagctgaaggactgggagggtctgacaagcctgctgctggagaaggaccagagcacgtgccacatggagccagggccagggaccttccacctcctagggtgaaaccaggagagattgcttgcttcacttgtacaagaatcggctcccagacacctgccactcgtgaatgcatctgataaactcactcacactgaggccttggggactgagagtgcgatgacatggatcctgcggacaaaccgccccagggcgtacctagcaccgaagcatcaggcgccactaggtctccagctccttctcggatgacgtccttcagcacgccccggtcccccgagatgtccagcatcctctgacttaaccgctcgtacagggactgatggagaatgaaagccaggcctcagagccgcagacccacccggccacccctcagcgtctacgcccccgaaacgtctgggccctcacctggccgggggcgtcgtccccttccaggactccctggtttaacgcgcttccccccatgtcctagctgccctccctgtggcgtgagccttcggcctggtgcgccccgctgcccttcctggctgtgactctggtggggttccgaaggcccctttatgcccggcagacccctaccgacggcggcattacattctggggccacgaggaggcactcatcgtttcgttccaaccgccgccaacggccctggccctcgcgagctctggaactacagaggtcgcacggtggtggacggcagcagctccttgcccaacgtctccctggcctgggtgatcgaagccctgaggctccctggggacccggagcccaaggtctgcgtgcaccaccggaacccgctcagccttttctgcgagaaggaccaggagctcatctgtggcctctgcggtctgctgggctcccaccaacaccacccggtcacgcccgtctccaccgtctgcagccgcatgaaggaggagctcgcagccctcttctctgagctgaagcaggagcagaagaaggtggatgagctcatcgccaaactggtgaaaaaccggacccgaatcgtcaatgagtcggatgtcttcagctgggtgatccgccgcgagttccaggagctgcgccacccggtggacgaggagaaggcccgctgcctggaggggatagggggtcacacccgtggcctggtggcctccctggacatgcagctggagcaggcccagggaacccgggagcggctggcccaagccgagtgtgtgctggaacagttcggcaatgaggaccaccatgagttcatctgggtgagtggacaggg

SEQ ID NO: 350001 - DNA, 2954 bp, Homo sapiens
ggttttttttccgaacgcccgcagcagggtcagaagggaggtggtcgccctccgtcgtggtctggcgtgtattccgagccttggtgtctggcggtttccgagcgttggtgtctggcggtttccgaccgttggtgtctggcggtttccgaccgttggtgtctggcacgcgccaccctctcttgctttggttgcgccatgccgatgtaccagacaagaagacaagaaaatgatttgaggacagcttcaatcgcggtgtgaagaagaaagcagcaaaacgaccactgaaaacaacgccggtggcaaaatatccaaagaaagggtcccaagcggtacatcgtcatagccggaaacagtcagagccaccagccaatgatcttttcaatgctgcgaaagctgccaaaagtgacatgcagggatgtccttcctgagatccgtgctatctgcattgaggaaattgggtgttggatgcaaagctacagcacgtctttcctcaccgacagctatttaaaatatattggttggactctgcatgataagcaccgagaagtccgcgtgaagtgcgtgaaggctctgaaagggctgtacggtaaccgggacctgaccgcacgcctggagctcttcactggccgcttcaaggactggatggtttccatgatcgtggacagagagtacagtgtggcagtggaggccgtcagattactgatacttatccttaagaacatggaaggggtgctgatggacgtggactgtgagagcgtctaccccattgtgtaggcctctaattgaggcctggcctctgctgtgggtgaatttctgtactggaagtgagtggggctccttttacgtttctttaacaccaccctctcggtttctctcccacatgtgctgctgccctacttaaggcctccccatctccgtggaagtctctctgctgtctcttttcctctctcagctccttggggctttccttagctctgcacctccttttcctttatcatctccttgggccatctcctccctctgtggtcatcattacacctccttgtttcctcctgtgctgagccctttccttgtgtccattccaccagacttttctaccctgagtgcgagataagaacgatgggtggaagagagcaacgccagagcccaggtgcccagaggactttcttccagcttctgctgtccttctttgtggagagcaaggtgacatacacagagataactctggctgttgtgcataggacctacaagtgggctggggttggtggttcacgcctgtaagcccaacactttgggaggctgaggtgggaggatcctttgagcccaggagtttgagaccagcttgggcaacatagtgagaccctgtctctaccaaaaaaaaaaaaaaaaaaaaaaaagacagatggagaaggatgggggtgtacactgtaggaaggagagcgatatttaatcagtaaccacttcctagggtattttaacatgccatcactaaatccccatgcacctccttccccagctccacgaccacgctgcttacttagtagacaacctgtgggactgtgcagggactcagctgaaggactgggagggtctgacaagcctgctgctggagaaggaccagagcacgtgccacatggagccagggccagggaccttccacctcctagggtgaaaccaggagagattgcttgcttcacttgtacaagaatcggctcccagacacctgccactcgtgaatgcatctgataaactcactcacactgaggccttggggactgagagtgcgatgacatggatcctgcggacaaaccgccccagggcgtacctagcaccgaagcatcaggcgccactaggtctccagctccttctcggatgacgtccttcagcacgccccggtcccccgagatgtccagcatcctctgacttaaccgctcgtacagggactgatggagaatgaaagccaggcctcagagccgcagacccacccggccacccctcagcgtctacgcccccgaaacgtctgggccctcacctggccgggggcgtcgtccccttccaggactccctggtttaacgcgcttccccccatgtcctagctgccctccctgtggcgtgagccttcggcctggtgcgccccgctgcccttcctggctgtgactctggtggggttccgaaggcccctttatgcccggcagacccctaccgacggcggcattacattctggggccacgaggaggcactcatcgtttcgttccaaccgccgccaacggccctggccctcgcgagctctggaactacagaggtcgcacgcccgggcagtgagtgtggatggcttggcaggtgagcctgctggagctggaggaccggcttcagtgtcccatctgcctggaggtcttcaaggagtccctaatgctacagtgcggccactcctactgcaagggctgcctggtttccctgtcctaccacctggacaccaaggtgcgctgccccatgtgctggcaggtggtggacggcagcagctccttgcccaacgtctccctggcctgggtgatcgaagccctgaggctccctggggacccggagcccaaggtctgcgtgcaccaccggaacccgctcagccttttctgcgagaaggaccaggagctcatctgtggcctctgcggtctgctgggctcccaccaacaccacccggtcacgcccgtctccaccgtctgcagccgcatgaaggaggagctcgcagccctcttctctgagctgaagcaggagcagaagaaggtggatgagctcatcgccaaactggtgaaaaaccggacccgaatcgtcgtgagtgccccttccctctgcccctgcctgggaccggccaccttcactttcctgtagagctcagttctcattggtcctttacagaaaaccatgccttccatataaagccagaactcaaagcattccgggg

SEQ ID NO: 350002 - DNA, 1954 bp, Homo sapiens
ggttttttttccgaacgcccgcagcagggtcagaagggaggtggtcgccctccgtcgtggtctggcgtgtattccgagccttggtgtctggcggtttccgagcgttggtgtctggcggtttccgaccgttggtgtctggcggtttccgaccgttggtgtctggcacgcgccaccctctcttgctttggttgcgccatgccgatgtaccagacaagaagacaagaaaatgatttgaggacagcttcaatcgcggtgtgaagaagaaagcagcaaaacgaccactgaaaacaacgccggtggcaaaatatccaaagaaagggtcccaagcggtacatcgtcatagccggaaacagtcagagccaccagccaatgatcttttcaatgctgcgaaagctgccaaaagtgacatgcagggatgtccttcctgagatccgtgctatctgcattgaggaaattgggtgttggatgcaaagctacagcacgtctttcctcaccgacagctatttaaaatatattggttggactctgcatgataagcaccgagaagtccgcgtgaagtgcgtgaaggctctgaaagggctgtacggtaaccgggacctgaccgcacgcctggagctcttcactggccgcttcaaggactggatggtttccatgatcgtggacagagagtacagtgtggcagtggaggccgtcagattactgatacttatccttaagaacatggaaggggtgctgatggacgtggactgtgagagcgtctaccccattgtgtaggcctctaattgaggcctggcctctgctgtgggtgaatttctgtactggaagtgagtggggctccttttacgtttctttaacaccaccctctcggtttctctcccacatgtgctgctgccctacttaaggcctccccatctccgtggaagtctctctgctgtctcttttcctctctcagctccttggggctttccttagctctgcacctccttttcctttatcatctccttgggccatctcctccctctgtggtcatcattacacctccttgtttcctcctgtgctgagccctttccttgtgtccattccaccagacttttctaccctgagtgcgagataagaacgatgggtggaagagagcaacgccagagcccaggtgcccagaggactttcttccagcttctgctgtccttctttgtggagagcaaggtgacatacacagagataactctggctgttgtgcataggacctacaagtgggctggggttggtggttcacgcctgtaagcccaacactttgggaggctgaggtgggaggatcctttgagcccaggagtttgagaccagcttgggcaacatagtgagaccctgtctctaccaaaaaaaaaaaaaaaaaaaaaaaagacagatggagaaggatgggggtgtacactgtaggaaggagagcgatatttaatcagtaaccacttcctagggtattttaacatgccatcactaaatccccatgcacctccttccccagctccacgaccacgctgcttacttagtagacaacctgtgggactgtgcagggactcagctgaaggactgggagggtctgacaagcctgctgctggagaaggaccagagcacgtgccacatggagccagggccagggaccttccacctcctagggtgaaaccaggagaatcgcttgaacccgggaggtggaggttgcggtcagccgagatcatgccactgcactccagcctaggcaacaagagtgaaactctgtcttaaaaaaaaaaattaaaaattatattcgggccgggcttggtggctcaatcctataataccagcaccttaggaggccaaggcaggaggatcacttgaggccaggagttcaagactggcctgggcaacataatgagaacccatctttaccaaaaaaataaaattacattaaaaattagctgggcac

SEQ ID NO: 350003 - DNA, 1924 bp, Homo sapiens
ggttttttttccgaacgcccgcagcagggtcagaagggaggtggtcgccctccgtcgtggtctggcgtgtattccgagccttggtgtctggcggtttccgagcgttggtgtctggcggtttccgaccgttggtgtctggcggtttccgaccgttggtgtctggcacgcgccaccctctcttgctttggttgcgccatgccgatgtaccagacaagaagacaagaaaatgatttgaggacagcttcaatcgcggtgtgaagaagaaagcagcaaaacgaccactgaaaacaacgccggtggcaaaatatccaaagaaagggtcccaagcggtacatcgtcatagccggaaacagtcagagccaccagccaatgatcttttcaatgctgcgaaagctgccaaaagtgacatgcagggatgtccttcctgagatccgtgctatctgcattgaggaaattgggtgttggatgcaaagctacagcacgtctttcctcaccgacagctatttaaaatatattggttggactctgcatgataagcaccgagaagtccgcgtgaagtgcgtgaaggctctgaaagggctgtacggtaaccgggacctgaccgcacgcctggagctcttcactggccgcttcaaggactggatggtttccatgatcgtggacagagagtacagtgtggcagtggaggccgtcagattactgatacttatccttaagaacatggaaggggtgctgatggacgtggactgtgagagcgtctaccccattgtgtaggcctctaattgaggcctggcctctgctgtgggtgaatttctgtactggaagtgagtggggctccttttacgtttctttaacaccaccctctcggtttctctcccacatgtgctgctgccctacttaaggcctccccatctccgtggaagtctctctgctgtctcttttcctctctcagctccttggggctttccttagctctgcacctccttttcctttatcatctccttgggccatctcctccctctgtggtcatcattacacctccttgtttcctcctgtgctgagccctttccttgtgtccattccaccagacttttctaccctgagtgcgagataagaacgatgggtggaagagagcaacgccagagcccaggtgcccagaggactttcttccagcttctgctgtccttctttgtggagagcaagtctcattctgtcacccaggctggagtgcagtggcagaggttgcagtgagctgagattgcaccactgcaccccagcctgggcaataagagtgaaactccatctcaaaaaaaaaaaaaaaaaaaggtgcatgaaacatatgaagcaaaaagtgaaagtccccattcttttcctttttccagaggtgatttttgtggccaatctggtttcattccctcccagacacttttctaggcatctatgcgcctctattcacatataaacaaaataggagttttcctgtgcttcccttaaatggcatatgtatctttcactcttttttttcacctagtggatctttaataccttaaaagctcaacctgggcttggtgcggtggctcatacgtgtaatcccaggcctttgggaggccaaggtgggaggatcacttgagctcaggagttccagaccattccaaagcaaaaacaaaaggattttgagatcagtgtgggcaacttagcaaaacaccatctcttaaaaaaaaaaaaaaattagccaagcttggtggtgtaagcctgtagtcccagctacttgagaggctgaggtgggaggattgtttgaacccaggaggttgaggctacagtgagctgtgattgtgccactgcactccaggttgggtaatgcagcgagactgcgtctcaaaaaataaataaaataaaaaataaataaaagctccacctgtcttcc

SEQ ID NO: 350004 - DNA, 1570 bp, Homo sapiens
ggttttttttccgaacgcccgcagcagggtcagaagggaggtggtcgccctccgtcgtggtctggcgtgtattccgagccttggtgtctggcggtttccgagcgttggtgtctggcggtttccgaccgttggtgtctggcggtttccgaccgttggtgtctggcacgcgccaccctctcttgctttggttgcgccatgccgatgtaccagacaagaagacaagaaaatgatttgaggacagcttcaatcgcggtgtgaagaagaaagcagcaaaacgaccactgaaaacaacgccggtggcaaaatatccaaagaaagggtcccaagcggtacatcgtcatagccggaaacagtcagagccaccagccaatgatcttttcaatgctgcgaaagctgccaaaagtgacatgcagggatgtccttcctgagatccgtgctatctgcattgaggaaattgggtgttggatgcaaagctacagcacgtctttcctcaccgacagctatttaaaatatattggttggactctgcatgataagcaccgagaagtccgcgtgaagtgcgtgaaggctctgaaagggctgtacggtaaccgggacctgaccgcacgcctggagctcttcactggccgcttcaaggactggatggtttccatgatcgtggacagagagtacagtgtggcagtggaggccgtcagattactgatacttatccttaagaacatggaaggggtgctgatggacgtggactgtgagagcgtctaccccattgtgtaggcctctaattgaggcctggcctctgctgtgggtgaatttctgtactggaagtgagtggggctccttttacgtttctttaacaccaccctctcggtttctctcccacatgtgctgctgccctacttaaggcctccccatctccgtggaagtctctctgctgtctcttttcctctctcagctccttggggctttccttagctctgcacctccttttcctttatcatctccttgggccattcttttcctttttccagaggtgatttttgtggccaatctggtttcattccctcccagacacttttctaggcatctatgcgcctctattcacatataaacaaaataggagttttcctgtgcttcccttaaatggcatatgtatctttcactcttttttttcacctagtggatctttaataccttaaaagctcaacctgggcttggtgcggtggctcatacgtgtaatcccaggcctttgggaggccaaggtgggaggatcacttgagctcaggagttccagaccattccaaagcaaaaacaaaaggattttgagatcagtgtgggcaacttagcaaaacaccatctcttaaaaaaaaaaaaaaattagccaagcttggtggtgtaagcctgtagtcccagctacttgagaggctgaggtgggaggattgtttgaacccaggaggttgaggctacagtgagctgtgattgtgccactgcactccaggttgggtaatgcagcgagactgcgtctcaaaaaataaataaaataaaaaataaataaaagctccacctgtcttcc

SEQ ID NO: 350005 - DNA, 1348 bp, Homo sapiens
ggttttttttccgaacgcccgcagcagggtcagaagggaggtggtcgccctccgtcgtggtctggcgtgtattccgagccttggtgtctggcggtttccgagcgttggtgtctggcggtttccgaccgttggtgtctggcggtttccgaccgttggtgtctggcacgcgccaccctctcttgctttggttgcgccatgccgatgtaccagacaagaagacaagaaaatgatttgaggacagcttcaatcgcggtgtgaagaagaaagcagcaaaacgaccactgaaaacaacgccggtggcaaaatatccaaagaaagggtcccaagcggtacatcgtcatagccggaaacagtcagagccaccagccaatgatcttttcaatgctgcgaaagctgccaaaagtgacatgcagggatgtccttcctgagatccgtgctatctgcattgaggaaattgggtgttggatgcaaagctacagcacgtctttcctcaccgacagctatttaaaatatattggttggactctgcatgataagcaccgagaagtccgcgtgaagtgcgtgaaggctctgaaagggctgtacggtaaccgggacctgaccgcacgcctggagctcttcactggccgcttcaaggactggatggtttccatgatcgtggacagagagtacagtgtggcagtggaggccgtcagattactgatacttatccttaaacttttctaccctgagtgcgagataagaacgatgggtggaagagagcaacgccagagcccaggtgcccagaggactttcttccagcttctgctgtccttctttgtggagagcaagctccacgaccacgctgcttacttagtagacaacctgtgggactgtgcagggactcagctgaaggactgggagggtctgacaagcctgctgctggagaaggaccagagcacgtgccacatggagccagggccagggaccttccacctcctagggtgaaaccaggagagattgcttgcttcacttgtacaaggcaggaacggtggcatggggtgggggaaacttggagttggaaggtggctaatctttgattctatgtttttgatcctcctggcactccagacctgggtgatgtgcaggagagcacactgatagaaatccttgtgtccagtgcccagcaactcctgcctcagctcccagctacttgagaggctgaggtgggaggattgtttgaacccaggaggttgaggctacagtgagctgtgattgtgccactgcactccaggttgggtaatgcagcgagactgcgtctcaaaaaataaataaaataaaaaataaataaaagctccacctgtcttcc

SEQ ID NO: 350006 - DNA, 1017 bp, Homo sapiens
gtatccttatcacactgttctacgcagaaatagaagagctgaaactggtgtatccttatcacggcgttctacacagcgactagaagagctgaaactggtgtatccttatcacggtgttgtacgcagaaatagaagagctgaggaccatcgttgcaacgatggtcctcagctaaatccccatgcacctccttccccagctccacgaccacgctgcttacttagtagacaacctgtgggactgtgcagggactcagctgaaggactgggagggtctgacaagcctgctgctggagaaggaccagagcacgtgccacatggagccagggccagggaccttccacctcctagggtgaaaccaggagagattgcttgcttcacttgtacaaggcaggaacggtggcatggggtgggggaaacttggagttggaaggtggctaatctttgattctatgtttttgatcctcctggcactccagacctgggtgatgtgcaggagagcacactgatagaaatccttgtgtccagtgcccagcaactcctgcctcagcctcccgagcagctgggactacaggcgcccgccaccacgcctggctaacttttttgtatttttagtagagacgggttttcaccgtgttggccaggatggtcttgatctcttgaccttgtgatccacctgcctcagcctcccaaagtgctgggattacaggtgtgagccaccgtgcccggccttgactaccatattttaaatttactggaggacttttttgttctcttcttttttctttttttaatagcatcccgctcttatttcagaataaaaaaaattttaaggtatgttgagtaagaatctatagagcaatgaaaatgcaagagcaatagctatgggcacgaagatcactgcagtgagctgagatcatgccactgcacttcagcctgggcgtcagagtgagaccctgtttctaaaataataataattttaaaaaatgatatttatggttgcattgggacggaagatca

SEQ ID NO: 350007 - DNA, 476 bp, Homo sapiens
gcagagcctctccatttgaaatgggagctggggccaccctccccacggccaccgccagggctccccatgcatggggtgaactccctgcccggcgccaggccatgcagcctcccctgagactcaggtcccaggaccaacccggtcaggaaggccctggggacaccgaggccagccagacagagcctggcagctcggctgtgactctgcagtgagcagccctccctgtcccagaatgagtcggatgtcttcagctgggtgatccgccgcgagttccaggagctgcgccacccggtggacgaggagaaggcccgctgcctggaggggatagggggtcacacccgtggcctggtggcctccctggacatgcagctggagcaggcccagggaacccgggagcggctggcccaagccgagtgtgtgctggaacagttcggcaatgaggaccaccatgagttcatctgggtgagtggacaggg

SEQ ID NO: 350008 - DNA, 1369 bp, Homo sapiens
tttttcctctcccagtctcctccgccctccccagcagacagcaactcaggtgggcctgggcaagaacacactccttgtctctctccccctgtgcagagccaaggatgaggcgccagtctgttgccctggaagctctgaggttgctgcatgttgaatggtccccagaccactgagtgcagctgagtcacgggcctgtctcctctgcatttttttttttttttgagatggagtgttgctgtgttgcccaggctggagtgcaatggcgtgatctcagctcactgcaacctccgcctcccaggttcacgccattctcctgcctcagcctcccgagtagctgggactacaggcgcccaccaccacgcctggctgattttttttgtatttttagtagagacggggtttcaccgtgttagccaggatggtctcgatctcctgacctcatgatccgcctgcctcggcctcccaaagtgctgggattacaggcgtgagccactgcgcccggcctccactgatgtattttttaatacaacactgtagagagagaaactggccttgaagtaactgttcttatgcagactgcagacggaaggaagctgatgtgcctggaaatgacaggaaggtggtagaggaggtggccctggggagggtgatagtaaaaatactgaactagaggtgtaggctgaaggtcattcactgcccaggcctcacaggccagaggatggagaaggaagtgcagaggggacatctcctgggttcccacctgttgtctccactggcggaagcaggtccggctgagtctctgtgccagcagttgggtgctctgcctgtgcaggagctgggggagagcaagtgcacagagagtggcgtcctgacccagcctagacagcctggggtgggtcctgatctaacccagcctctgcccagctgaatgtcctcccattgctaggagtcctggatggtgccaggggtctcctgcataggcagggagtgccgcctagaggactcactctgtaggtcccccagcactgataagccacgggtcagcatgaaccgggtttttccgctgagccgtcttccctgggagacactggattctggggctggctactcgctaggctccaccaaacgcccagaaaggctcctgcagctttgtcttacaggaccccaaaccacccaccactcataccggctgcatggagtgctgtcaggaaagaccccttcctgagaaatggtctcctggcctggacaccccttgccaggcaggcagaacttggagagttgccaccgtcagcctcaccctcttcctgacacactgcagatggtgcgtcttccaccgggccagcccctccagcagcagctgccggtggtg

SEQ ID NO: 350009 - DNA, 1047 bp, Homo sapiens
tggtgctatctcagctcactgcaagctctgcctcccaggttcacgccattctcctgcctcatttagtagagacggggtttcaccgtgttagccaggatggtctcgatctcctgacctcatgatccgcctgcctcggcctcccaaagtgctgggattacaggcgtgagccactgcgcccggcctccactgatgtattttttaatacaacactgtagagagagaaactggccttgaagtaactgttcttatgcagactgcagacggaaggaagctgatgtgcctggaaatgacaggaaggtggtagaggaggtggccctggggagggtgatagtaaaaatactgaactagaggtgtaggctgaaggtcattcactgcccaggcctcacaggccagaggatggagaaggaagtgcagaggggacatctcctgggttcccacctgttgtctccactggcggaagcaggtccggctgagtctctgtgccagcagttgggtgctctgcctgtgcaggagctgggggagagcaagtgcacagagagtggcgtcctgacccagcctagacagcctggggtgggtcctgatctaacccagcctctgcccagctgaatgtcctcccattgctaggagtcctggatggtgccaggggtctcctgcataggcagggagtgccgcctagaggactcactctgtaggtcccccagcactgataagccacgggtcagcatgaaccgggtttttccgctgagccgtcttccctgggagacactggattctggggctggctactcgctaggctccaccaaacgcccagaaaggctcctgcagctttgtcttacaggaccccaaaccacccaccactcataccggctgcatggagtgctgtcaggaaagaccccttcctgagaaatggtctcctggcctggacaccccttgccaggcaggcagaacttggagagttgccaccgtcagcctcaccctcttcctgacacactgcagatggtgcgtcttccaccgggccagcccctccagcagcagctgccggtggtg

SEQ ID NO: 350010 - DNA, 639 bp, Homo sapiens
tttttcctctcccagtctcctccgccctccccagcagacagcaactcaggtgggcctgggcaagaacacactccttgtctctctccccctgtgcagagccaaggatgaggcgccagtctgttgccctggaagctctgaggttgctgcatgttgaatggtccccagaccactgagtgcagctgagtcacgggcctgtctcctctgcatttttttttttttttgagatggagtgttgctgtgttgcccaggctggagtgcaatggcgtgatctcagctcactgcaacctccgcctcccaggttgaagcgattcttctgcctcagccttccaagtagttgggactacatgcgtgcaccaccatgcccggctaatttttgtatttttagtagagatggggtttcaccatattggccaggctggtcttgaactcctaaccccgtgatctgcctggatcacagcctctcaaagtgctgggatgacaggtgtgagtcactgcgcctggcccttctctgcacctttaatatcagtgttataattagtcactggggacagcatggcctcatcgggtttttagagttttgctcaactttatcgtcccccccataggaagcagagcctctgtgcacaggtgagtctgacg

SEQ ID NO: 350011 - DNA, 353 bp, Homo sapiens
tgccttccatccccactttcactgctgcccccaccccaccgccccaagcaagtatcagcagaccaaagaagtcttagagctttaaggggacttggagctccagaaacaaaagtaagttctaccaacaagtccaatgtagaaaactacggggaacgacgctgattggccccgtttgcattacctgacaactccaggaccaatcaccatggtgggaaggatgtggcaccataagcagcacaccctgcgtcaggtgcccgttcagccccccacaaccacacatgttaggggaggaccagcaggacctcaaaggtgaagagaggtactgttactggaggaagaagtgctaaacacac

SEQ ID NO: 350012 - DNA, 2556 bp, Homo sapiens
cgctcttgcgggagcgttccgcatcgccccgggggcccctacgcgaggatctccggggccgttggcagcgcctggcacttctgagctcggcggacgagagcctgcaggtttcctccagtcagggacggcgaagggcggaaagcgcaggaggaggcagtgttaggccttaggccgggtgggccgggtcaggagagacgcgcccatctttcgccatccggggtgcgcgaggtcctctcgggacccggccggcgacccgtagctcgggcacgcgcctgtcgcatcccgcaggaaggaggggtccggcctgaggcccggggcggcgtccgccatggagatcccctcggtccaggccggcgcctgggacctggcgggcggccctgaccgccttcctccctgcgcgggctgggtcgcggacgtgcccttcgcggcactcggcctcctctgcgtctccgccttccctgggccgcactgctgcctgggcgcggcggcggcgacggcgccctgttgaatgggctgtgagggcccaggtttaaagcgctggcgaacgcggcctccgggggcgcacggcagctgcagcggtggcgaccaaacgggtgttggagttggcggcggcatggagggcctggctggctatgtatacaaggcggccagcgagggcaaggtgctgactctggccgccttgcttctcaaccggtctgaaagcgacatccgctatctgcttggctatgtcagccagcagggagggcagcgctccacgcccctcatcatcgcagcccgcaatggacacgcaaaggtggtacgcttgctcttagaacattaccgggtgcagactcagcagactggcaccgtccgcttcgacgggtatgtcattgatggtgccactgctctttggtgtgcagctggagcaggacattttgaagttgttaaacttctagtcagccatggagccaacgtgaaccataccacagtaactaattcaacccccctgcgggcagcatgctttgatggcagactggacattgtgaaatacttggttgaaaataatgccaacatcagcattgccaacaaatatgacaacacctgcctaatgattgcggcatataagggacacactgatgtggtcagataccttttagaacaacgtgctgatcccaatgccaaagcacattgtggagccacagcattgcactttgcagctgaagctgggcacatagatattgtgaaagagctgataaaatggcgtgctgctatagtagtgaatggccatgggatgacgccattgaaagtagctgccgaaagctgtaaagctgatgtcgtagaactgttactctctcatgctgattgcgaccgaagaagtcggattgaagctttggaactcttgggtgcctcctttgcaaatgaccgtgagaactatgacatcataaagacataccactatctatatttagccatgttagagaggttccaagatggtgataacattctcgaaaaagaggttcttccaccaatccatgcttatgggaatagaactgaatgtagaaatcctcaggaactggagtccattcggcaagacagagatgctcttcatatggaaggccttatagttcgggaacggattttaggtgctgacaatattgatgtttctcatcccatcatttacagaggagctgtttatgcggataatatggaatttgagcagtgtatcaagttgtggcttcatgccctgcacctcagacaaaaaggtaacaggaacacccacaaggatcttcttcgatttgctcaagttttctcacaaatgatacatttgaatgaaactgtgaaggccccagacatagaatgtgttttgagatgcagtgttttggaaatagaacaaagtatgaacagagtgaaaaatatttcagatgctgatgtccacaatgctatggacaattatgaatgtaatctctatacctttctgtatttagtgtgcatctctaccaaaacacagtgcagcgaagaagatcagtgcaaaattaacaagcagatctacaacctgattcaccttgatcccagaactcgtgaaggtttcaccttgctgcatctggctgtcaactccaatactccagttgatgatttccacaccaatgacgtctgcagctttccaaatgcacttgtcacaaagctcctgctggactgtggtgctgaggtgaatgccgtggacaatgagggaaacagtgcccttcatattatcgttcagtacaacaggcccatcagtgattttttgaccttgcactccatcatcattagcctagttgaagccggagctcacactgacatgacgaataaacagaataagactccgctagacaaaagtacaactggggtatctgaaatactgcttaaaactcaaatgaagatgagtctcaagtgcctggctgcccgagcagttcgggctaatgacattaactaccaagaccagatccccagaactcttgaagagtttgttggatttcattaagtgactggatatgtaaagtcgtttaatgtggtgctaaaaagtaaaggacttttaatcac

SEQ ID NO: 350013 - DNA, 4985 bp, Homo sapiens
cgctcttgcgggagcgttccgcatcgccccgggggcccctacgcgaggatctccggggccgttggcagcgcctggcacttctgagctcggcggacgagagcctgcaggtttcctccagtcagggacggcgaagggcggaaagcgcaggaggaggcagtgttaggccttaggccgggtgggccgggtcaggagagacgcgcccatctttcgccatccggggtgcgcgaggtcctctcgggacccggccggcgacccgtagctcgggcacgcgcctgtcgcatcccgcaggaaggaggggtccggcctgaggcccggggcggcgtccgccatggagatcccctcggtccaggccggcgcctgggacctggcgggcggccctgaccgccttcctccctgcgcgggctgggtcgcggacgtgcccttcgcggcactcggcctcctctgcgtctccgccttccctgggccgcactgctgcctgggcgcggcggcggcgacggcgccctgttgaatgggctgtgagggcccaggtttaaagcgctggcgaacgcggcctccgggggcgcacggcagctgcagcggtggcgaccaaacgggtgttggagttggcggcggcatggagggcctggctggctatgtatacaaggcggccagcgagggcaaggtgctgactctggccgccttgcttctcaaccggtctgaaagcgacatccgctatctgcttggctatgtcagccagcagggagggcagcgctccacgcccctcatcatcgcagcccgcaatggacacgcaaaggtggtacgcttgctcttagaacattaccgggtgcagactcagcagactggcaccgtccgcttcgacgggtatgtcattgatggtgccactgctctttggtgtgcagctggagcaggacattttgaagttgttaaacttctagtcagccatggagccaacgtgaaccataccacagtaactaattcaacccccctgcgggcagcatgctttgatggcagactggacattgtgaaatacttggttgaaaataatgccaacatcagcattgccaacaaatatgacaacacctgcctaatgattgcggcatataagggacacactgatgtggtcagataccttttagaacaacgtgctgatcccaatgccaaagcacattgtggagccacagcattgcactttgcagctgaagctgggcacatagatattgtgaaagagctgataaaatggcgtgctgctatagtagtgaatggccatgggatgacgccattgaaagtagctgccgaaagctgtaaagctgatgtcgtagaactgttactctctcatgctgattgcgaccgaagaagtcggattgaagctttggaactcttgggtgcctcctttgcaaatgaccgtgagaactatgacatcataaagacataccactatctatatttagccatgttagagaggttccaagatggtgataacattctcgaaaaagaggttcttccaccaatccatgcttatgggaatagaactgaatgtagaaatcctcaggaactggagtccattcggcaagacagagatgctcttcatatggaaggccttatagttcgggaacggattttaggtgctgacaatattgatgtttctcatcccatcatttacagaggagctgtttatgcggataatatggaatttgagcagtgtatcaagttgtggcttcatgccctgcacctcagacaaaaaggtaacaggaacacccacaaggatcttcttcgatttgctcaagttttctcacaaatgatacatttgaatgaaactgtgaaggccccagacatagaatgtgttttgagatgcagtgttttggaaatagaacaaagtatgaacagagtgaaaaatatttcagatgctgatgtccacaatgctatggacaattatgaatgtaatctctatacctttctgtatttagtgtgcatctctaccaaaacacagtgcagcgaagaagatcagtgcaaaattaacaagcagatctacaacctgattcaccttgatcccagaactcgtgaaggtttcaccttgctgcatctggctgtcaactccaatactccagttgatgatttccacaccaatgacgtctgcagctttccaaatgcacttgtcacaaagctcctgctggactgtggtgctgaggtgaatgccgtggacaatgagggaaacagtgcccttcatattatcgttcagtacaacaggcccatcagtgattttttgaccttgcactccatcatcattagcctagttgaagccggagctcacactgacatgacgaataaacagaataagactccgctagacaaaagtacaactggggtatctgaaatactgcttaaaactcaaatgaagatgagtctcaagtgcctggctgcccgagcagttcgggctaatgacattaactaccaagaccagatccccagaactcttgaagagtttgttggatttcattaagtgactggatatgtaaagtcgtttaatgtggtgctaaaaagtaaaggacttttaatcacagacagtagaattatgtgttcataaattctgcttttctttccactacccttcctcccatcccatccttccttagttctgtatttgtttttcttgcctcatggtaattgatttcagacagactttaacaaaaccacattgttttggtgtaactataaggtatttgcatattggttacctatttgtctttcttttttttaaaggaacagatataaaatgttttgtttatgtaacaagggacatttataatttcaagttgataatgttttaaacagctgcttacaaaagtatttctgttaagcctatgtcagcatgttatccatgcagcagttttgaggattttatgaagaaaaagagctaaaaaggaacattaagaggaatgggatatccaggtgttctgcacatgccaaactgctgtagatagtttacactcttccattatttatacggagtgatgcagcacattttagcattcaggaggatttttaaaaaatagctgcagattaatctggaaaatgtgctaatttaataatagttacaaatttataaatttaaatccatttgaaattgttgcattatgctgggtagtatatacaaaatggttatcatcttaaaccaacttttcagagaatcttgatggactctgcctttaggcttgaattcttcaaagtctattttaatgaaatttatctaaattgcagcagtctatttgattcagctcatagacatgtaaaaattatgaatgctgttttcttatgaaacaaattgtcacagtgtagttatacattctatttttgtccccttttccctttttctcctgtatcttttaaaatttggaaactacttttccagaaggcattatttatgcctccctaataaggtattttacttatgacagatgaaaaggaaccaggatatttttgaattttttcactttcttagtctgtgacaagaagtagaaatatcactagtgtggtataggaacttacatgttttttatgatgaaaataattctcaatgccacttgaaaggtaattgtgtctgagagctgcaaatttttcaaccacaaaatgtcacttattcctacaggctatacagaggtctttatggtttttttgttttgttttaatggcaacattgtaactgtcaaactaaaagggtattctgtgattatcttttaagcattacagaaattcaagtgaaagttatatgcttatttctattgatgttaaaaatgataatgaaagcaaaattagctgtatctgtaattttctctctagtgccaaatgaatgccttagctactcatagtgcatggtactgtaagtgaagacctgtagctttttttttttctttaatgaaaagcattataatgatgtagcagcatcagatataaacttaaaaaaaaaggtttcaattaacattttatatatggataatgctttgtaaagtgtaagagaaaggttgcagttggatcagtataaaacaatgaccaagccaaaatcagcaccctagggccttaaataaaatagagataccccacaaaatgaaatattttgaaggatgggaggggacagaaggggggactatcccccaaggatgcaagatactttttacagttgctatcattatactttgtcttcttgcttcagttaggaaggttttgatggtaaattctgtcatggtaatagatacctattttcctaacctgagattttacaaggaaggtttttaggttggcttaaatggaggtatttatttgagtgagccctaatttgaaaattaccagacttgatcctcctggtatgaatcaaggaaatactgtaccttgctcttagcaactctcagtggcctgaaagagaaaatgcacttcttcaaggtgagtgaatcatgctttttccacagttcagatcagaccctttatttttcaaactacaaggcctgcttattggacagtctaaggaatagctttgatacttggtattcagttggttccattattaatgtatattatttttatttaaacatcaaaacttaaaatatcagataatgttgcatgttttaaaaacacatttcatccctttggctacccaggaccagcactatttaagacactgcttatttataaaatgagaataatgattatatgtacatattcagacatcaaaatttaatgacattctattttgagaagggaagacaatgctgaagaaagtaaaactgttgattgaaatgctgacagggtggagaacgaatttgaagacagtggaataaactatgaactatgctaatggtaattagattttttgtttgtttagtatagtggtaaattgtgtagtatcttgctgagaatctaattctatcttgtaaaatcaatccaaatgtgtattgtgaaacacctgtataaaatcatttttgaaataagtgatctac

SEQ ID NO: 350014 - DNA, 4169 bp, Homo sapiens
  misc_feature (4143)..(4143): n is a, c, g, or t
cgctcttgcgggagcgttccgcatcgccccgggggcccctacgcgaggatctccggggccgttggcagcgcctggcacttctgagctcggcggacgagagcctgcaggtttcctccagtcagggacggcgaagggcggaaagcgcaggaggaggcagtgttaggccttaggccgggtgggccgggtcaggagagacgcgcccatctttcgccatccggggtgcgcgaggtcctctcgggacccggccggcgacccgtagctcgggcacgcgcctgtcgcatcccgcaggaaggaggggtccggcctgaggcccggggcggcgtccgccatggagatcccctcggtccaggccggcgcctgggacctggcgggcggccctgaccgccttcctccctgcgcgggctgggtcgcggacgtgcccttcgcggcactcggcctcctctgcgtctccgccttccctgggccgcactgctgcctgggcgcggcggcggcgacggcgccctgttgaatgggctgtgagggcccaggtttaaagcgctggcgaacgcggcctccgggggcgcacggcagctgcagcggtggcgaccaaacgggtgttggagttggcggcggcatggagggcctggctggctatgtatacaaggcggccagcgagggcaaggtgctgactctggccgccttgcttctcaaccggtctgaaagcgacatccgctatctgcttggctatgtcagccagcagggagggcagcgctccacgcccctcatcatcgcagcccgcaatggacacgcaaaggtggtacgcttgctcttagaacattaccgggtgcagactcagcagactggcaccgtccgcttcgacgggtatgtcattgatggtgccactgctctttggtgtgcagctggagcaggacattttgaagttgttaaacttctagtcagccatggagccaacgtgaaccataccacagtaactaattcaacccccctgcgggcagcatgctttgatggcagactggacattgtgaaatacttggttgaaaataatgccaacatcagcattgccaacaaatatgacaacacctgcctaatgattgcggcatataagggacacactgatgtggtcagataccttttagaacaacgtgctgatcccaatgccaaagcacattgtggagccacagcattgcactttgcagctgaagctgggcacatagatattgtgaaagagctgataaaatggcgtgctgctatagtagtgaatggccatgggatgacgccattgaaagtagctgccgaaagctgtaaagctgatgtcgtagaactgttactctctcatgctgattgcgaccgaagaagtcggattgaagctttggaactcttgggtgcctcctttgcaaatgaccgtgagaactatgacatcataaagacataccactatctatatttagccatgttagagaggttccaagatggtgataacattctcgaaaaagaggttcttccaccaatccatgcttatgggaatagaactgaatgtagaaatcctcaggaactggagtccattcggcaagacagagatgctcttcatatggaaggccttatagttcgggaacggattttaggtgctgacaatattgatgtttctcatcccatcatttacagaggagctgtttatgcggataatatggaatttgagcagtgtatcaagttgtggcttcatgccctgcacctcagacaaaaaggtaacaggaacacccacaaggatcttcttcgatttgctcaagttttctcacaaatgatacatttgaatgaaactgtgaaggccccagacatagaatgtgttttgagatgcagtgttttggaaatagaacaaagtatgaacagagtgaaaaatatttcagatgctgatgtccacaatgctatggacaattatgaatgtaatctctatacctttctgtatttagtgtgcatctctaccaaaacacagtgcagcgaagaagatcagtgcaaaattaacaagcagatctacaacctgattcaccttgatcccagaactcgtgaaggtttcaccttgctgcatctggctgtcaactccaatactccagttgatgatttccacaccaatgacgtctgcagctttccaaatgcacttgtcacaaagctcctgctggactgtggtgctgaggtgaatgccgtggacaatgagggaaacagtgcccttcatattatcgttcagtacaacaggcccatcagtgattttttgaccttgcactccatcatcattagcctagttgaagccggagctcacactgacatgacgaataaacagaataagactccgctagacaaaagtacaactggggtatctgaaatactgcttaaaactcaaatgaagatgagtctcaagtgcctggctgcccgagcagttcgggctaatgacattaactaccaagaccagatccccagaactcttgaagagtttgttggatttcattaagtgactggatatgtaaagtcgtttaatgtggtgctaaaaagtaaaggacttttaatcacagacagtagaattatgtgttcataaattctgcttttctttccactacccttcctcccatcccatccttccttagttctgtatttgtttttcttgcctcatggtaattgatttcagacagactttaacaaaaccacattgttttggtgtaactataaggtatttgcatattggttacctatttgtctttcttttttttaaaggaacagatataaaatgttttgtttatgtaacaagggacatttataatttcaagttgataatgttttaaacagctgcttacaaaagtatttctgttaagcctatgtcagcatgttatccatgcagcagttttgaggattttatgaagaaaaagagctaaaaaggaacattaagaggaatgggatatccaggtgttctgcacatgccaaactgctgtagatagtttacactcttccattatttatacggagtgatgcagcacattttagcattcaggaggatttttaaaaaatagctgcagattaatctggaaaatgtgctaatttaataatagttacaaatttataaatttaaatccatttgaaattgttgcattatgctgggtagtatatacaaaatggttatcatcttaaaccaacttttcagagaatcttgatggactctgcctttaggcttgaattcttcaaagtctattttaatgaaatttatctaaattgcagcagtctatttgattcagctcatagacatgtaaaaattatgaatgctgttttcttatgaaacaaattgtcacagtgtagttatacattctatttttgtccccttttccctttttctcctgtatcttttaaaatttggaaactacttttccagaaggcattatttatgcctccctaataaggtattttacttatgacagatgaaaaggaaccaggatatttttgaattttttcactttcttagtctgtgacaagaagtagaaatatcactagtgtggtataggaacttacatgttttttatgatgaaaataattctcaatgccacttgaaaggtaattgtgtctgagagctgcaaatttttcaaccacaaaatgtcacttattcctacaggctatacagaggtctttatggtttttttgttttgttttaatggcaacattgtaactgtcaaactaaaagggtattctgtgattatcttttaagcattacagaaattcaagtgaaagttatatgcttatttctattgatgttaaaaatgataatgaaagcaaaattagctgtatctgtaattttctctctagtgccaaatgaatgccttagctactcatagtgcatggtactgtaagtgaagacctgtagctttttttttttctttaatgaaaagcattataatgatgtagcagcatcagatataaacttaaaaaaaaaggtttcaattaacattttatatatggataatgctttgtaaagtgtaagagaaaggttgcagttggatcagtataaaacaatgaccaagccaaaatcagcaccctagggccttaaataaaatagagataccccacaaaatgaaatattttgaaggatgggaggggacagatattactctaaancgggatcctctagatcgctcgcgcca

SEQ ID NO: 350015 - DNA, 6905 bp, Homo sapiens
cgctcttgcgggagcgttccgcatcgccccgggggcccctacgcgaggatctccggggccgttggcagcgcctggcacttctgagctcggcggacgagagcctgcaggtttcctccagtcagggacggcgaagggcggaaagcgcaggaggaggcagtgttaggccttaggccgggtgggccgggtcaggagagacgcgcccatctttcgccatccggggtgcgcgaggtcctctcgggacccggccggcgacccgtagctcgggcacgcgcctgtcgcatcccgcaggaaggaggggtccggcctgaggcccggggcggcgtccgccatggagatcccctcggtccaggccggcgcctgggacctggcgggcggccctgaccgccttcctccctgcgcgggctgggtcgcggacgtgcccttcgcggcactcggcctcctctgcgtctccgccttccctgggccgcactgctgcctgggcgcggcggcggcgacggcgccctgttgaatgggctgtgagggcccaggtttaaagcgctggcgaacgcggcctccgggggcgcacggcagctgcagcggtggcgaccaaacgggtgttggagttggcggcggcatggagggcctggctggctatgtatacaaggcggccagcgagggcaaggtgctgactctggccgccttgcttctcaaccggtctgaaagcgacatccgctatctgcttggctatgtcagccagcagggagggcagcgctccacgcccctcatcatcgcagcccgcaatggacacgcaaaggtggtacgcttgctcttagaacattaccgggtgcagactcagcagactggcaccgtccgcttcgacgggtatgtcattgatggtgccactgctctttggtgtgcagctggagcaggacattttgaagttgttaaacttctagtcagccatggagccaacgtgaaccataccacagtaactaattcaacccccctgcgggcagcatgctttgatggcagactggacattgtgaaatacttggttgaaaataatgccaacatcagcattgccaacaaatatgacaacacctgcctaatgattgcggcatataagggacacactgatgtggtcagataccttttagaacaacgtgctgatcccaatgccaaagcacattgtggagccacagcattgcactttgcagctgaagctgggcacatagatattgtgaaagagctgataaaatggcgtgctgctatagtagtgaatggccatgggatgacgccattgaaagtagctgccgaaagctgtaaagctgatgtcgtagaactgttactctctcatgctgattgcgaccgaagaagtcggattgaagctttggaactcttgggtgcctcctttgcaaatgaccgtgagaactatgacatcataaagacataccactatctatatttagccatgttagagaggttccaagatggtgataacattctcgaaaaagaggttcttccaccaatccatgcttatgggaatagaactgaatgtagaaatcctcaggaactggagtccattcggcaagacagagatgctcttcatatggaaggccttatagttcgggaacggattttaggtgctgacaatattgatgtttctcatcccatcatttacagaggagctgtttatgcggataatatggaatttgagcagtgtatcaagttgtggcttcatgccctgcacctcagacaaaaagtgtgcatctctaccaaaacacagtgcagcgaagaagatcagtgcaaaattaacaagcagatctacaacctgattcaccttgatcccagaactcgtgaaggtttcaccttgctgcatctggctgtcaactccaatactccagttgatgatttccacaccaatgacgtctgcagctttccaaatgcacttgtcacaaagctcctgctggactgtggtgctgaggtgaatgccgtggacaatgagggaaacagtgcccttcatattatcgttcagtacaacaggcccatcagtgattttttgaccttgcactccatcatcattagcctagttgaagccggagctcacactgacatgacgaataaacagaataagactccgctagacaaaagtacaactggggtatctgaaatactgcttaaaactcaaatgaagatgagtctcaagtgcctggctgcccgagcagttcgggctaatgacattaactaccaagaccagatccccagaactcttgaagagtttgttggatttcattaagtgactggatatgtaaagtcgtttaatgtggtgctaaaaagtaaaggacttttaatcacagacagtagaattatgtgttcataaattctgcttttctttccactacccttcctcccatcccatccttccttagttctgtatttgtttttcttgcctcatggtaattgatttcagacagactttaacaaaaccacattgttttggtgtaactataaggtatttgcatattggttacctatttgtctttcttttttttaaaggaacagatataaaatgttttgtttatgtaacaagggacatttataatttcaagttgataatgttttaaacagctgcttacaaaagtatttctgttaagcctatgtcagcatgttatccatgcagcagttttgaggattttatgaagaaaaagagctaaaaaggaacattaagaggaatgggatatccaggtgttctgcacatgccaaactgctgtagatagtttacactcttccattatttatacggagtgatgcagcacattttagcattcaggaggatttttaaaaaatagctgcagattaatctggaaaatgtgctaatttaataatagttacaaatttataaatttaaatccatttgaaattgttgcattatgctgggtagtatatacaaaatggttatcatcttaaaccaacttttcagagaatcttgatggactctgcctttaggcttgaattcttcaaagtctattttaatgaaatttatctaaattgcagcagtctatttgattcagctcatagacatgtaaaaattatgaatgctgttttcttatgaaacaaattgtcacagtgtagttatacattctatttttgtccccttttccctttttctcctgtatcttttaaaatttggaaactacttttccagaaggcattatttatgcctccctaataaggtattttacttatgacagatgaaaaggaaccaggatatttttgaattttttcactttcttagtctgtgacaagaagtagaaatatcactagtgtggtataggaacttacatgttttttatgatgaaaataattctcaatgccacttgaaaggtaattgtgtctgagagctgcaaatttttcaaccacaaaatgtcacttattcctacaggctatacagaggtctttatggtttttttgttttgttttaatggcaacattgtaactgtcaaactaaaagggtattctgtgattatcttttaagcattacagaaattcaagtgaaagttatatgcttatttctattgatgttaaaaatgataatgaaagcaaaattagctgtatctgtaattttctctctagtgccaaatgaatgccttagctactcatagtgcatggtactgtaagtgaagacctgtagctttttttttttctttaatgaaaagcattataatgatgtagcagcatcagatataaacttaaaaaaaaaggtttcaattaacattttatatatggataatgctttgtaaagtgtaagagaaaggttgcagttggatcagtataaaacaatgaccaagccaaaatcagcaccctagggccttaaataaaatagagataccccacaaaatgaaatattttgaaggatgggaggggacagaaggggggactatcccccaaggatgcaagatactttttacagttgctatcattatactttgtcttcttgcttcagttaggaaggttttgatggtaaattctgtcatggtaatagatacctattttcctaacctgagattttacaaggaaggtttttaggttggcttaaatggaggtatttatttgagtgagccctaatttgaaaattaccagacttgatcctcctggtatgaatcaaggaaatactgtaccttgctcttagcaactctcagtggcctgaaagagaaaatgcacttcttcaaggtgagtgaatcatgctttttccacagttcagatcagaccctttatttttcaaactacaaggcctgcttattggacagtctaaggaatagctttgatacttggtattcagttggttccattattaatgtatattatttttatttaaacatcaaaacttaaaatatcagataatgttgcatgttttaaaaacacatttcatccctttggctacccaggaccagcactatttaagacactgcttatttataaaatgagaataatgattatatgtacatattcagacatcaaaatttaatgacattctattttgagaagggaagacaatgctgaagaaagtaaaactgttgattgaaatgctgacagggtggagaacgaatttgaagacagtggaataaactatgaactatgctaatggtaattagattttttgtttgtttagtatagtggtaaattgtgtagtatcttgctgagaatctaattctatcttgtaaaatcaatccaaatgtgtattgtgaaacacctgtataaaatcatttttgaaataagtgatctacatgcctgtttttttaaaatgtttttggtagaattgtttgaaaatatgtttagccagacccttccccaacttaatttttttttaaaaaaggaaaataggtaagaaaatgatagttctatatctcagccctctgtgaactctaggctgtctccattttgcagccactttggtcatttgatgtttactattggtatacttatgctttgaattgtaaatcttcattgatggtattacagattcaaccaaaacttctctgtcctgttcagtaattgttatataaatctggatgagctagggaggcccaggtggatgttttcattcgcaaatcatgagaaacttaagtgggttttatgcacttgatagagttggcaaaattgaactatgaagttaactatttaactcaaggaatgggcggcaaacccatcccctcgattgataaagaaggggaacatttttacattagaactgacactgaaaacatagctttttcagtccaccctggttgctctagtagcccacagcccaatcacgttaaggttctttgctgtgggaattttaaataaaccaaaccccaaagcagaccatctgtaagctttggtctgcttgtttctgagaagggttttatttcattatactaatagtggactaataattggtaattgtgagaacttaggtatgataacattgtttgaagtaaaatatgatttgggggcagcagctttctaaataccaactctgtttgacaaatgttttgaaaattaaaatttcaagtgagcaacaccctgttaagagttttcactatagttgaggcagctactttatgaataagaccactttgggttatttaagcagaagcgtttcttttttttttttggaatggggtgggatgaggagtgagttgccagacctttgattagtttgctggtttagaaacagccagtggctgaattagtgagtaaatgaatgaaagtataaaggacttgttttttatgatagattttctgtaagaatcttaaatgttccttttcaaattagatgtgttgatgcacacatgactattctgtttttctcactgactatataacattaaaaaggggttaaagaaaacaaaactctgccttttgtgctatgaaatatttttagtccagaggttttaagctgtgtgtccattcctactctgaaaatgcatagctttgttctggatgtcatctcttgaaagtagaaaactcctatgtgtttatcacattgcagggctttcttatgtatttctggcagacttgcccaaatctttagatgggctgggttatacagcatgccctcccccaaataagggatctgaaataaatactacactattgatagtggagatatattaatttttaaaactgtaaagtaaatgtggtctctaggtttgtggtgtgtacctttgtgttaatgtgtagggaagagacagtgacttgatggttatggggagtgtatcttgatgtgtgtataggggtaagtattgctaaattatttacagcttttattcagggtgagtcatgtgatgaatggcctaatcagaaaagtgaaggagcgaagatgcaagcttgccaaatgatgaaatgaacaagattttgtatctattttttatcaggtgttgtaaaatttgtgcatggctttttgttgttgttgcttagtaactggtagaggagaaaagatgaggaaagaaactcagctttcctcacagtcttttcaaaggtacacagttggggagtaaaatctgactggcctaatcgatggaaaagaccctgtccttttcaccccatcctgcaatcctccgtgcagaggaactacactgttgtattctagtaattcactgtgatttataacaaaccggtgatgtcattctattgtgcacttttgtcaaaccatttatgtgactttaataaacatagtaaacttgctgactgcaccagaggtccattagtgatttatatattgcatgacattttctatttgagtttgacatgtagagtcatttttagtttcatggcaattgacagtcctaataactcagctaatttgaaactaacaatcttgctgtgtaaaaggaaaaaatggtgtttgtgttcagtaaatgtttgaaaaaaactaaaatgag

SEQ ID NO: 350016 - DNA, 2201 bp, Homo sapiens
gcggccgcctactactactactactgctcgaattcaagcttctaacgatgtacggggacatgcctgtttttttaaaatgtttttggtagaattgtttgaaaatatgtttagccagacccttccccaacttaatttttttttaaaaaaggaaaataggtaagaaaatgatagttctatatctcagccctctgtgaactctaggctgtctccattttgcagccactttggtcatttgatgtttactattggtatacttatgctttgaattgtaaatcttcattgatggtattacagattcaaccaaaacttctctgtcctgttcagtaattgttatataaatctggatgagctagggaggcccaggtggatgttttcattcgcaaatcatgagaaacttaagtgggttttatgcacttgatagagttggcaaaattgaactatgaagttaactatttaactcaaggaatgggcggcaaacccatcccctcgattgataaagaaggggaacatttttacattagaactgacactgaaaacatagctttttcagtccaccctggttgctctagtagcccacagcccaatcacgttaaggttctttgctgtgggaattttaaataaaccaaaccccaaagcagaccatctgtaagctttggtctgcttgtttctgagaagggttttatttcattatactaatagtggactaataattggtaattgtgagaacttaggtatgataacattgtttgaagtaaaatatgatttgggggcagcagctttctaaataccaactctgtttgacaaatgttttgaaaattaaaatttcaagtgagcaacaccctgttaagagttttcactatagttgaggcagctactttatgaataagaccactttgggttatttaagcagaagcgtttcttttttttttttggaatggggtgggatgaggagtgagttgccagacctttgattagtttgctggtttagaaacagccagtggctgaattagtgagtaaatgaatgaaagtataaaggacttgttttttatgatagattttctgtaagaatcttaaatgttccttttcaaattagatgtgttgatgcacacatgactattctgtttttctcactgactatataacattaaaaaggggttaaagaaaacaaaactctgccttttgtgctatgaaatatttttagtccagaggttttaagctgtgtgtccattcctactctgaaaatgcatagctttgttctggatgtcatctcttgaaagtagaaaactcctatgtgtttatcacattgcagggctttcttatgtatttctggcagacttgcccaaatctttagatgggctgggttatacagcatgccctcccccaaataagggatctgaaataaatactacactattgatagtggagatatattaatttttaaaactgtaaagtaaatgtggtctctaggtttgtggtgtgtacctttgtgttaatgtgtagggaagagacagtgacttgatggttatggggagtgtatcttgatgtgtgtataggggtaagtattgctaaattatttacagcttttattcagggtgagtcatgtgatgaatggcctaatcagaaaagtgaaggagcgaagatgcaagcttgccaaatgatgaaatgaacaagattttgtatctattttttatcaggtgttgtaaaatttgtgcatggctttttgttgttgttgcttagtaactggtagaggagaaaagatgaggaaagaaactcagctttcctcacagtcttttcaaaggtacacagttggggagtaaaatctgactggcctaatcgatggaaaagaccctgtccttttcaccccatcctgcaatcctccgtgcagaggaactacactgttgtattctagtaattcactgtgatttataacaaaccggtgatgtcattctattgtgcacttttgtcaaaccatttatgtgactttaataaacatagtaaacttgctgactgcaccagaggtccattagtgatttatatattgcatgacattttctatttgagtttgacatgtagagtcatttttagtttcatggcaattgacagtcctaataactcagctaatttgaaactaacaatcttgctgtgtaaaaggaaaaaatggtgtttgtgttcagtaaatgtttgaaaaaaactaaaatgag

SEQ ID NO: 350017 - DNA, 536 bp, Homo sapiens
ctaaccccggctcaggggcagaagcaggacccgcaccgtctatagtaaaatagggtggtctccttagcccatcagcttagcgccctcactccgcccccactccctggctggagaccctcagggccgtttaggggccaggaggaggttccaggagtcaaggacattgaggacatccaggcccaaacgggatgggccaactacgcgcagcagaacctttctctaccgggcccgcgtgtgcccgccggtcggcttaggcggagacaccccacttagcgtccctcccgctcccgccctctcctcccggccctgtctgcgaaagctcgtcttcctccccgcccaagttccggcgccgctcttgcgggagcgttccgcatcgccccgggggcccctacgcgaggatctccggggccgttggcagcgcctggcacttctgagctcggcggacgagagcctgcaggtttcctccagtcagggacggcgaagggcggaaagcgcaggaggaggcagtgttaggccttaggccgggtgggccgggt

SEQ ID NO: 350018 - DNA, 7127 bp, Homo sapiens
cgctcttgcgggagcgttccgcatcgccccgggggcccctacgcgaggatctccggggccgttggcagcgcctggcacttctgagctcggcggacgagagcctgcaggtttcctccagtcagggacggcgaagggcggaaagcgcaggaggaggcagtgttaggccttaggccgggtgggccgggtcaggagagacgcgcccatctttcgccatccggggtgcgcgaggtcctctcgggacccggccggcgacccgtagctcgggcacgcgcctgtcgcatcccgcaggaaggaggggtccggcctgaggcccggggcggcgtccgccatggagatcccctcggtccaggccggcgcctgggacctggcgggcggccctgaccgccttcctccctgcgcgggctgggtcgcggacgtgcccttcgcggcactcggcctcctctgcgtctccgccttccctgggccgcactgctgcctgggcgcggcggcggcgacggcgccctgttgaatgggctgtgagggcccaggtttaaagcgctggcgaacgcggcctccgggggcgcacggcagctgcagcggtggcgaccaaacgggtgttggagttggcggcggcatggagggcctggctggctatgtatacaaggcggccagcgagggcaaggtgctgactctggccgccttgcttctcaaccggtctgaaagcgacatccgctatctgcttggctatgtcagccagcagggagggcagcgctccacgcccctcatcatcgcagcccgcaatggacacgcaaaggtggtacgcttgctcttagaacattaccgggtgcagactcagcagactggcaccgtccgcttcgacgggtatgtcattgatggtgccactgctctttggtgtgcagctggagcaggacattttgaagttgttaaacttctagtcagccatggagccaacgtgaaccataccacagtaactaattcaacccccctgcgggcagcatgctttgatggcagactggacattgtgaaatacttggttgaaaataatgccaacatcagcattgccaacaaatatgacaacacctgcctaatgattgcggcatataagggacacactgatgtggtcagataccttttagaacaacgtgctgatcccaatgccaaagcacattgtggagccacagcattgcactttgcagctgaagctgggcacatagatattgtgaaagagctgataaaatggcgtgctgctatagtagtgaatggccatgggatgacgccattgaaagtagctgccgaaagctgtaaagctgatgtcgtagaactgttactctctcatgctgattgcgaccgaagaagtcggattgaagctttggaactcttgggtgcctcctttgcaaatgaccgtgagaactatgacatcataaagacataccactatctatatttagccatgttagagaggttccaagatggtgataacattctcgaaaaagaggttcttccaccaatccatgcttatgggaatagaactgaatgtagaaatcctcaggaactggagtccattcggcaagacagagatgctcttcatatggaaggccttatagttcgggaacggattttaggtgctgacaatattgatgtttctcatcccatcatttacagaggagctgtttatgcggataatatggaatttgagcagtgtatcaagttgtggcttcatgccctgcacctcagacaaaaaggtaacaggaacacccacaaggatcttcttcgatttgctcaagttttctcacaaatgatacatttgaatgaaactgtgaaggccccagacatagaatgtgttttgagatgcagtgttttggaaatagaacaaagtatgaacagagtgaaaaatatttcagatgctgatgtccacaatgctatggacaattatgaatgtaatctctatacctttctgtatttagtgtgcatctctaccaaaacacagtgcagcgaagaagatcagtgcaaaattaacaagcagatctacaacctgattcaccttgatcccagaactcgtgaaggtttcaccttgctgcatctggctgtcaactccaatactccagttgatgatttccacaccaatgacgtctgcagctttccaaatgcacttgtcacaaagctcctgctggactgtggtgctgaggtgaatgccgtggacaatgagggaaacagtgcccttcatattatcgttcagtacaacaggcccatcagtgattttttgaccttgcactccatcatcattagcctagttgaagccggagctcacactgacatgacgaataaacagaataagactccgctagacaaaagtacaactggggtatctgaaatactgcttaaaactcaaatgaagatgagtctcaagtgcctggctgcccgagcagttcgggctaatgacattaactaccaagaccagatccccagaactcttgaagagtttgttggatttcattaagtgactggatatgtaaagtcgtttaatgtggtgctaaaaagtaaaggacttttaatcacagacagtagaattatgtgttcataaattctgcttttctttccactacccttcctcccatcccatccttccttagttctgtatttgtttttcttgcctcatggtaattgatttcagacagactttaacaaaaccacattgttttggtgtaactataaggtatttgcatattggttacctatttgtctttcttttttttaaaggaacagatataaaatgttttgtttatgtaacaagggacatttataatttcaagttgataatgttttaaacagctgcttacaaaagtatttctgttaagcctatgtcagcatgttatccatgcagcagttttgaggattttatgaagaaaaagagctaaaaaggaacattaagaggaatgggatatccaggtgttctgcacatgccaaactgctgtagatagtttacactcttccattatttatacggagtgatgcagcacattttagcattcaggaggatttttaaaaaatagctgcagattaatctggaaaatgtgctaatttaataatagttacaaatttataaatttaaatccatttgaaattgttgcattatgctgggtagtatatacaaaatggttatcatcttaaaccaacttttcagagaatcttgatggactctgcctttaggcttgaattcttcaaagtctattttaatgaaatttatctaaattgcagcagtctatttgattcagctcatagacatgtaaaaattatgaatgctgttttcttatgaaacaaattgtcacagtgtagttatacattctatttttgtccccttttccctttttctcctgtatcttttaaaatttggaaactacttttccagaaggcattatttatgcctccctaataaggtattttacttatgacagatgaaaaggaaccaggatatttttgaattttttcactttcttagtctgtgacaagaagtagaaatatcactagtgtggtataggaacttacatgttttttatgatgaaaataattctcaatgccacttgaaaggtaattgtgtctgagagctgcaaatttttcaaccacaaaatgtcacttattcctacaggctatacagaggtctttatggtttttttgttttgttttaatggcaacattgtaactgtcaaactaaaagggtattctgtgattatcttttaagcattacagaaattcaagtgaaagttatatgcttatttctattgatgttaaaaatgataatgaaagcaaaattagctgtatctgtaattttctctctagtgccaaatgaatgccttagctactcatagtgcatggtactgtaagtgaagacctgtagctttttttttttctttaatgaaaagcattataatgatgtagcagcatcagatataaacttaaaaaaaaaggtttcaattaacattttatatatggataatgctttgtaaagtgtaagagaaaggttgcagttggatcagtataaaacaatgaccaagccaaaatcagcaccctagggccttaaataaaatagagataccccacaaaatgaaatattttgaaggatgggaggggacagaaggggggactatcccccaaggatgcaagatactttttacagttgctatcattatactttgtcttcttgcttcagttaggaaggttttgatggtaaattctgtcatggtaatagatacctattttcctaacctgagattttacaaggaaggtttttaggttggcttaaatggaggtatttatttgagtgagccctaatttgaaaattaccagacttgatcctcctggtatgaatcaaggaaatactgtaccttgctcttagcaactctcagtggcctgaaagagaaaatgcacttcttcaaggtgagtgaatcatgctttttccacagttcagatcagaccctttatttttcaaactacaaggcctgcttattggacagtctaaggaatagctttgatacttggtattcagttggttccattattaatgtatattatttttatttaaacatcaaaacttaaaatatcagataatgttgcatgttttaaaaacacatttcatccctttggctacccaggaccagcactatttaagacactgcttatttataaaatgagaataatgattatatgtacatattcagacatcaaaatttaatgacattctattttgagaagggaagacaatgctgaagaaagtaaaactgttgattgaaatgctgacagggtggagaacgaatttgaagacagtggaataaactatgaactatgctaatggtaattagattttttgtttgtttagtatagtggtaaattgtgtagtatcttgctgagaatctaattctatcttgtaaaatcaatccaaatgtgtattgtgaaacacctgtataaaatcatttttgaaataagtgatctacatgcctgtttttttaaaatgtttttggtagaattgtttgaaaatatgtttagccagacccttccccaacttaatttttttttaaaaaaggaaaataggtaagaaaatgatagttctatatctcagccctctgtgaactctaggctgtctccattttgcagccactttggtcatttgatgtttactattggtatacttatgctttgaattgtaaatcttcattgatggtattacagattcaaccaaaacttctctgtcctgttcagtaattgttatataaatctggatgagctagggaggcccaggtggatgttttcattcgcaaatcatgagaaacttaagtgggttttatgcacttgatagagttggcaaaattgaactatgaagttaactatttaactcaaggaatgggcggcaaacccatcccctcgattgataaagaaggggaacatttttacattagaactgacactgaaaacatagctttttcagtccaccctggttgctctagtagcccacagcccaatcacgttaaggttctttgctgtgggaattttaaataaaccaaaccccaaagcagaccatctgtaagctttggtctgcttgtttctgagaagggttttatttcattatactaatagtggactaataattggtaattgtgagaacttaggtatgataacattgtttgaagtaaaatatgatttgggggcagcagctttctaaataccaactctgtttgacaaatgttttgaaaattaaaatttcaagtgagcaacaccctgttaagagttttcactatagttgaggcagctactttatgaataagaccactttgggttatttaagcagaagcgtttcttttttttttttggaatggggtgggatgaggagtgagttgccagacctttgattagtttgctggtttagaaacagccagtggctgaattagtgagtaaatgaatgaaagtataaaggacttgttttttatgatagattttctgtaagaatcttaaatgttccttttcaaattagatgtgttgatgcacacatgactattctgtttttctcactgactatataacattaaaaaggggttaaagaaaacaaaactctgccttttgtgctatgaaatatttttagtccagaggttttaagctgtgtgtccattcctactctgaaaatgcatagctttgttctggatgtcatctcttgaaagtagaaaactcctatgtgtttatcacattgcagggctttcttatgtatttctggcagacttgcccaaatctttagatgggctgggttatacagcatgccctcccccaaataagggatctgaaataaatactacactattgatagtggagatatattaatttttaaaactgtaaagtaaatgtggtctctaggtttgtggtgtgtacctttgtgttaatgtgtagggaagagacagtgacttgatggttatggggagtgtatcttgatgtgtgtataggggtaagtattgctaaattatttacagcttttattcagggtgagtcatgtgatgaatggcctaatcagaaaagtgaaggagcgaagatgcaagcttgccaaatgatgaaatgaacaagattttgtatctattttttatcaggtgttgtaaaatttgtgcatggctttttgttgttgttgcttagtaactggtagaggagaaaagatgaggaaagaaactcagctttcctcacagtcttttcaaaggtacacagttggggagtaaaatctgactggcctaatcgatggaaaagaccctgtccttttcaccccatcctgcaatcctccgtgcagaggaactacactgttgtattctagtaattcactgtgatttataacaaaccggtgatgtcattctattgtgcacttttgtcaaaccatttatgtgactttaataaacatagtaaacttgctgactgcaccagaggtccattagtgatttatatattgcatgacattttctatttgagtttgacatgtagagtcatttttagtttcatggcaattgacagtcctaataactcagctaatttgaaactaacaatcttgctgtgtaaaaggaaaaaatggtgtttgtgttcagtaaatgtttgaaaaaaactaaaatgag

SEQ ID NO: 350019 - DNA, 6938 bp, Homo sapiens
cgctcttgcgggagcgttccgcatcgccccgggggcccctacgcgaggatctccggggccgttggcagcgcctggcacttctgagctcggcggacgagagcctgcaggtttcctccagtcagggacggcgaagggcggaaagcgcaggaggaggcagtgttaggccttaggccgggtgggccgggtcaggagagacgcgcccatctttcgccatccggggtgcgcgaggtcctctcgggacccggccggcgacccgtagctcgggcacgcgcctgtcgcatcccgcaggaaggaggggtccggcctgaggcccggggcggcgtccgccatggagatcccctcggtccaggccggcgcctgggacctggcgggcggccctgaccgccttcctccctgcgcgggctgggtcgcggacgtgcccttcgcggcactcggcctcctctgcgtctccgccttccctgggccgcactgctgcctgggcgcggcggcggcgacggcgccctgttgaatgggctgtgagggcccaggtttaaagcgctggcgaacgcggcctccgggggcgcacggcagctgcagcggtggcgaccaaacgggtgttggagttggcggcggcatggagggcctggctggctatgtatacaaggcggccagcgagggcaaggtgctgactctggccgccttgcttctcaaccggtctgaaagcgacatccgctatctgcttggctatgtcagccagcagggagggcagcgctccacgcccctcatcatcgcagcccgcaatggacacgcaaaggtggtacgcttgctcttagaacattaccgggtgcagactcagcagactggcaccgtccgcttcgacgggtatgtcattgatggtgccactgctctttggtgtgcagctggagcaggacattttgaagttgttaaacttctagtcagccatggagccaacgtgaaccataccacagtaactaattcaacccccctgcgggcagcatgctttgatggcagactggacattgtgaaatacttggttgaaaataatgccaacatcagcattgccaacaaatatgacaacacctgcctaatgattgcggcatataagggacacactgatgtggtcagataccttttagaacaacgtgctgatcccaatgccaaagcacattgtggagccacagcattgcactttgcagctgaagctgggcacatagatattgtgaaagagctgataaaatggcgtgctgctatagtagtgaatggccatgggatgacgccattgaaagtagctgccgaaagctgtaaagctgatgtcgtagaactgttactctctcatgctgattgcgaccgaagaagtcggattgaagctttggaactcttgggtgcctcctttgcaaatgaccgtgagaactatgacatcataaagacataccactatctatatttagccatgttagagaggttccaagatggtgataacattctcgaaaaagaggttcttccaccaatccatgcttatgggaatagaactgaatgtagaaatcctcaggaactggagtccattcggcaagacagagatgctcttcatatggaaggccttatagttcgggaacggattttaggtgctgacaatattgatgtttctcatcccatcatttacagaggagctgtttatgcggataatatggaatttgagcagtgtatcaagttgtggcttcatgccctgcacctcagacaaaaaggtaacaggaacacccacaaggatcttcttcgatttgctcaagttttctcacaaatgatacatttgaatgaaactgtgaaggccccagacatagaatgtgttttgagatgcagtgttttggaaatagaacaaagtatgaacagagtgaaaaatatttcagatgctgatgtccacaatgctatggacaattatgaatgtaatctctatacctttctgtatttagtgtgcatctctaccaaaacacagtgcagcgaagaagatcagtgcaaaattaacaagcagatctacaacctgattcaccttgatcccagaactcgtgaaggtttcaccttgctgcatctggctgtcaactccaatactccagttgatgatttccacaccaatgacgtctgcagctttccaaatgcacttgtcacaaagctcctgctggactgtggtgctgaggtgaatgccgtggacaatgagggaaacagtgcccttcatattatcgttcagtacaacaggcccatcagtgattttttgaccttgcactccatcatcattagcctagttgaagccggagctcacactgacatgacgaataaacagaataagactccgctagacaaaagtacaactggggtatctgaaatactgcttaaaactcaaatgaagatgagtctcaagtgcctggctgcccgagcagttcgggctaatgacattaactaccaagaccagatccccagaactcttgaagagtttgttggatttcattaagtgactggatatgtaaagtcgtttaatgtggtgctaaaaagtaaaggacttttaatcacagacagtagaattatgtgttcataaattctgcttttctttccactacccttcctcccatcccatccttccttagttctgtatttgtttttcttgcctcatggtaattgatttcagacagactttaacaaaaccacattgttttggtgtaactataaggtatttgcatattggttacctatttgtctttcttttttttaaaggaacagatataaaatgttttgtttatgtaacaagggacatttataatttcaagttgataatgttttaaacagctgcttacaaaagtatttctgttaagcctatgtcagcatgttatccatgcagcagttttgaggattttatgaagaaaaagagctaaaaaggaacattaagaggaatgggatatccaggtgttctgcacatgccaaactgctgtagatagtttacactcttccattatttatacggagtgatgcagcacattttagcattcaggaggatttttaaaaaatagctgcagattaatctggaaaatgtgctaatttaataatagttacaaatttataaatttaaatccatttgaaattgttgcattatgctgggtagtatatacaaaatggttatcatcttaaaccaacttttcagagaatcttgatggactctgcctttaggcttgaattcttcaaagtctattttaatgaaatttatctaaattgcagcagtctatttgattcagctcatagacatgtaaaaattatgaatgctgttttcttatgaaacaaattgtcacagtgtagttatacattctatttttgtccccttttccctttttctcctgtatcttttaaaatttggaaactacttttccagaaggcattatttatgcctccctaataaggtattttacttatgacagatgaaaaggaaccaggatatttttgaattttttcactttcttagtctgtgacaagaagtagaaatatcactagtgtggtataggaacttacatgttttttatgatgaaaataattctcaatgccacttgaaaggtaattgtgtctgagagctgcaaatttttcaaccacaaaatgtcacttattcctacaggctatacagaggtctttatggtttttttgttttgttttaatggcaacattgtaactgtcaaactaaaagggtattctgtgattatcttttaagcattacagaaattcaagtgaaagttatatgcttatttctattgatgttaaaaatgataatgaaagcaaaattagctgtatctgtaattttctctctagtgccaaatgaatgccttagctactcatagtgcatggtactgtaagtgaagacctgtagctttttttttttctttaatgaaaagcattataatgatgtagcagcatcagatataaacttaaaaaaaaaggtttcaattaacattttatatatggataatgctttgtaaagtgtaagagaaaggttgcagttggatcagtataaaacaatgaccaagccaaaatcagcaccctagggccttaaataaaatagagataccccacaaaatgaaatattttgaaggatgggaggggacagaaggggggactatcccccaaggatgcaagatactttttacagttgctatcattatactttgtcttcttgcttcagttaggaaggttttgatggtaaattctgtcatggtaatagatacctattttcctaacctgagattttacaaggaaggtttttaggttggcttaaatggaggtatttatttgagtgagccctaatttgaaaattaccagacttgatcctcctggtatgaatcaaggaaatactgtaccttgctcttagcaactctcagtggcctgaaagagaaaatgcacttcttcaaggtgagtgaatcatgctttttccacagttcagatcagaccctttatttttcaaactacaaggcctgcttattggacagtctaaggaatagctttgatacttggtattcagttggttccattattaatgtatattatttttatttaaacatcaaaacttaaaatatcagataatgttgcatgttttaaaaacacatttcatccctttggctacccaggaccagcactatttaagacactgcttatttataaaatgagaataatgattatatgtacatattcagacatcaaaatttaatgacattctattttgagaagggaagacaatgctgaagaaagtaaaactgttgattgaaatgctgacagggtggagaacgaatttgaagacagtggaataaactatgaactatgctaatggtaattagattttttgtttgtttagtatagtggtaaattgtgtagtatcttgctgagaatctaattctatcttgtaaaatcaatccaaatgtgtattgtgaaacacctgtataaaatcatttttgaaataagtgatctacatgcctgtttttttaaaatgtttttggtagaattgtttgaaaatatgtttagccagacccttccccaacttaatttttttttaaaaaaggaaaataggtaagaaaatgatagttctatatctcagccctctgtgaactctaggctgtctccattttgcagccactttggtcatttgatgtttactattggtatacttatgctttgaattgtaaatcttcattgatggtattacagattcaaccaaaacttctctgtcctgttcagtaattgttatataaatctggatgagctagggaggcccaggtggatgttttcattcgcaaatcatgagaaacttaagtgggttttatgcacttgatagagttggcaaaattgaactatgaagttaactatttaactcaaggaatgggcggcaaacccatcccctcgattgataaagaaggggaacatttttacattagaactgacactgaaaacatagctttttcagtccaccctggttgctctagtagcccacagcccaatcacgttaaggttctttgctgtgggaattttaaataaaccaaaccccaaagcagaccatctgtaagctttggtctgcttgtttctgagaagggttttatttcattatactaatagtggactaataattggtaattgtgagaacttaggtatgataacattgtttgaagtaaaatatgatttgggggcagcagctttctaaataccaactctgtttgacaaatgttttgaaaattaaaatttcaagtgagcaacaccctgttaagagttttcactatagttgaggcagctactttatgaataagaccactttgggttatttaagcagaagcgtttcttttttttttttggaatggggtgggatgaggagtgagttgccagacctttgattagtttgctggtttagaaacagccagtggctgaattagtgagtaaatgaatgaaagtataaaggacttgttttttatgatagattttctgtaagaatcttaaatgttccttttcaaattagatgtgttgatgcacacatgactattctgtttttctcactgactatataacattaaaaaggggttaaagaaaacaaaactctgccttttgtgctatgaaatatttttagtccagaggttttaagctgtgtgtccattcctactctgaaaatgcatagctttgttctggatgtcatctcttgaaagtagaaaactcctatgtgtttatcacattgcagggctttcttatgtatttctggcagacttgcccaaatctttagatgggctgggttatacagcatgccctcccccaaataagggatctgaaataaatactacactattgatagtggagatatattaatttttaaaactgtaaagtaaatgtggtctctaggtttgtggtgtgtacctttgtgttaatgtgtagggaagagacagtgacttgatggttatggggagtgtatcttgatgtgtgtataggggtaagtattgctaaattatttacagcttttattcagggtgagtcatgtgatgaatggcctaatcagaaaagtgaaggagcgaagatgcaagcttgccaaatgatgaaatgaacaagattttgtatctattttttatcaggtgttgtaaaatttgtgcatggctttttgttgttgttgcttagtaactggtagaggagaaaagatgaggaaagaaactcagctttcctcacagtcttttcaaaggtacacagttggggagtaaaatctgactggcctaatcgatggaaaagaccctgtccttttcaccccatcctgcaatcctccgtgcagaggaactacactgttgtattctagtaattcactgtgatttataacaaaccggtgatgtcattctattgtgcacttttgtcaaaccatttatgtgactttaataaacatagtaaacttgctgactgca

SEQ ID NO: 350020 - DNA, 4645 bp, Homo sapiens
cgctcttgcgggagcgttccgcatcgccccgggggcccctacgcgaggatctccggggccgttggcagcgcctggcacttctgagctcggcggacgagagcctgcaggtttcctccagtcagggacggcgaagggcggaaagcgcaggaggaggcagtgttaggccttaggccgggtgggccgggtcaggagagacgcgcccatctttcgccatccggggtgcgcgaggtcctctcgggacccggccggcgacccgtagctcgggcacgcgcctgtcgcatcccgcaggaaggaggggtccggcctgaggcccggggcggcgtccgccatggagatcccctcggtccaggccggcgcctgggacctggcgggcggccctgaccgccttcctccctgcgcgggctgggtcgcggacgtgcccttcgcggcactcggcctcctctgcgtctccgccttccctgggccgcactgctgcctgggcgcggcggcggcgacggcgccctgttgaatgggctgtgagggcccaggtttaaagcgctggcgaacgcggcctccgggggcgcacggcagctgcagcggtggcgaccaaacgggtgttggagttggcggcggcatggagggcctggctggctatgtatacaaggcggccagcgagggcaaggtgctgactctggccgccttgcttctcaaccggtctgaaagcgacatccgctatctgcttggctatgtcagccagcagggagggcagcgctccacgcccctcatcatcgcagcccgcaatggacacgcaaaggtggtacgcttgctcttagaacattaccgggtgcagactcagcagactggcaccgtccgcttcgacgggtatgtcattgatggtgccactgctctttggtgtgcagctggagcaggacattttgaagttgttaaacttctagtcagccatggagccaacgtgaaccataccacagtaactaattcaacccccctgcgggcagcatgctttgatggcagactggacattgtgaaatacttggttgaaaataatgccaacatcagcattgccaacaaatatgacaacacctgcctaatgattgcggcatataagggacacactgatgtggtcagataccttttagaacaacgtgctgatcccaatgccaaagcacattgtggagccacagcattgcactttgcagctgaagctgggcacatagatattgtgaaagagctgataaaatggcgtgctgctatagtagtgaatggccatgggatgacgccattgaaagtagctgccgaaagctgtaaagctgatgtcgtagaactgttactctctcatgctgattgcgaccgaagaagtcggattgaagctttggaactcttgggtgcctcctttgcaaatgaccgtgagaactatgacatcataaagacataccactatctatatttagccatgttagagaggttccaagatggtgataacattctcgaaaaagaggttcttccaccaatccatgcttatgggaatagaactgaatgtagaaatcctcaggaactggagtccattcggcaagacagagatgctcttcatatggaaggccttatagttcgggaacggattttaggtgctgacaatattgatgtttctcatcccatcatttacagaggagctgtttatgcggataatatggaatttgagcagtgtatcaagttgtggcttcatgccctgcacctcagacaaaaaggtaacaggaacacccacaaggatcttcttcgatttgctcaagttttctcacaaatgatacatttgaatgaaactgtgaaggccccagacatagaatgtgttttgagatgcagtgttttggaaatagaacaaagtatgaacagagtgaaaaatatttcagatgctgatgtccacaatgctatggacaattatgaatgtaatctctatacctttctgtatttagtgtgcatctctaccaaaacacagtgcagcgaagaagatcagtgcaaaattaacaagcagatctacaacctgattcaccttgatcccagaactcgtgaaggtttcaccttgctgcatctggctgtcaactccaatactccagttgatgatttccacaccaatgacgtctgcagctttccaaatgcacttgtcacaaagctcctgctggactgtggtgctgaggtgaatgccgtggacaatgagggaaacagtgcccttcatattatcgttcagtacaacaggcccatcagtgattttttgaccttgcactccatcatcattagcctagttgaagccggagctcacactgacatgacgaataaacagaataagactccgctagacaaaagtacaactggggtatctgaaatactgcttaaaactcaaatgaagatgagtctcaagtgcctggctgcccgagcagttcgggctaatgacattaactaccaagaccagatccccagaactcttgaagagtttgttggatttcattaagtgactggatatgtaaagtcgtttaatgtggtgctaaaaagtaaaggacttttaatcacagacagtagaattatgtgttcataaattctgcttttctttccactacccttcctcccatcccatccttccttagttctgtatttgtttttcttgcctcatggtaattgatttcagacagactttaacaaaaccacattgttttggtgtaactataaggtatttgcatattggttacctatttgtctttcttttttttaaaggaacagatataaaatgttttgtttatgtaacaagggacatttataatttcaagttgataatgttttaaacagctgcttacaaaagtatttctgttaagcctatgtcagcatgttatccatgcagcagttttgaggattttatgaagaaaaagagctaaaaaggaacattaagaggaatgggatatccaggtgttctgcacatgccaaactgctgtagatagtttacactcttccattatttatacggagtgatgcagcacattttagcattcaggaggatttttaaaaaatagctgcagattaatctggaaaatgtgctaatttaataatagttacaaatttataaatttaaatccatttgaaattgttgcattatgctgggtagtatatacaaaatggttatcatcttaaaccaacttttcagagaatcttgatggactctgcctttaggcttgaattcttcaaagtctattttaatgaaatttatctaaattgcagcagtctatttgattcagctcatagacatgtaaaaattatgaatgctgttttcttatgaaacaaattgtcacagtgtagttatacattctatttttgtccccttttccctttttctcctgtatcttttaaaatttggaaactacttttccagaaggcattatttatgcctccctaataaggtattttacttatgacagatgaaaaggaaccaggatatttttgaattttttcactttcttagtctgtgacaagaagtagaaatatcactagtgtggtataggaacttacatgttttttatgatgaaaataattctcaatgccacttgaaaggtaattgtgtctgagagctgcaaatttttcaaccacaaaatgtcacttattcctacaggctatacagaggtctttatggtttttttgttttgttttaatggcaacattgtaactgtcaaactaaaagggtattctgtgattatcttttaagcattacagaaattcaagtgaaagttatatgcttatttctattgatgttaaaaatgataatgaaagcaaaattagctgtatctgtaattttctctctagtgccaaatgaatgccttagctactcatagtgcatggtactgtaagtgaagacctgtagctttttttttttctttaatgaaaagcattataatgatgtagcagcatcagatataaacttaaaaaaaaaggtttcaattaacattttatatatggataatgctttgtaaagtgtaagagaaaggttgcagttggatcagtataaaacaatgaccaagccaaaatcagcaccctagggccttaaataaaatagagataccccacaaaatgaaatattttgaaggatgggaggggacagaaggggggactatcccccaaggatgcaagatactttttacagttgctatcattatactttgtcttcttgcttcagttaggaaggttttgatggtaaattctgtcatggtaatagatacctattttcctaacctgagattttacaaggaaggtttttaggttggcttaaatggaggtatttatttgagtgagccctaatttgaaaattaccagacttgatcctcctggtatgaatcaaggaaatactgtaccttgctcttagcaactctcagtggcctgaaagagaaaatgcacttcttcaaggtgagtgaatcatgctttttccacagttcagatcagaccctttatttttcaaactacaaggcctgcttattggacagtctaaggaatagctttgatacttggtattcagttggttccattattaatgtatattatttagtccctgtatgtactatatctcccagatagttgccatggcctttagctgtgtgccacatttgggggatttatcaca

SEQ ID NO: 350021 - DNA, 2334 bp, Homo sapiens
cgctcttgcgggagcgttccgcatcgccccgggggcccctacgcgaggatctccggggccgttggcagcgcctggcacttctgagctcggcggacgagagcctgcaggtttcctccagtcagggacggcgaagggcggaaagcgcaggaggaggcagtgttaggccttaggccgggtgggccgggtcaggagagacgcgcccatctttcgccatccggggtgcgcgaggtcctctcgggacccggccggcgacccgtagctcgggcacgcgcctgtcgcatcccgcaggaaggaggggtccggcctgaggcccggggcggcgtccgccatggagatcccctcggtccaggccggcgcctgggacctggcgggcggccctgaccgccttcctccctgcgcgggctgggtcgcggacgtgcccttcgcggcactcggcctcctctgcgtctccgccttccctgggccgcactgctgcctgggcgcggcggcggcgacggcgccctgttgaatgggctgtgagggcccaggtttaaagcgctggcgaacgcggcctccgggggcgcacggcagctgcagcggtggcgaccaaacgggtgttggagttggcggcggcatggagggcctggctggctatgtatacaaggcggccagcgagggcaaggtgctgactctggccgccttgcttctcaaccggtctgaaagcgacatccgctatctgcttggctatgtcagccagcagggagggcagcgctccacgcccctcatcatcgcagcccgcaatggacacgcaaaggtggtacgcttgctcttagaacattaccgggtgcagactcagcagactggcaccgtccgcttcgacgggtatgtcattgatggtgccactgctctttggtgtgcagctggagcaggacattttgaagttgttaaacttctagtcagccatggagccaacgtgaaccataccacagtaactaattcaacccccctgcgggcagcatgctttgatggcagactggacattgtgaaatacttggttgaaaataatgccaacatcagcattgccaacaaatatgacaacacctgcctaatgattgcggcatataagggacacactgatgtggtcagataccttttagaacaacgtgctgatcccaatgccaaagcacattgtggagccacagcattgcactttgcagctgaagctgggcacatagatattgtgaaagagctgataaaatggcgtgctgctatagtagtgaatggccatgggatgacgccattgaaagtagctgccgaaagctgtaaagctgatgtcgtagaactgttactctctcatgctgattgcgaccgaagaagtcggattgaagctttggaactcttgggtgcctcctttgcaaatgaccgtgagaactatgacatcataaagacataccactatctatatttagccatgttagagaggttccaagatggtgataacattctcgaaaaagaggttcttccaccaatccatgcttatgggaatagaactgaatgtagaaatcctcaggaactggagtccattcggcaagacagagatgctcttcatatggaaggccttatagttcgggaacggattttaggtgctgacaatattgatgtttctcatcccatcatttacagaggagctgtttatgcggataatatggaatttgagcagtgtatcaagttgtggcttcatgccctgcacctcagacaaaaagtgtgcatctctaccaaaacacagtgcagcgaagaagatcagtgcaaaattaacaagcagatctacaacctgattcaccttgatcccagaactcgtgaaggtttcaccttgctgcatctggctgtcaactccaatactccagttgatgatttccacaccaatgacgtctgcagctttccaaatgcacttgtcacaaagctcctgctggactgtggtgctgaggtgaatgccgtggacaatgagggaaacagtgcccttcatattatcgttcagtacaacaggcccatcagtgattttttgaccttgcactccatcatcattagcctagttgaagccggagctcacactgacatgacgaataaacagaataagactccgctagacaaaagtacaactggggtatctgaaatactgcttaaaactcaaatgaagatgagtctcaagtgcctggctgcccgagcagttcgggctaatgacattaactaccaagaccagatccccagaactcttgaagagtttgttggatttcattaagtgactggatatgtaaagtcgtttaatgtggtgctaaaaagtaaaggacttttaatcac

SEQ ID NO: 350022 - DNA, 2271 bp, Homo sapiens
cagcaccaaccagaacttcacaggaaatttattattttttgaaagggctgagggagactttacaagggtctgaagctggtaactagaaagaaagataaataaaatacgaagccagtatgttgtggcaaaattcgagaaaacacactgaaaaaaatctttacagtttaaaactgcttcactttatacataattacaaatgaatatacagcatctgggttttaacccgtcttttttatttaataggatttagcacacaaatgtccatagagcatttggaaacaagcaatgagagcagaggtatccggtgtatcccaaccaccctcctgcggatccccacgcctcccctgcgcatcccatgcgggcagcagcacacaggagaccacaggctaagcctgaaccacaggcagactcaccaggcacgccccatggcctgtgctcatgccctcaggtggtgacgaaaggtaggggaagctcaggccggggaaggtgtggggggtgagtgcttcctgcagaagcccctccggactgcagcacaggtggtcccacctggttgtagggcaggtcactcacttcggtggcaggggacacagccagtggggggttgcacgcctttaacccttagtgagatggagaagtaattcatggcctatcaatcttttgacaattaaattagatgagtacttggaaagatgcctttattttcccttcctcccccccgcctcccttttatggcagcattaaaacacttttcattttaaagcctggccagcaggcagtagattccaaggctctggttaactaggaatgctttgctacattgaaaggaaagttcaaaaccaagcccaaactccctgccctcttctttgtctctgaggatggacgagagcgacggggctggctgggacgcatccataggtggctgcgcacctagacggtcctgctgaaggaaggcaaggcacacagatctccagcagccgctgccccaattccatccacagggttatttctaggctcccacattccaaggacatccaaaacgcagagggtgcacatcgttctgcagtgtctggggtcacctcacagccaccctctttgtgaccacttgaagcccattcaccaggactgtctttctaaactccctcccagggcctgcctggctgtcctctgggcacagctgggccaccatcattagagtaaacctcaactccaatgcaaatactaaaatccttgggaagacctggctacagaaaaagagccctagaaacaaaaatgatgaaatagaaagcacttctgtggacagcaacttctggatcaagttctggcctctaaggttatagtcccaccctctactaaggcagggtctatctagttcaacccttgcatgcactaacacctcccctcccacatcaagaaacaacgccaaaggtctcaaaactttgtgctcacgactaatactgaggcctcaggaaggtaacaaatacgggagaaaatgagcaaaggggcgactctgaatagtattaccctgagacacagaaggggaaaaaagttaagattcgtacctttccaaaaaaaccttggtaaggattcttccccccagatagctctcacgggggtagagggaatactggcaaaggttgaaagtggcagtttgcatgtttttaaccctctccattttctaagaagaaaacacagtcaatacatttgattgtcttgaaaatgaagccaaccgatgagagcatttaaagtgcacatgtcacctaacgacaacgactgagatgactggaattgagagaagacgcagtctccttccaggaagctcactcgattctggaaatctgggggctctggataggaactccatctttcccccaaaacttaagcacagtttcaggcacgtgatttctttagcttgatggagaacatggtgtcccggcgtggaaacagtatggggaattcagtccgagtcaccccaaaaaaacaaccccttctcatgtgatagaaaccaagacaggccattagatccagcaactagagcactgtcaaggccatgagcaaaagcacaggcagccaccatcccaggtaaatccccaggacaggaacaaatccccctgaggacaacttccaaggggggaagagagatgacaaaggtatgtaagcacagttcttggtaagcggttctgttgctgcactgcagactgtattcctggatgaagttgggtggtttgagggaattccgggcactactttgattttaaacttgtccaaccagaa

SEQ ID NO: 350023 - DNA, 378 bp, Homo sapiens
cagcaccaaccagaacttcacaggaaatttattattttttgaaagggctgagggagactttacaagggtctgaagctggtaactagaaagaaagataaataaaatacgaagccagtatgttgtggcaaaattcgagaaaacacactgaaaaaaatctttacagtttaaaactgcttcactttatacataattacaaatgaatatacagcatctgggttttaacccgtcttttttatttaataggatttagcacacaaatgtccatagagcatttggaaacaagcaatgagagcagaggtatccggtgtatcccaaccaccctcctgcggatccccacgcctcccctagcgatgatggggatcctgctagattctcgca

SEQ ID NO: 350024 - DNA, 915 bp, Homo sapiens
ggaccctttagaattcgtcgtggtcgtggaattcgtcgtatggtgacgaaaggtaggggaagctcaggccggggaaggtgtggggggtgagtgcttcctgcagaagcccctccggactgcagcacaggtggtcccacctggttgtagggcaggtcactcacttcggtggcaggggacacagccagtggggggttgcacgccttctttccaaaaaaaccttggtaaggattcttccccccagatagctctcacgggggtagagggaatactggcaaaggttgaaagtggcagtttgcatgtttttaaccctctccattttctaagaagaaaacacagtcaatacatttgattgtcttgaaaatgaagccaaccgatgagagcatttaaagtgcacatgtcacctaacgacaacgactgagatgactggaattgagagaagacgcagtctccttccaggaagctcactcgattctggaaatctgggggctctggataggaactccatctttcccccaaaacttaagcacagtttcaggcacgtgatttctttagcttgatggagaacatggtgtcccggcgtggaaacagtatggggaattcagtccgagtcaccccaaaaaaacaaccccttctcatgtgatagaaaccaagacaggccattagatccagcaactagagcactgtcaaggccatgagcaaaagcacaggcagccaccatcccaggtaaatccccaggacaggaacaaatccccctgaggacaacttccaaggggggaagagagatgacaaaggtatgtaagcacagttcttggtaagcggttctgttgctgcactgcagactgtattcctggatgaagttgggtggtttgagggaattccgggcactactttgattttaaacttgtccaaccagaa

SEQ ID NO: 350025 - DNA, 2221 bp, Homo sapiens
cagcaccaaccagaacttcacaggaaatttattattttttgaaagggctgagggagactttacaagggtctgaagctggtaactagaaagaaagataaataaaatacgaagccagtatgttgtggcaaaattcgagaaaacacactgaaaaaaatctttacagtttaaaactgcttcactttatacataattacaaatgaatatacagcatctgggttttaacccgtcttttttatttaataggatttagcacacaaatgtccatagagcatttggaaacaagcaatgagagcagaggtatccggtgtatcccaaccaccctcctgcggatccccacgcctcccctgcgcatcccatgcgggcagcagcacacaggagaccacaggctaagcctgaaccacaggcagactcaccaggcacgccccatggcctgtgctcatgccctcaggtggtgacgaaaggtaggggaagctcaggccggggaaggtgtggggggtgagtgcttcctgcagaagcccctccggactgcagcacaggtggtcccacctggttgtagggcaggtcactcacttcggtggcaggggacacagccagtggggggttgcacgccttaattaaattagatgagtacttggaaagatgcctttattttcccttcctcccccccgcctcccttttatggcagcattaaaacacttttcattttaaagcctggccagcaggcagtagattccaaggctctggttaactaggaatgctttgctacattgaaaggaaagttcaaaaccaagcccaaactccctgccctcttctttgtctctgaggatggacgagagcgacggggctggctgggacgcatccataggtggctgcgcacctagacggtcctgctgaaggaaggcaaggcacacagatctccagcagccgctgccccaattccatccacagggttatttctaggctcccacattccaaggacatccaaaacgcagagggtgcacatcgttctgcagtgtctggggtcacctcacagccaccctctttgtgaccacttgaagcccattcaccaggactgtctttctaaactccctcccagggcctgcctggctgtcctctgggcacagctgggccaccatcattagagtaaacctcaactccaatgcaaatactaaaatccttgggaagacctggctacagaaaaagagccctagaaacaaaaatgatgaaatagaaagcacttctgtggacagcaacttctggatcaagttctggcctctaaggttatagtcccaccctctactaaggcagggtctatctagttcaacccttgcatgcactaacacctcccctcccacatcaagaaacaacgccaaaggtctcaaaactttgtgctcacgactaatactgaggcctcaggaaggtaacaaatacgggagaaaatgagcaaaggggcgactctgaatagtattaccctgagacacagaaggggaaaaaagttaagattcgtacctttccaaaaaaaccttggtaaggattcttccccccagatagctctcacgggggtagagggaatactggcaaaggttgaaagtggcagtttgcatgtttttaaccctctccattttctaagaagaaaacacagtcaatacatttgattgtcttgaaaatgaagccaaccgatgagagcatttaaagtgcacatgtcacctaacgacaacgactgagatgactggaattgagagaagacgcagtctccttccaggaagctcactcgattctggaaatctgggggctctggataggaactccatctttcccccaaaacttaagcacagtttcaggcacgtgatttctttagcttgatggagaacatggtgtcccggcgtggaaacagtatggggaattcagtccgagtcaccccaaaaaaacaaccccttctcatgtgatagaaaccaagacaggccattagatccagcaactagagcactgtcaaggccatgagcaaaagcacaggcagccaccatcccaggtaaatccccaggacaggaacaaatccccctgaggacaacttccaaggggggaagagagatgacaaaggtatgtaagcacagttcttggtaagcggttctgttgctgcactgcagactgtattcctggatgaagttgggtggtttgagggaattccgggcactactttgattttaaacttgtccaaccagaa

SEQ ID NO: 350026 - DNA, 1172 bp, Homo sapiens
cagcaccaaccagaacttcacaggaaatttattattttttgaaagggctgagggagactttacaagggtctgaagctggtaactagaaagaaagataaataaaatacgaagccagtatgttgtggcaaaattcgagaaaacacactgaaaaaaatctttacagtttaaaactgcttcactttatacataattacaaatgaatatacagcatctgggttttaacccgtcttttttatttaataggatttagcacacaaatgtccatagagcatttggaaacaagcaatgagagcagaggtatccggtgtatcccaaccaccctcctgcggatccccacgcctcccctgcgcatcccatgcgggcagcagcacacaggagaccacaggctaagcctgaaccacaggcagactcaccaggcacgccccatggcctgtgctcatgccctcaggtggtgacgaaaggtaggggaagctcaggccggggaaggtgtggggggtgagtgcttcctgcagaagcccctccggactgcagcacaggtggtcccacctggttgtagggcaggtcactcacttcggtggcaggggacacagccagtggggggttgcacgcctttaacccttagtgagatggagaagtaattcatggcctatcaatcttttgacaattaaattagatgagtacttggaaagatgcctttattttcccttcctcccccccgcctcccttttatggcagcattaaaacacttttcattttaaagcctggccagcaggcagtagattccaaggctctggttaactaggaatgctttgctacattgaaaggaaagttcaaaaccaagcccaaactccctgccctcttctttgtctctgaggatggacgagagcgacggggctggctgggacgcatccataggtggctgcgcacctagacggtcctgctgaaggaaggcaaggcacacagatctccagcagccgctgccccaattccatccacagggttatttctaggctcccacattccaaggacatccaaaacgcagagggtgcacatcgttctgcagtgtctggggtcacctcacagccaccctctttgtgaccatgaggtctcatcatttagcccccacttacagtgagaacatgtggttatgtgtttcctgccatcgacctatg

SEQ ID NO: 350027 - DNA, 2269 bp, Homo sapiens
tttttttttcgcatctttgaaaggatttattgatcacttttgcgcactcgtgctgaggacagggcaggtccagcctggggcctgctccccactgcagcatttccaggcccccagagtgggccgaagggggacatgggcgtgtctttccacattaagtaccaggaaattccgtgagtataaggccttatcttaagtaggacgtgcccaggctgcagcagaacccctgggggtgggggatgaggatttagcacacaaatgtccatagagcatttggaaacaagcaatgagagcagaggtatccggtgtatcccaaccaccctcctgcggatccccacgcctcccctgcgcatcccatgcgggcagcagcacacaggagaccacaggctaagcctgaaccacaggcagactcaccaggcacgccccatggcctgtgctcatgccctcaggtggtgacgaaaggtaggggaagctcaggccggggaaggtgtggggggtgagtgcttcctgcagaagcccctccggactgcagcacaggtggtcccacctggttgtagggcaggtcactcacttcggtggcaggggacacagccagtggggggttgcacgcctttaacccttagtgagatggagaagtaattcatggcctatcaatcttttgacaattaaattagatgagtacttggaaagatgcctttattttcccttcctcccccccgcctcccttttatggcagcattaaaacacttttcattttaaagcctggccagcaggcagtagattccaaggctctggttaactaggaatgctttgctacattgaaaggaaagttcaaaaccaagcccaaactccctgccctcttctttgtctctgaggatggacgagagcgacggggctggctgggacgcatccataggtggctgcgcacctagacggtcctgctgaaggaaggcaaggcacacagatctccagcagccgctgccccaattccatccacagggttatttctaggctcccacattccaaggacatccaaaacgcagagggtgcacatcgttctgcagtgtctggggtcacctcacagccaccctctttgtgaccacttgaagcccattcaccaggactgtctttctaaactccctcccagggcctgcctggctgtcctctgggcacagctgggccaccatcattagagtaaacctcaactccaatgcaaatactaaaatccttgggaagacctggctacagaaaaagagccctagaaacaaaaatgatgaaatagaaagcacttctgtggacagcaacttctggatcaagttctggcctctaaggttatagtcccaccctctactaaggcagggtctatctagttcaacccttgcatgcactaacacctcccctcccacatcaagaaacaacgccaaaggtctcaaaactttgtgctcacgactaatactgaggcctcaggaaggtaacaaatacgggagaaaatgagcaaaggggcgactctgaatagtattaccctgagacacagaaggggaaaaaagttaagattcgtacctttccaaaaaaaccttggtaaggattcttccccccagatagctctcacgggggtagagggaatactggcaaaggttgaaagtggcagtttgcatgtttttaaccctctccattttctaagaagaaaacacagtcaatacatttgattgtcttgaaaatgaagccaaccgatgagagcatttaaagtgcacatgtcacctaacgacaacgactgagatgactggaattgagagaagacgcagtctccttccaggaagctcactcgattctggaaatctgggggctctggataggaactccatctttcccccaaaacttaagcacagtttcaggcacgtgatttctttagcttgatggagaacatggtgtcccggcgtggaaacagtatggggaattcagtccgagtcaccccaaaaaaacaaccccttctcatgtgatagaaaccaagacaggccattagatccagcaactagagcactgtcaaggccatgagcaaaagcacaggcagccaccatcccaggtaaatccccaggacaggaacaaatccccctgaggacaacttccaaggggggaagagagatgacaaaggtatgtaagcacagttcttggtaagcggttctgttgctgcactgcagactgtattcctggatgaagttgggtggtttgagggaattccgggcactactttgattttaaacttgtccaaccagaa

SEQ ID NO: 350028 - DNA, 1010 bp, Homo sapiens
cagcaccaaccagaacttcacaggaaatttattattttttgaaagggctgagggagactttacaagggtctgaagctggtaactagaaagaaagataaataaaatacgaagccagtatgttgtggcaaaattcgagaaaacacactgaaaaaaatctttacagtttaaaactgcttcactttatacataattacaaatgaatatacagcatctgggttttaacccgtcttttttatttaataggatttagcacacaaatgtccatagagcatttggaaacaagcaatgagagcagaggtatccggtgtatcccaaccaccctcctgcggatccccacgcctcccctgcgcatcccatgcgggcagcagcacacaggagaccacaggctaagcctgaaccacaggcagactcaccaggcacgccccatggcctgtgctcatgccctcaggtggtgacgaaaggacctggggccgcccaggaggactggacgctgaggagcagtgggcgtccagtgtaagagacttgtgcacgcggggacagcaggagaggtgggctggccaggatcaggaggcagctgcctcagcagagaggaagagggtcagcagaagatctcttcaccctctgctgatacttctgacgtgggaccatctggaaatgtgaaaaccaagaatgaaaaaaattcagaaaaactgctcctttcattgaacttcctccccatcccaaagtcttctgtaatgcaaacaggcgactggggcttatgggcaattaactcttctgcgcaccggggtttctgaacaaatttggttaataaggttcttaagtgatatccttcactgcctaatgctccctttaacttttaaataatcactagaatttatgaagaggccaggaaaatgtactttttctttaacctcccacacagaaaggagagatcaatcctaaagagaaggattcaggggaaaaagtggtacatgaacagggaggcatttagtggaattcagccgcaggct

SEQ ID NO: 350029 - DNA, 2179 bp, Homo sapiens
ggccccgtcgtacgtgtgcgccagtgtctctgtggcgtctgccgttcggcctctctgtccttctatttctagtgttcagcagttcgttcttctcttctcttcgcctcttgccgtcggctgcgtgttctccgctgtgggtcgtggcgtggtgtcgttgtacctgcttgctgctttgtgtccgcgctcgcctcccggtctgtttccctgtgcgttctgctccgcttgctccgcggcatattggcgcttcttgtgtccttcgtgcctggttgcatctggtcttgttggccttgtgtcttgctttgtctggctgtggtgtctgctgattgagtttgttgtgctgcgcgcgtgtcggtggctgtcgttggggtggtgactgttctggggcatgctgtgcccgagcgcgcgttcgtcgtatggtggtcttcgtgttgcttccggatgttgtctcgtcttggttcgttgtgtccggtgtgtcgcttcggagtgtgttcgtttgctcactgcgctttacgtgcgcggttgagttgtagtgtgtgctgtcgtcgcctgctgctatgctcttgcgtcgtgtctcggcttatgtgtcgtttgccatctatgcctttattttcccttcctcccccccgcctcccttttatggcagcattaaaacacttttcattttaaagcctggccagcaggcagtagattccaaggctctggttaactaggaatgctttgctacattgaaaggaaagttcaaaaccaagcccaaactccctgccctcttctttgtctctgaggatggacgagagcgacggggctggctgggacgcatccataggtggctgcgcacctagacggtcctgctgaaggaaggcaaggcacacagatctccagcagccgctgccccaattccatccacagggttatttctaggctcccacattccaaggacatccaaaacgcagagggtgcacatcgttctgcagtgtctggggtcacctcacagccaccctctttgtgaccacttgaagcccattcaccaggactgtctttctaaactccctcccagggcctgcctggctgtcctctgggcacagctgggccaccatcattagagtaaacctcaactccaatgcaaatactaaaatccttgggaagacctggctacagaaaaagagccctagaaacaaaaatgatgaaatagaaagcacttctgtggacagcaacttctggatcaagttctggcctctaaggttatagtcccaccctctactaaggcagggtctatctagttcaacccttgcatgcactaacacctcccctcccacatcaagaaacaacgccaaaggtctcaaaactttgtgctcacgactaatactgaggcctcaggaaggtaacaaatacgggagaaaatgagcaaaggggcgactctgaatagtattaccctgagacacagaaggggaaaaaagttaagattcgtacctttccaaaaaaaccttggtaaggattcttccccccagatagctctcacgggggtagagggaatactggcaaaggttgaaagtggcagtttgcatgtttttaaccctctccattttctaagaagaaaacacagtcaatacatttgattgtcttgaaaatgaagccaaccgatgagagcatttaaagtgcacatgtcacctaacgacaacgactgagatgactggaattgagagaagacgcagtctccttccaggaagctcactcgattctggaaatctgggggctctggataggaactccatctttcccccaaaacttaagcacagtttcaggcacgtgatttctttagcttgatggagaacatggtgtcccggcgtggaaacagtatggggaattcagtccgagtcaccccaaaaaaacaaccccttctcatgtgatagaaaccaagacaggccattagatccagcaactagagcactgtcaaggccatgagcaaaagcacaggcagccaccatcccaggtaaatccccaggacaggaacaaatccccctgaggacaacttccaaggggggaagagagatgacaaaggtatgtaagcacagttcttggtaagcggttctgttgctgcactgcagactgtattcctggatgaagttgggtggtttgagggaattccgggcactactttgattttaaacttgtccaaccagaa

SEQ ID NO: 350030 - DNA, 2690 bp, Homo sapiens
ggatcctaggatgcttacatgcaatgatgaacccgaaaacacttgtaaagtgctacgtaaatattgatcacgaagaaggaagtcctcttcccgcctggagactgtgtggggtatggcggcgtggtggagagaatgtggtgtcttgttccaccctcctggagaggggagggcctggcctggaccgcagaggaatcgagtgactgcccctaaaatctcctagaaccgatcccgtggacccgtccctcccgagggtcccgcccctcccgtggtccgtcagcctctgccgcggagctgcgtccgccactcatgtttctccgagcaggcctggccgcgctctccccgcttcttcgcagtcttcggccctctcctgtcgccgccatgagcactggcaccttcgtcgtgtcgcagccgctcaattaccgcggcggggcccgcgtggagccggcggacgcctccggtaccgagaaagctttcgagccagcaaccggccgagtgatagctactttcacatgttcaggagaaaaggaagtaaatttggctgttcaaaatgcaaaggctgcttttaaaatatggagtcaaaaatctggcatggagcgttgccgaatccttttggaggctgccaggataataagggaacgggaggatgaaattgctactatggagtgcatcaacaatggcaagtccatctttgaggcccgcttggacattgacatttcctggcagtgcctggagtattatgcgggcttggctgcatccatggctggtgaacacatccagctcccaggtggatcgtttggttataccagaagagaaccacttggggtatgtgtgggaataggagcatggaactacccctttcagattgcctcttggaagtcggctccagcattagcctgtggtaatgccatggtctttaaaccttctccctttacacctgtttctgcattgctactggctgaaatctacagtgaggctggtgtacctcctgggctcttcaatgtggtgcagggaggggctgccacaggccagtttctgtgtcagcatcccgatgtggccaaagtctccttcactggaagtgtgcccactggcatgaagatcatggagatgtcagctaaaggaatcaaacctgttaccttggaacttggaggcaaatctccactcatcatcttctcagactgtgatatgaacaatgctgtaaagggggcgctgatggccaacttcctcacacaaggccaggtttgctgtaatggcacaagagtatttgtgcagaaagaaattcttgataaatttacagaggaagtggtgaaacagacccaaaggattaaaattggagatccccttctggaagatacaaggatgggtccactcatcaaccgaccacacctggagcgagtccttgggtttgtcaaagtggcaaaggagcagggtgctaaagtgttatgtggtggagatatatatgtacctgaagatcccaaattaaaggatggatattacatgagaccttgtgtattaactaattgcagagacgacatgacctgtgtgaaggaagagatctttgggcctgttatgtccattttatcatttgacactgaagctgaggttctagaaagagccaatgataccacttttggactagcagctggcgtctttaccagggacatccaacgggctcatagagtggtagctgagcttcaggctgggacgtgcttcattaacaactataacgtcagcccagtggagttgccctttggtggatataagaagtcaggatttggcagagagaacggccgtgtgacaatcgaatattattcacagctgaagactgtgtgtgtggagatgggtgatgtggaatctgctttttgaaaacctgcagtgaaacctattgacatggccacgctgtggaatgatgtgaattggccctgtttacagaggcagtacaactgaatgttattttacatccagaattttggcgttcagtataagagaatggttcatgttactctttctctctccatcagcttcctcactgaaaatgtgcattaagtgccttgtagatactaatcaagaaagctgtgattctcctcaaagcgtatttttgtgaaatcttttaagagccagtaacatacttctagagaacaggaaaagagactaggataatacatcttccacacatttggcccactgataatgttaattctctggcgtatttcaaagaacttgttcctggctgatccaagtgcagtggtatttacaactaattgatcacaaccagtttgtagatttctttgttccttctccattcccactgcttcacttgcctagtcttgaagaaaaaaaacaaaaaacaaaaaaaaaccttgttcctttataggttcctggtagaatcagtagagatgatttcagctcattgacatttttttaagctatatccccttgtcattccattgagaaagctgacaactgggatagggaggggattagataatagatggggtcaaattctgtgtgaatgtgaacttgcctagtaagcactttgtctctgttcactactgcgatagaggaaatctatctccctatcttgggtccttgaactacagcctgctgtcttacaccagtggagctaccctttaaatgtacaaattatttgtatgctaatgtaatatggtgaaattaaaataaatcacactgtt

SEQ ID NO: 350031 - DNA, 2765 bp, Homo sapiens
  misc_feature (2699)..(2699): n is a, c, g, or t
ggatcctaggatgcttacatgcaatgatgaacccgaaaacacttgtaaagtgctacgtaaatattgatcacgaagaaggaagtcctcttcccgcctggagactgtgtggggtatggcggcgtggtggagagaatgtggtgtcttgttccaccctcctggagaggggagggcctggcctggaccgcagaggaatcgagtgactgcccctaaaatctcctagaaccgatcccgtggacccgtccctcccgagggtcccgcccctcccgtggtccgtcagcctctgccgcggagctgcgtccgccactcatgtttctccgagcaggcctggccgcgctctccccgcttcttcgcagtcttcggccctctcctgtcgccgccatgagcactggcaccttcgtcgtgtcgcagccgctcaattaccgcggcggggcccgcgtggagccggcggacgcctccggtaccgagaaagctttcgagccagcaaccggccgagtgatagctactttcacatgttcaggagaaaaggaagtaaatttggctgttcaaaatgcaaaggctgcttttaaaatatggagtcaaaaatctggcatggagcgttgccgaatccttttggaggctgccaggataataagggaacgggaggatgaaattgctactatggagtgcatcaacaatggcaagtccatctttgaggcccgcttggacattgacatttcctggcagtgcctggagtattatgcgggcttggctgcatccatggctggtgaacacatccagctcccaggtggatcgtttggttataccagaagagaaccacttggggtatgtgtgggaataggagcatggaactacccctttcagattgcctcttggaagtcggctccagcattagcctgtggtaatgccatggtctttaaaccttctccctttacacctgtttctgcattgctactggctgaaatctacagtgaggctggtgtacctcctgggctcttcaatgtggtgcagggaggggctgccacaggccagtttctgtgtcagcatcccgatgtggccaaagtctccttcactggaagtgtgcccactggcatgaagatcatggagatgtcagctaaaggaatcaaacctgttaccttggaacttggaggcaaatctccactcatcatcttctcagactgtgatatgaacaatgctgtaaagggggcgctgatggccaacttcctcacacaaggccaggtttgctgtaatggcacaagagtatttgtgcagaaagaaattcttgataaatttacagaggaagtggtgaaacagacccaaaggattaaaattggagatccccttctggaagatacaaggatgggtccactcatcaaccgaccacacctggagcgagtccttgggtttgtcaaagtggcaaaggagcagggtgctaaagtgttatgtggtggagatatatatgtacctgaagatcccaaattaaaggatggatattacatgagaccttgtgtattaactaattgcagagacgacatgacctgtgtgaaggaagagatctttgggcctgttatgtccattttatcatttgacactgaagctgaggttctagaaagagccaatgataccacttttggactagcagctggcgtctttaccagggacatccaacgggctcatagagtggtagctgagcttcaggctgggacgtgcttcattaacaactataacgtcagcccagtggagttgccctttggtggatataagaagtcaggatttggcagagagaacggccgtgtgacaatcgaatattattcacagctgaagactgtgtgtgtggagatgggtgatgtggaatctgctttttgaaaacctgcagtgaaacctattgacatggccacgctgtggaatgatgtgaattggccctgtttacagaggcagtacaactgaatgttattttacatccagaattttggcgttcagtataagagaatggttcatgttactctttctctctccatcagcttcctcactgaaaatgtgcattaagtgccttgtagatactaatcaagaaagctgtgattctcctcaaagcgtatttttgtgaaatcttttaagagccagtaacatacttctagagaacaggaaaagagactaggataatacatcttccacacatttggcccactgataatgttaattctctggcgtatttcaaagaacttgttcctggctgatccaagtgcagtggtatttacaactaattgatcacaaccagtttgtagatttctttgttccttctccattcccactgcttcacttgcctagtcttgaagaaaaaaaacaaaaaacaaaaaaaaaccttgttcctttataggttcctggtagaatcagtagagatgatttcagctcattgacatttttttaagctatatccccttgtcattccattgagaaagctgacaactgggatagggaggggattagataatagatggggtcaaattctgtgtgaatgtgaacttgcctagtaagcactttgtctctgttcactactgcgatagaggaaatctatctccctatcttgggtccttgaactacagcctgctgtcttacaccagtggagctaccctttaaatgtacaaattatttgtatgctaatgtaatatggtgaaattaaaataaatcacactgtttaacaaaanaaacaacacacacaaaccaaaaacaaaacaaatacaacacaaaaccacaacaaccccagagagggg

SEQ ID NO: 350032 - DNA, 2478 bp, Homo sapiens
ggatcctaggatgcttacatgcaatgatgaacccgaaaacacttgtaaagtgctacgtaaatattgatcacgaagaaggaagtcctcttcccgcctggagactgtgtggggtatggcggcgtggtggagagaatgtggtgtcttgttccaccctcctggagaggggagggcctggcctggaccgcagaggaatcgagtgactgcccctaaaatctcctagaaccgatcccgtggacccgtccctcccgagggtcccgcccctcccgtggtccgtcagcctctgccgcggagctgcgtccgccactcatgtttctccgagcaggcctggccgcgctctccccgcttcttcgcagtcttcggccctctcctgtcgccgccatgagcactggcaccttcgtcgtgtcgcagccgctcaattaccgcggcggggcccgcgtggagccggcggacgcctccggtaccgagaaagctttcgagccagcaaccggccgagtgatagctactttcacatgttcaggagaaaaggaagtaaatttggctgttcaaaatgcaaaggctgcttttaaaatatggagtcaaaaatctggcatggagcgttgccgaatccttttggaggctgccaggataataagggaactacccctttcagattgcctcttggaagtcggctccagcattagcctgtggtaatgccatggtctttaaaccttctccctttacacctgtttctgcattgctactggctgaaatctacagtgaggctggtgtacctcctgggctcttcaatgtggtgcagggaggggctgccacaggccagtttctgtgtcagcatcccgatgtggccaaagtctccttcactggaagtgtgcccactggcatgaagatcatggagatgtcagctaaaggaatcaaacctgttaccttggaacttggaggcaaatctccactcatcatcttctcagactgtgatatgaacaatgctgtaaagggggcgctgatggccaacttcctcacacaaggccaggtttgctgtaatggcacaagagtatttgtgcagaaagaaattcttgataaatttacagaggaagtggtgaaacagacccaaaggattaaaattggagatccccttctggaagatacaaggatgggtccactcatcaaccgaccacacctggagcgagtccttgggtttgtcaaagtggcaaaggagcagggtgctaaagtgttatgtggtggagatatatatgtacctgaagatcccaaattaaaggatggatattacatgagaccttgtgtattaactaattgcagagacgacatgacctgtgtgaaggaagagatctttgggcctgttatgtccattttatcatttgacactgaagctgaggttctagaaagagccaatgataccacttttggactagcagctggcgtctttaccagggacatccaacgggctcatagagtggtagctgagcttcaggctgggacgtgcttcattaacaactataacgtcagcccagtggagttgccctttggtggatataagaagtcaggatttggcagagagaacggccgtgtgacaatcgaatattattcacagctgaagactgtgtgtgtggagatgggtgatgtggaatctgctttttgaaaacctgcagtgaaacctattgacatggccacgctgtggaatgatgtgaattggccctgtttacagaggcagtacaactgaatgttattttacatccagaattttggcgttcagtataagagaatggttcatgttactctttctctctccatcagcttcctcactgaaaatgtgcattaagtgccttgtagatactaatcaagaaagctgtgattctcctcaaagcgtatttttgtgaaatcttttaagagccagtaacatacttctagagaacaggaaaagagactaggataatacatcttccacacatttggcccactgataatgttaattctctggcgtatttcaaagaacttgttcctggctgatccaagtgcagtggtatttacaactaattgatcacaaccagtttgtagatttctttgttccttctccattcccactgcttcacttgcctagtcttgaagaaaaaaaacaaaaaacaaaaaaaaaccttgttcctttataggttcctggtagaatcagtagagatgatttcagctcattgacatttttttaagctatatccccttgtcattccattgagaaagctgacaactgggatagggaggggattagataatagatggggtcaaattctgtgtgaatgtgaacttgcctagtaagcactttgtctctgttcactactgcgatagaggaaatctatctccctatcttgggtccttgaactacagcctgctgtcttacaccagtggagctaccctttaaatgtacaaattatttgtatgctaatgtaatatggtgaaattaaaataaatcacactgtt

SEQ ID NO: 350033 - DNA, 2616 bp, Homo sapiens
ggatcctaggatgcttacatgcaatgatgaacccgaaaacacttgtaaagtgctacgtaaatattgatcacgaagaaggaagtcctcttcccgcctggagactgtgtggggtatggcggcgtggtggagagaatgtggtgtcttgttccaccctcctggagaggggagggcctggcctggaccgcagaggaatcgagtgactgcccctaaaatctcctagaaccgatcccgtggacccgtccctcccgagggtcccgcccctcccgtggtccgtcagcctctgccgcggagctgcgtccgccactcatgtttctccgagcaggcctggccgcgctctccccgcttcttcgcagtcttcggccctctcctgtcgccgccatgagcactggcaccttcgtcgtgtcgcagccgctcaattaccgcggcggggcccgcgtggagccggcggacgcctccggtaccgagaaagctttcgagccagcaaccggccgagtgatagctactttcacatgttcaggagaaaaggaagtaaatttggctgttcaaaatgcaaaggctgcttttaaaatatggagtcaaaaatctggcatggagcgttgccgaatccttttggaggctgccaggataataagggaacgggaggatgaaattgctactatggagtgcatcaacaatggcaagtccatctttgaggcccgcttggacattgacatttcctggcagtgcctggagtattatgcgggcttggctgcatccatggctggtgaacacatccagctcccaggtggatcgtttggttataccagaagagaaccacttggggtatgtgtgggaataggagcatggaactacccctttcagattgcctcttggaagtcggctccagcattagcctgtggctggtgtacctcctgggctcttcaatgtggtgcagggaggggctgccacaggccagtttctgtgtcagcatcccgatgtggccaaagtctccttcactggaagtgtgcccactggcatgaagatcatggagatgtcagctaaaggaatcaaacctgttaccttggaacttggaggcaaatctccactcatcatcttctcagactgtgatatgaacaatgctgtaaagggggcgctgatggccaacttcctcacacaaggccaggtttgctgtaatggcacaagagtatttgtgcagaaagaaattcttgataaatttacagaggaagtggtgaaacagacccaaaggattaaaattggagatccccttctggaagatacaaggatgggtccactcatcaaccgaccacacctggagcgagtccttgggtttgtcaaagtggcaaaggagcagggtgctaaagtgttatgtggtggagatatatatgtacctgaagatcccaaattaaaggatggatattacatgagaccttgtgtattaactaattgcagagacgacatgacctgtgtgaaggaagagatctttgggcctgttatgtccattttatcatttgacactgaagctgaggttctagaaagagccaatgataccacttttggactagcagctggcgtctttaccagggacatccaacgggctcatagagtggtagctgagcttcaggctgggacgtgcttcattaacaactataacgtcagcccagtggagttgccctttggtggatataagaagtcaggatttggcagagagaacggccgtgtgacaatcgaatattattcacagctgaagactgtgtgtgtggagatgggtgatgtggaatctgctttttgaaaacctgcagtgaaacctattgacatggccacgctgtggaatgatgtgaattggccctgtttacagaggcagtacaactgaatgttattttacatccagaattttggcgttcagtataagagaatggttcatgttactctttctctctccatcagcttcctcactgaaaatgtgcattaagtgccttgtagatactaatcaagaaagctgtgattctcctcaaagcgtatttttgtgaaatcttttaagagccagtaacatacttctagagaacaggaaaagagactaggataatacatcttccacacatttggcccactgataatgttaattctctggcgtatttcaaagaacttgttcctggctgatccaagtgcagtggtatttacaactaattgatcacaaccagtttgtagatttctttgttccttctccattcccactgcttcacttgcctagtcttgaagaaaaaaaacaaaaaacaaaaaaaaaccttgttcctttataggttcctggtagaatcagtagagatgatttcagctcattgacatttttttaagctatatccccttgtcattccattgagaaagctgacaactgggatagggaggggattagataatagatggggtcaaattctgtgtgaatgtgaacttgcctagtaagcactttgtctctgttcactactgcgatagaggaaatctatctccctatcttgggtccttgaactacagcctgctgtcttacaccagtggagctaccctttaaatgtacaaattatttgtatgctaatgtaatatggtgaaattaaaataaatcacactgtt

SEQ ID NO: 350034 - DNA, 1007 bp, Homo sapiens
  misc_feature (69)..(69): n is a, c, g, or t
aacttacaaacaaaaataccgtaataataaacccaaacaaagaccctcagcttgctgccacgtcctctntgcgtttcaaacgcaggatttggcagagagaacggccgtgtgacaatcgaatattattcacagctgaagactgtgtgtgtggagatgggtgatgtggaatctgctttttgaaaacctgcagtgaaacctattgacatggccacgctgtggaatgatgtgaattggccctgtttacagaggcagtacaactgaatgttattttacatccagaattttggcgttcagtataagagaatggttcatgttactctttctctctccatcagcttcctcactgaaaatgtgcattaagtgccttgtagatactaatcaagaaagctgtgattctcctcaaagcgtatttttgtgaaatcttttaagagccagtaacatacttctagagaacaggaaaagagactaggataatacatcttccacacatttggcccactgataatgttaattctctggcgtatttcaaagaacttgttcctggctgatccaagtgcagtggtatttacaactaattgatcacaaccagtttgtagatttctttgttccttctccattcccactgcttcacttgcctagtcttgaagaaaaaaaacaaaaaacaaaaaaaaaccttgttcctttataggttcctggtagaatcagtagagatgatttcagctcattgacatttttttaagctatatccccttgtcattccattgagaaagctgacaactgggatagggaggggattagataatagatggggtcaaattctgtgtgaatgtgaacttgcctagtaagcactttgtctctgttcactactgcgatagaggaaatctatctccctatcttgggtccttgaactacagcctgctgtcttacaccagtggagctaccctttaaatgtacaaattatttgtatgctaatgtaatatggtgaaattaaaataaatcacactgtt

SEQ ID NO: 350035 - DNA, 1174 bp, Homo sapiens
gagatcacgccactgaactccagcctgggtgacagagcgagactctgtctcaaaaaaaaaaaaattggccgggcgcggtggctcacgcctgtaatcccagcactttgggaggccgaggcgggcggatcacgaggtcaggagatcgagaacatcccggctaaaacggtgaaaccccgttccataccattccatcccgttccattccattccattccattgcattccattctctctccactcccgggagtggaggatttggcagagagaacggccgtgtgacaatcgaatattattcacagctgaagactgtgtgtgtggagatgggtgatgtggaatctgctttttgaaaacctgcagtgaaacctattgacatggccacgctgtggaatgatgtgaattggccctgtttacagaggcagtacaactgaatgttattttacatccagaattttggcgttcagtataagagaatggttcatgttactctttctctctccatcagcttcctcactgaaaatgtgcattaagtgccttgtagatactaatcaagaaagctgtgattctcctcaaagcgtatttttgtgaaatcttttaagagccagtaacatacttctagagaacaggaaaagagactaggataatacatcttccacacatttggcccactgataatgttaattctctggcgtatttcaaagaacttgttcctggctgatccaagtgcagtggtatttacaactaattgatcacaaccagtttgtagatttctttgttccttctccattcccactgcttcacttgcctagtcttgaagaaaaaaaacaaaaaacaaaaaaaaaccttgttcctttataggttcctggtagaatcagtagagatgatttcagctcattgacatttttttaagctatatccccttgtcattccattgagaaagctgacaactgggatagggaggggattagataatagatggggtcaaattctgtgtgaatgtgaacttgcctagtaagcactttgtctctgttcactactgcgatagaggaaatctatctccctatcttgggtccttgaactacagcctgctgtcttacaccagtggagctaccctttaaatgtacaaattatttgtatgctaatgtaatatggtgaaattaaaataaatcacactgtt

SEQ ID NO: 350036 - DNA, 1765 bp, Homo sapiens
ggatcctaggatgcttacatgcaatgatgaacccgaaaacacttgtaaagtgctacgtaaatattgatcacgaagaaggaagtcctcttcccgcctggagactgtgtggggtatggcggcgtggtggagagaatgtggtgtcttgttccaccctcctggagaggggagggcctggcctggaccgcagaggaatcgagtgactgcccctaaaatctcctagaaccgatcccgtggacccgtccctcccgagggtcccgcccctcccgtggtccgtcagcctctgccgcggagctgcgtccgccactcatgtttctccgagcaggcctggccgcgctctccccgcttcttcgcagtcttcggccctctcctgtcgccgccatgagcactggcaccttcgtcgtgtcgcagccgctcaattaccgcggcggggcccgcgtggagccggcggacgcctccggtaccgagaaagctttcgagccagcaaccggccgagtgatagctactttcacatgttcaggagaaaaggaagtaaatttggctgttcaaaatgcaaaggctgcttttaaaatatggagtcaaaaatctggcatggagcgttgccgaatccttttggaggctgccaggataataagggaacgggaggatgaaattgctactatggagtgcatcaacaatggcaagtccatctttgaggcccgcttggacattgacatttcctggcagtgcctggagtattatgcgggcttggctgcatccatggctggtgaacacatccagctcccaggtggatcgtttggttataccagaagagaaccacttggggtatgtgtgggaataggagcatggaactacccctttcagattgcctcttggaagtcggctccagcattagcctgtggtaatgccatggtctttaaaccttctccctttacacctgtttctgcattgctactggctgaaatctacagtgaggctggtgtacctcctgggctcttcaatgtggtgcagggaggggctgccacaggccagtttctgtgtcagcatcccgatgtggccaaagtctccttcactggaagtgtgcccactggcatgaagatcatggagatgtcagctaaaggaatcaaacctgttaccttggaacttggaggcaaatctccactcatcatcttctcagactgtgatatgaacaatgctgtaaagggggcgctgatggccaacttcctcacacaaggccaggtttgctgtaatggcacaagagtatttgtgcagaaagaaattcttgataaatttacagaggaagtggtgaaacagacccaaaggattaaaattggagatccccttctggaagatacaaggatgggtccactcatcaaccgaccacacctggagcgagtccttgggtttgtcaaagtggcaaaggagcagggtgctaaagtgttatgtggtggagatatatatgtacctgaagatcccaaattaaaggatggatattacatgagaccttgtgtattaagtatgtcctctttttgtttgcttttagatgatttgaattaaatactgaatagatagagatgaatatttataaaatatgtacatgatataaagcaagggctggcaaattatgtggtcctactacccaagtttaagaagtagaactgctccattatctttgaagccttctgtgtgcccctcctttagggcacccatatgtattagtttatccaggaccacaactattgttctggaagcaaggagctcaaaaata

SEQ ID NO: 350037 - DNA, 1166 bp, Homo sapiens
ggatcctaggatgcttacatgcaatgatgaacccgaaaacacttgtaaagtgctacgtaaatattgatcacgaagaaggaagtcctcttcccgcctggagactgtgtggggtatggcggcgtggtggagagaatgtggtgtcttgttccaccctcctggagaggggagggcctggcctggaccgcagaggaatcgagtgactgcccctaaaatctcctagaaccgatcccgtggacccgtccctcccgagggtcccgcccctcccgtggtccgtcagcctctgccgcggagctgcgtccgccactcatgtttctccgagcaggcctggccgcgctctccccgcttcttcgcagtcttcggccctctcctgtcgccgccatgagcactggcaccttcgtcgtgtcgcagccgctcaattaccgcggcggggcccgcgtggagccggcggacgcctccggtaccgagaaagctttcgagccagcaaccggccgagtgatagctactttcacatgttcaggagaaaaggaagtaaatttggctgttcaaaatgcaaaggctgcttttaaaatatggagtcaaaaatctggcatggagcgttgccgaatccttttggaggctgccaggataataagggaacgggaggatgaaattgctactatggagtgcatcaacaatggcaagtccatctttgaggcccgcttggacattgacatttcctggcagtgcctggagtattatgcgggcttggctgcatccatggctggtgaacacatccagctcccaggtggatcgtttggttataccagaagagaaccacttggggtatgtgtgggaataggagcatggaactacccctttcagattgcctcttggaagtcggctccagcattagcctgtggtaatgccatggtctttaaaccttctccctttacacctgtttctgcattgctactggctgaaatctacagtgaggctggtgtacctcctgggctcttcaatgtggtgcagggaggggctgccacaggccagtttctgtgtcagcatcccgatgtggccaaagtctccttcactggagtggtgaacagacccaaggattaaattgggatcccttctggagatacaggatggtccctcatcaccgccacactggacatcttggttttcaa

SEQ ID NO: 350038 - DNA, 278 bp, Homo sapiens
ctcggtacccagcgctgagccataccattccattgagaaagctgacaactgggatagggaggggattagataatagatggggtcaaattctgtgtgaatgtgaacttgcctagtaagcactttgtctctgttcactactgcgatagaggaaatctatctccctatcttgggtccttgaactacagcctgctgtcttacaccagtggagctaccctttaaatgtacaaattatttgtatgctaatgtaatatggtgaaattaaaataaatcacactgtt

SEQ ID NO: 350039 - DNA, 1011 bp, Homo sapiens
  misc_feature (858)..(859): n is a, c, g, or t
  misc_feature (947)..(947): n is a, c, g, or t
  misc_feature (986)..(986): n is a, c, g, or t
ggatcctaggatgcttacatgcaatgatgaacccgaaaacacttgtaaagtgctacgtaaatattgatcacgaagaaggaagtcctcttcccgcctggagactgtgtggggtatggcggcgtggtggagagaatgtggtgtcttgttccaccctcctggagaggggagggcctggcctggaccgcagaggaatcgagtgactgcccctaaaatctcctagaaccgatcccgtggacccgtccctcccgagggtcccgcccctcccgtggtccgtcagcctctgccgcggagctgcgtccgccactcatgtttctccgagcaggcctggccgcgctctccccgcttcttcgcagtcttcggccctctcctgtcgccgccatgagcactggcaccttcgtcgtgtcgcagccgctcaattaccgcggcggggcccgcgtggagccggcggacgcctccggtaccgagaaagctttcgagccagcaaccggccgagtgatagctactttcacatgttcaggagaaaaggaagtaaatttggctgttcaaaatgcaaaggctgcttttaaaatatggagtcaagaacgggaggatgaaattgctactatggagtgcatcaacaatggcaagtccatctttgaggcccgcttggacattgacatttcctggcagtgcctggagtattatgcgggcttggctgcatccatggctggtgaacacatccagctcccaggtggatcgtttggttataccagaagagaaccacttggggtatgtgtgggaataggagcatggaactacccctttcagattgcctcttggaagtcggctccagcattagcctgtgtgcatggctttaannctctcttacactgttctgatgctctgctgaattacaggagctgtgtactctgggtttcatgtgtcaggaggggctgcacagcagtctngtagatccatgtgcaagctcttactgagggcactgatanacatggatgactaagatcactgtct

SEQ ID NO: 350040 - DNA, 2818 bp, Homo sapiens
ggatcctaggatgcttacatgcaatgatgaacccgaaaacacttgtaaagtgctacgtaaatattgatcacgaagaaggaagtcctcttcccgcctggagactgtgtggggtatggcggcgtggtggagagaatgtggtgtcttgttccaccctcctggagaggggagggcctggcctggaccgcagaggaatcgagtgactgcccctaaaatctcctagaaccgatcccgtggacccgtccctcccgagggtcccgcccctcccgtggtccgtcagcctctgccgcggagctgcgtccgccactcatgtttctccgagcaggcctggccgcgctctccccgcttcttcgcagtcttcggccctctcctgtcgccgccatgagcactggcaccttcgtcgtgtcgcagccgctcaattaccgcggcggggcccgcgtggagccggcggacgcctccggtaccgagaaagctttcgagccagcaaccggtaactgcaacgagccggggaggctggggcgccctggggccggatgcgcggatttcccggccagcccccgtttcctgtgttctgcagcgttgacttgagcacaagacagtgacagtggagagtctaaggccgagtgatagctactttcacatgttcaggagaaaaggaagtaaatttggctgttcaaaatgcaaaggctgcttttaaaatatggagtcaaaaatctggcatggagcgttgccgaatccttttggaggctgccaggataataagggaacgggaggatgaaattgctactatggagtgcatcaacaatggcaagtccatctttgaggcccgcttggacattgacatttcctggcagtgcctggagtattatgcgggcttggctgcatccatggctggtgaacacatccagctcccaggtggatcgtttggttataccagaagagaaccacttggggtatgtgtgggaataggagcatggaactacccctttcagattgcctcttggaagtcggctccagcattagcctgtggtaatgccatggtctttaaaccttctccctttacacctgtttctgcattgctactggctgaaatctacagtgaggctggtgtacctcctgggctcttcaatgtggtgcagggaggggctgccacaggccagtttctgtgtcagcatcccgatgtggccaaagtctccttcactggaagtgtgcccactggcatgaagatcatggagatgtcagctaaaggaatcaaacctgttaccttggaacttggaggcaaatctccactcatcatcttctcagactgtgatatgaacaatgctgtaaagggggcgctgatggccaacttcctcacacaaggccaggtttgctgtaatggcacaagagtatttgtgcagaaagaaattcttgataaatttacagaggaagtggtgaaacagacccaaaggattaaaattggagatccccttctggaagatacaaggatgggtccactcatcaaccgaccacacctggagcgagtccttgggtttgtcaaagtggcaaaggagcagggtgctaaagtgttatgtggtggagatatatatgtacctgaagatcccaaattaaaggatggatattacatgagaccttgtgtattaactaattgcagagacgacatgacctgtgtgaaggaagagatctttgggcctgttatgtccattttatcatttgacactgaagctgaggttctagaaagagccaatgataccacttttggactagcagctggcgtctttaccagggacatccaacgggctcatagagtggtagctgagcttcaggctgggacgtgcttcattaacaactataacgtcagcccagtggagttgccctttggtggatataagaagtcaggatttggcagagagaacggccgtgtgacaatcgaatattattcacagctgaagactgtgtgtgtggagatgggtgatgtggaatctgctttttgaaaacctgcagtgaaacctattgacatggccacgctgtggaatgatgtgaattggccctgtttacagaggcagtacaactgaatgttattttacatccagaattttggcgttcagtataagagaatggttcatgttactctttctctctccatcagcttcctcactgaaaatgtgcattaagtgccttgtagatactaatcaagaaagctgtgattctcctcaaagcgtatttttgtgaaatcttttaagagccagtaacatacttctagagaacaggaaaagagactaggataatacatcttccacacatttggcccactgataatgttaattctctggcgtatttcaaagaacttgttcctggctgatccaagtgcagtggtatttacaactaattgatcacaaccagtttgtagatttctttgttccttctccattcccactgcttcacttgcctagtcttgaagaaaaaaaacaaaaaacaaaaaaaaaccttgttcctttataggttcctggtagaatcagtagagatgatttcagctcattgacatttttttaagctatatccccttgtcattccattgagaaagctgacaactgggatagggaggggattagataatagatggggtcaaattctgtgtgaatgtgaacttgcctagtaagcactttgtctctgttcactactgcgatagaggaaatctatctccctatcttgggtccttgaactacagcctgctgtcttacaccagtggagctaccctttaaatgtacaaattatttgtatgctaatgtaatatggtgaaattaaaataaatcacactgtt

SEQ ID NO: 350041 - DNA, 1837 bp, Homo sapiens
  misc_feature (7)..(7): n is a, c, g, or t
  misc_feature (9)..(9): n is a, c, g, or t
  misc_feature (19)..(19): n is a, c, g, or t
  misc_feature (22)..(22): n is a, c, g, or t
tcgtcantntcggcagganatngtcggctccagcattagcctgtggtaatgccatggtctttaaaccttctccctttacacctgtttctgcattgctactggctgaaatctacagtgaggctggtgtacctcctgggctcttcaatgtggtgcagggaggggctgccacaggccagtttctgtgtcagcatcccgatgtggccaaagtctccttcactggaagtgtgcccactggcatgaagatcatggagatgtcagctaaaggaatcaaacctgttaccttggaacttggaggcaaatctccactcatcatcttctcagactgtgatatgaacaatgctgtaaagggggcgctgatggccaacttcctcacacaaggccaggtttgctgtaatggcacaagagtatttgtgcagaaagaaattcttgataaatttacagaggaagtggtgaaacagacccaaaggattaaaattggagatccccttctggaagatacaaggatgggtccactcatcaaccgaccacacctggagcgagtccttgggtttgtcaaagtggcaaaggagcagggtgctaaagtgttatgtggtggagatatatatgtacctgaagatcccaaattaaaggatggatattacatgagaccttgtgtattaactaattgcagagacgacatgacctgtgtgaaggaagagatctttgggcctgttatgtccattttatcatttgacactgaagctgaggttctagaaagagccaatgataccacttttggactagcagctggcgtctttaccagggacatccaacgggctcatagagtggtagctgagcttcaggctgggacgtgcttcattaacaactataacgtcagcccagtggagttgccctttggtggatataagaagtcaggatttggcagagagaacggccgtgtgacaatcgaatattattcacagctgaagactgtgtgtgtggagatgggtgatgtggaatctgctttttgaaaacctgcagtgaaacctattgacatggccacgctgtggaatgatgtgaattggccctgtttacagaggcagtacaactgaatgttattttacatccagaattttggcgttcagtataagagaatggttcatgttactctttctctctccatcagcttcctcactgaaaatgtgcattaagtgccttgtagatactaatcaagaaagctgtgattctcctcaaagcgtatttttgtgaaatcttttaagagccagtaacatacttctagagaacaggaaaagagactaggataatacatcttccacacatttggcccactgataatgttaattctctggcgtatttcaaagaacttgttcctggctgatccaagtgcagtggtatttacaactaattgatcacaaccagtttgtagatttctttgttccttctccattcccactgcttcacttgcctagtcttgaagaaaaaaaacaaaaaacaaaaaaaaaccttgttcctttataggttcctggtagaatcagtagagatgatttcagctcattgacatttttttaagctatatccccttgtcattccattgagaaagctgacaactgggatagggaggggattagataatagatggggtcaaattctgtgtgaatgtgaacttgcctagtaagcactttgtctctgttcactactgcgatagaggaaatctatctccctatcttgggtccttgaactacagcctgctgtcttacaccagtggagctaccctttaaatgtacaaattatttgtatgctaatgtaatatggtgaaattaaaataaatcacactgtt

SEQ ID NO: 350042 - DNA, 793 bp, Homo sapiens
attgagagtaatttcagactgaattaaaggcattaagcataattttagaacctaagtgcacattgattttaaaaagtaactaaaagctgggtgtggtggctcatgcctgtaatcccagcactttgtgaccaagggtggtggttattgtcttgcttgaataattgacattcaaagttcctaacacagttggaatttctgcgttccttatgctgcagtctacttagcttcttccgtccctgctatttttggtttccccttttattcttagccacattctaatttctagaataagtattttcttaggtttctatttaagaactcaaacatattcttccattgaaaatcacctaataagctgacagagaaacccgttaatctggtacataaacatctagtttctgcttattttcaatgacttgaaactaaatatccagttccatttttggtcatctcttgctatcatagttcttccaataaatttgttataattaccaccaactggtccttactgtacttaaaagcggaaatgtctttccactgatttctacttaggacttactccacctttaatatgacatatgacttttacctaatggatgtatactgtccctctagcaaattaaaattttctattaagtacttataaatagtcattgcttattaattacttctagaattttgtggggaaatgtatttaattaagtttgccagaaaataccttttggaaaaataattatgatttcaggtttacttctatatatagaacagtctaccacaattcttcaaaaaaaaa

SEQ ID NO: 350043 - DNA, 1776 bp, Homo sapiens
ggagtagagtagggcaggagaaactgggccaggctgcacttagctcaaggggcctcgaggactctctgcgtctctggagacaagggcactacacgcacttcagaatgaagagttgcgggagcatgctggggctctgggggcagcggctccccgcggcgtgggtcctgcttctgttgcctttcctgccgctgctgctgcttgcagcccccgcgccccaccgcgcgtcctacaagccggtcatcgtggtgcatgggctcttcgacagctcgtacagcttccgccacctgctggaatacatcaatgagacacaccccgggactgtggtgacagtgctcgatctcttcgatgggagagagagcttgcgacccctgtgggaacaggtgcaagggttccgagaggctgtggtccccatcatggcaaaggcccctcaaggggtgcatctcatctgctactcgcaggggggccttgtgtgccgggctctgctttctgtcatggatgatcacaacgtggattctttcatctccctctcctctccacagatgggacagtatggagacacggactacttgaagtggctgttccccacctccatgcggtctaacctctatcggatctgctatagcccctggggccaggaattctccatctgcaactactggcatgatccccaccacgatgacttgtacctcaatgccagcagcttcctggccctgatcaatggggaaagagaccatcccaatgccacagtatggcggaagaactttctgcgtgtgggccacctggtgctgattgggggccctgatgatggtgttattactccctggcagtccagcttctttggtttctatgatgcaaatgagaccgtcctggagatggaggagcaactggtttatctgcgggattcttttgggttgaagactctattggcccggggggccatagtgaggtgtccaatggccggtatctcccacacagcctggcactccaaccgtaccctttatgagacctgcattgaaccttggctctcctgaggatatattcaggggtccccaggaactcctcggtccagagaccaagtggtggccttggaaagcagatgtcaggctttggtgtgcctgtgaccacctcattgctcccatattatcccccatttttagtagagacggggttttagtagagacttggcctcccagaacccccttcctctgctcctccatgaatgacaattccaggcctcccctacctcatgtcctctcatttgggggattgctccgtgctgtccctttctctcaaggccgaagttgggaagtgagaaaccatgtttttaacttgtggctgcttttgctgctgctgctcctccgtatctggctgtatgggtggagaacccaccccctgcccaccacaggggtctccttccaggccactcaggacatttttagcttctctcctccccatgttcccttttttctctaaagtcccctgacatcagccctcccaactcctaagagggactacccatgagagtggggttctgaggctcccctatggggacagttccgttcttgaagtgtcagtgttggggaatatctgtggcctatgaggcccatctcaggtttggggatcccccagtccctatgatcagtgttggagtacccccctgggagagcctagtttctttgaggccccaggccctcttttaactacctttgaataggtgttatccctgtatttatggaaataaagttccatttcctcagtagtgcacaatggatctca

SEQ ID NO: 350044 - DNA, 1199 bp, Homo sapiens
  misc_feature (311)..(311): n is a, c, g, or t
ggaagtggggagaatcaaggcggggaaatcggactttcgggtcgctgggggcaacgaagcctggagaggccttctttccattcccagaatatgtttgctgctttttcctctccccactggcctaaatggatcgctccgcctgtttcctccccagcacctagggcgcaatggaatattccattgcccctcctgtcctgggtctgtgttgcggggaacgctcgcgcggttgccagagaaagccccggacgtgacggatttgcgcgaccccaagcagcccgcccttccccctcccatccgtcattcccctgcgntctctttcctcacccttccccccgccaccgtgggttccagacttgggataagtaaacagcgggtggagcgaggcctacggacccaggccaggtgggagtctgcactcttcaaggggcctgggctgctgctcacgggtattaaagaactccgcgttgttcatggctgaggcgatgcattaggaagatcctggacctagagaacaagtcccccgaacgctgagttggaggcgggacttcgggtgcgcgttggcgggagcatgctggggctctgggggcagcggctccccgcggcgtgggtcctgcttctgttgcctttcctgccgctgctgctgcttgcagcccccgcgccccaccgcgcgtcctacaagccggtcatcgtggtgcatgggctcttcgacagctcgtacagcttccgccacctgctggaatacatcaatgagacacaccccgggactgtggtgacagtgctcgatctcttcgatgggagagagagcttgcgaccccctgcccaccacaggggtctccttccaggccactcaggacatttttagcttctctcctccccatgttcccttttttctctaaagtcccctgacatcagccctcccaactcctaagagggactacccatgagagtggggttctgaggctcccctatggggacagttccgttcttgaagtgtcagtgttggggaatatctgtggcctatgaggcccatctcaggtttggggatcccccagtccctatgatcagtgttggagtacccccctgggagagcctagtttctttgaggccccaggccctcttttaactacctttgaataggtgttatccctgtatttatggaaataaagttccatttcctcagtagtgcacaatggatctca

SEQ ID NO: 350045 - DNA, 1382 bp, Homo sapiens
  misc_feature (311)..(311): n is a, c, g, or t
ggaagtggggagaatcaaggcggggaaatcggactttcgggtcgctgggggcaacgaagcctggagaggccttctttccattcccagaatatgtttgctgctttttcctctccccactggcctaaatggatcgctccgcctgtttcctccccagcacctagggcgcaatggaatattccattgcccctcctgtcctgggtctgtgttgcggggaacgctcgcgcggttgccagagaaagccccggacgtgacggatttgcgcgaccccaagcagcccgcccttccccctcccatccgtcattcccctgcgntctctttcctcacccttccccccgccaccgtgggttccagacttgggataagtaaacagcgggtggagcgaggcctacggacccaggccaggcgggagcatgctggggctctgggggcagcggctccccgcggcgtgggtcctgcttctgttgcctttcctgccgctgctgctgcttgcagcccccgcgccccaccgcgcgtcctacaagccggtcatcgtggtgcatgggctcttcgacagctcgtacagcttccgccacctgctggaatacatcaatgagacacaccccgggactgtggtgacagtgctcgatctcttcgatgggagagagagcttgcgacccctgtgggaacaggtgcaagggttccgagaggctgtggtccccatcatggcaaaggcccctcaaggggtgcatctcatctgctactcgcaggggggccttgtgtgccgggctctgctttctgtcatggatgatcacaacgtggattctttcatctccctctcctctccacagatgggacagtatggagacacggactacttgaagtggctgttccccacctccatgcggtctaacctctatcggatctgctatagcccctggggccaggaattctccatctgcaactactggcatgatccccaccacgatgacttgtacctcaatgccagcagcttcctggccctgatcaatggggaaagagaccatcccaatgccacagtatggcggaagaactttctgcgtgtgggccacctggtgctgattgggggccctgatgatggtgttattactccctggcagtccagctaccttaggaattcctatgatgcaaactagaacccgacttgcagatggaagcgagccacacatgggtttacatcattgcgcggataccattaagaggttgaaacacatcatattggccccagaggtgacccaaattaaaggatgtccaaatgaccgcgaatatcccaacacagcctgtcactctctacggtacccacttaatgaaacctgagattgaaccttgttactcctaaggcaataattacgggtcaccagtaagac

SEQ ID NO: 350046 - DNA, 341 bp, Homo sapiens
ctcacagactggccgtgcagaggatgaggtgggagagattgagtaggccaggccctggggagccaggagtccacttccctcaagaggctactgagtgccccccgctctccctccagatgacagcctctcaccctcatcctctggcatggacgcagtcagggagtctgctccaagcagacactggtggtcccgctccactacaacgagtcctacagccaaccagtgtacaagccctacctgaccttgtgcgctgggaggcgcatctgcagcacttacaggtgagggatggggagatgggaccccaagaaccccaactaggacccgtactcagggtcctgagc

SEQ ID NO: 350047 - DNA, 1771 bp, Homo sapiens
cacggacctggtgtgggagcgagaggaggtggcttgattgccgggcgtctgttccgagggaggagggtgttgccatctccctcacatgcccttatcacccctttctcaggcgggagcatgctggggctctgggggcagcggctccccgcggcgtgggtcctgcttctgttgcctttcctgccgctgctgctgcttgcagcccccgcgccccaccgcgcgtcctacaagccggtcatcgtggtgcatgggctcttcgacagctcgtacagcttccgccacctgctggaatacatcaatgagacacaccccgggactgtggtgacagtgctcgatctcttcgatgggagagagagcttgcgacccctgtgggaacaggtgcaagggttccgagaggctgtggtccccatcatggcaaaggcccctcaaggggtgcatctcatctgctactcgcaggggggccttgtgtgccgggctctgctttctgtcatggatgatcacaacgtggattctttcatctccctctcctctccacagatgggacagtatggagacacggactacttgaagtggctgttccccacctccatgcggtctaacctctatcggatctgctatagcccctggggccaggaattctccatctgcaactactggcatgatccccaccacgatgacttgtacctcaatgccagcagcttcctggccctgatcaatggggaaagagaccatcccaatgccacagtatggcggaagaactttctgcgtgtgggccacctggtgctgattgggggccctgatgatggtgttattactccctggcagtccagcttctttggtttctatgatgcaaatgagaccgtcctggagatggaggagcaactggtttatctgcgggattcttttgggttgaagactctattggcccggggggccatagtgaggtgtccaatggccggtatctcccacacagcctggcactccaaccgtaccctttatgagacctgcattgaaccttggctctcctgaggatatattcaggggtccccaggaactcctcggtccagagaccaagtggtggccttggaaagcagatgtcaggctttggtgtgcctgtgaccacctcattgctcccatattatcccccatttttagtagagacggggttttagtagagacttggcctcccagaacccccttcctctgctcctccatgaatgacaattccaggcctcccctacctcatgtcctctcatttgggggattgctccgtgctgtccctttctctcaaggccgaagttgggaagtgagaaaccatgtttttaacttgtggctgcttttgctgctgctgctcctccgtatctggctgtatgggtggagaacccaccccctgcccaccacaggggtctccttccaggccactcaggacatttttagcttctctcctccccatgttcccttttttctctaaagtcccctgacatcagccctcccaactcctaagagggactacccatgagagtggggttctgaggctcccctatggggacagttccgttcttgaagtgtcagtgttggggaatatctgtggcctatgaggcccatctcaggtttggggatcccccagtccctatgatcagtgttggagtacccccctgggagagcctagtttctttgaggccccaggccctcttttaactacctttgaataggtgttatccctgtatttatggaaataaagttccatttcctcagtagtgcacaatggatctca

SEQ ID NO: 350048 - DNA, 2594 bp, Homo sapiens
  misc_feature (311)..(311): n is a, c, g, or t
ggaagtggggagaatcaaggcggggaaatcggactttcgggtcgctgggggcaacgaagcctggagaggccttctttccattcccagaatatgtttgctgctttttcctctccccactggcctaaatggatcgctccgcctgtttcctccccagcacctagggcgcaatggaatattccattgcccctcctgtcctgggtctgtgttgcggggaacgctcgcgcggttgccagagaaagccccggacgtgacggatttgcgcgaccccaagcagcccgcccttccccctcccatccgtcattcccctgcgntctctttcctcacccttccccccgccaccgtgggttccagacttgggataagtaaacagcgggtggagcgaggcctacggacccaggccaggtgggagtctgcactcttcaaggggcctgggctgctgctcacgggtattaaagaactccgcgttgttcatggctgaggcgatgcattaggaagatcctggacctagagaacaagtcccccgaacgctgagttggaggcgggacttcgggtgcgcgttggcgggagcatgctggggctctgggggcagcggctccccgcggcgtgggtcctgcttctgttgcctttcctgccgctgctgctgcttgcagcccccgcgccccaccgcgcgtcctacaagccggtcatcgtggtgcatgggctcttcgacagctcgtacagcttccgccacctgctggaatacatcaatgagacacaccccgggactgtggtgacagtgctcgatctcttcgatgggagagagagcttgcgacccctgtgggaacaggtgcaagggttccgagaggctgtggtccccatcatggcaaaggcccctcaaggggtgcatctcatctgctactcgcaggggggccttgtgtgccgggctctgctttctgtcatggatgatcacaacgtggattctttcatctccctctcctctccacagatgggacagtatggagacacggactacttgaagtggctgttccccacctccatgcggtctaacctctatcggatctgctatagcccctggggccaggaattctccatctgcaactactggcatgatccccaccacgatgacttgtacctcaatgccagcagcttcctggccctgatcaatggggaaagagaccatcccaatgccacagtatggcggaagaactttctgcgtgtgggccacctggtgctgattgggggccctgatgatggtgttattactccctggcagtccagcttctttggtttctatgatgcaaatgagaccgtcctggagatggaggagcaactgcctgccaggcccacccaccagtctgagctgcttctgctgaggctggtctgcttgaagcctcccaggagaaagaagccagcctgtagggtccagcgtcaaagcgaatcatggggtccagggctgagctgtgcactctcttaggcggattctccttcctcctgctactgataccaggcgagggggccaagggtggatccctcagagagagtcagggagtctgctccaagcagacactggtggtcccgctccactacaacgagtcctacagccaaccagtgtacaagccctacctgaccttgtgcgctgggaggcgcatctgcagcacttacaggaccatgtaccgcgttatgtggcgggaggtgaggcgggaggttcagcagacccatgcagtgtgctgccagggctggaagaagcggcacccgggggcgctcacctgtgaagccatctgcgccaagccttgcctgaacggaggcgtctgcgttaggcctgaccagtgcgagtgcgcccccggctggggagggaagcactgtcatgtgggcagcttcacctgcggctgcccccatgacctagtgctaggcgtggacgggcgcacctgcatggaggggtccccagagcccccaaccagtgccagcatactcagcgtggccgttcgggaggcggaaaaagatgagcgcgctctgaagcaggagattcacgagctgcgagggcgcctggagcggctggagcagtgggccggtcaggctggggcctgggtcagagcggtgctgcccgtgccgcctgaagagctgcagccagaacaggtggctgagctgtggggccggggtgaccggatcgaatctctcagcgaccaggtgctgctgctggaggagaggctaggtgcctgctcctgtgaggacaacagcctgggcctcggcgtcaatcatcgataagaagcctctacagcacccctgccccctaatttatacagaaaccggacccactaatcctctgggattggccgactgtgagctgcagataaggctatcagccaccaaagagcaatgaacaatggaaacttcagagagctgaagaaagggggaggcctgtgttcttggcctgcccctgagtcttctggctgggggcaggttgcctgggcaagaactgcttcttcaattccttaacaaatgcaaccaccaacacccagatctctctctctctttattttcagtttttttgctgttatccagataattaataaaaaccaaccacgcaaaaaaaaaaa

SEQ ID NO: 350049 - DNA, 1368 bp, Homo sapiens
ctagtagaggcggtgtgaatcggacgagggcattcatctgctactcgcaggggggccttgtgtgccgggctctgctttctgtcatggatgatcacaacgtggattctttcatctccctctcctctccacagatgggacagtatggagacacggactacttgaagtggctgttccccacctccatgcggtctaacctctatcggatctgctatagcccctggggccaggaattctccatctgcaactactggcatgatccccaccacgatgacttgtacctcaatgccagcagcttcctggccctgatcaatggggaaagagaccatcccaatgccacagtatggcggaagaactttctgcgtgtgggccacctggtgctgattgggggccctgatgatggtgttattactccctggcagtccagcttctttggtttctatgatgcaaatgagaccgtcctggagatggaggagcaactggtttatctgcgggattcttttgggttgaagactctattggcccggggggccatagtgaggtgtccaatggccggtatctcccacacagcctggcactccaaccgtaccctttatgagacctgcattgaaccttggctctcctgaggatatattcaggggtccccaggaactcctcggtccagagaccaagtggtggccttggaaagcagatgtcaggctttggtgtgcctgtgaccacctcattgctcccatattatcccccatttttagtagagacggggttttagtagagacttggcctcccagaacccccttcctctgctcctccatgaatgacaattccaggcctcccctacctcatgtcctctcatttgggggattgctccgtgctgtccctttctctcaaggccgaagttgggaagtgagaaaccatgtttttaacttgtggctgcttttgctgctgctgctcctccgtatctggctgtatgggtggagaacccaccccctgcccaccacaggggtctccttccaggccactcaggacatttttagcttctctcctccccatgttcccttttttctctaaagtcccctgacatcagccctcccaactcctaagagggactacccatgagagtggggttctgaggctcccctatggggacagttccgttcttgaagtgtcagtgttggggaatatctgtggcctatgaggcccatctcaggtttggggatcccccagtccctatgatcagtgttggagtacccccctgggagagcctagtttctttgaggccccaggccctcttttaactacctttgaataggtgttatccctgtatttatggaaataaagttccatttcctcagtagtgcacaatggatctca

SEQ ID NO: 350050 - DNA, 1972 bp, Homo sapiens
  misc_feature (311)..(311): n is a, c, g, or t
ggaagtggggagaatcaaggcggggaaatcggactttcgggtcgctgggggcaacgaagcctggagaggccttctttccattcccagaatatgtttgctgctttttcctctccccactggcctaaatggatcgctccgcctgtttcctccccagcacctagggcgcaatggaatattccattgcccctcctgtcctgggtctgtgttgcggggaacgctcgcgcggttgccagagaaagccccggacgtgacggatttgcgcgaccccaagcagcccgcccttccccctcccatccgtcattcccctgcgntctctttcctcacccttccccccgccaccgtgggttccagacttgggataagtaaacagcgggtggagcgaggcctacggacccaggccaggtgggagtctgcactcttcaaggggcctgggctgctgctcacgggtattaaagaactccgcgttgttcatggctgaggcgatgcattaggaagatcctggacctagagaacaagtcccccgaacgctgagttggaggcgggacttcgggtgcgcgttggcgggagcatgctggggctctgggggcagcggctccccgcggcgtgggtcctgcttctgttgcctttcctgccgctgctgctgcttgcagcccccgcgccccaccgcgcgtcctacaagccggtcatcgtggtgcatgggctcttcgacagctcgtacagcttccgccacctgctggaatacatcaatgagacacggactacttgaagtggctgttccccacctccatgcggtctaacctctatcggatctgctatagcccctggggccaggaattctccatctgcaactactggcatgatccccaccacgatgacttgtacctcaatgccagcagcttcctggccctgatcaatggggaaagagaccatcccaatgccacagtatggcggaagaactttctgcgtgtgggccacctggtgctgattgggggccctgatgatggtgttattactccctggcagtccagcttctttggtttctatgatgcaaatgagaccgtcctggagatggaggagcaactggtttatctgcgggattcttttgggttgaagactctattggcccggggggccatagtgaggtgtccaatggccggtatctcccacacagcctggcactccaaccgtaccctttatgagacctgcattgaaccttggctctcctgaggatatattcaggggtccccaggaactcctcggtccagagaccaagtggtggccttggaaagcagatgtcaggctttggtgtgcctgtgaccacctcattgctcccatattatcccccatttttagtagagacggggttttagtagagacttggcctcccagaacccccttcctctgctcctccatgaatgacaattccaggcctcccctacctcatgtcctctcatttgggggattgctccgtgctgtccctttctctcaaggccgaagttgggaagtgagaaaccatgtttttaacttgtggctgcttttgctgctgctgctcctccgtatctggctgtatgggtggagaacccaccccctgcccaccacaggggtctccttccaggccactcaggacatttttagcttctctcctccccatgttcccttttttctctaaagtcccctgacatcagccctcccaactcctaagagggactacccatgagagtggggttctgaggctcccctatggggacagttccgttcttgaagtgtcagtgttggggaatatctgtggcctatgaggcccatctcaggtttggggatcccccagtccctatgatcagtgttggagtacccccctgggagagcctagtttctttgaggccccaggccctcttttaactacctttgaataggtgttatccctgtatttatggaaataaagttccatttcctcagtagtgcacaatggatctca

SEQ ID NO: 350051 - DNA, 1272 bp, Homo sapiens
gatctagaggatcgcctgctgctccctcttcacagatgggacagtatggagacacggactacttgaagtggctgttccccacctccatgcggtctaacctctatcggatctgctatagcccctggggccaggaattctccatctgcaactactggcatgatccccaccacgatgacttgtacctcaatgccagcagcttcctggccctgatcaatggggaaagagaccatcccaatgccacagtatggcggaagaactttctgcgtgtgggccacctggtgctgattgggggccctgatgatggtgttattactccctggcagtccagcttctttggtttctatgatgcaaatgagaccgtcctggagatggaggagcaactggtttatctgcgggattcttttgggttgaagactctattggcccggggggccatagtgaggtgtccaatggccggtatctcccacacagcctggcactccaaccgtaccctttatgagacctgcattgaaccttggctctcctgaggatatattcaggggtccccaggaactcctcggtccagagaccaagtggtggccttggaaagcagatgtcaggctttggtgtgcctgtgaccacctcattgctcccatattatcccccatttttagtagagacggggttttagtagagacttggcctcccagaacccccttcctctgctcctccatgaatgacaattccaggcctcccctacctcatgtcctctcatttgggggattgctccgtgctgtccctttctctcaaggccgaagttgggaagtgagaaaccatgtttttaacttgtggctgcttttgctgctgctgctcctccgtatctggctgtatgggtggagaacccaccccctgcccaccacaggggtctccttccaggccactcaggacatttttagcttctctcctccccatgttcccttttttctctaaagtcccctgacatcagccctcccaactcctaagagggactacccatgagagtggggttctgaggctcccctatggggacagttccgttcttgaagtgtcagtgttggggaatatctgtggcctatgaggcccatctcaggtttggggatcccccagtccctatgatcagtgttggagtacccccctgggagagcctagtttctttgaggccccaggccctcttttaactacctttgaataggtgttatccctgtatttatggaaataaagttccatttcctcagtagtgcacaatggatctca

SEQ ID NO: 350052 - DNA, 2696 bp, Homo sapiens
  misc_feature (311)..(311): n is a, c, g, or t
ggaagtggggagaatcaaggcggggaaatcggactttcgggtcgctgggggcaacgaagcctggagaggccttctttccattcccagaatatgtttgctgctttttcctctccccactggcctaaatggatcgctccgcctgtttcctccccagcacctagggcgcaatggaatattccattgcccctcctgtcctgggtctgtgttgcggggaacgctcgcgcggttgccagagaaagccccggacgtgacggatttgcgcgaccccaagcagcccgcccttccccctcccatccgtcattcccctgcgntctctttcctcacccttccccccgccaccgtgggttccagacttgggataagtaaacagcgggtggagcgaggcctacggacccaggccaggtgggagtctgcactcttcaaggggcctgggctgctgctcacgggtattaaagaactccgcgttgttcatggctgaggcgatgcattaggaagatcctggacctagagaacaagtcccccgaacgctgagttggaggcgggacttcgggtgcgcgttggcgggagcatgctggggctctgggggcagcggctccccgcggcgtgggtcctgcttctgttgcctttcctgccgctgctgctgcttgcagcccccgcgccccaccgcgcgtcctacaagccggtcatcgtggtgcatgggctcttcgacagctcgtacagcttccgccacctgctggaatacatcaatgagacacaccccgggactgtggtgacagtgctcgatctcttcgatgggagagagagcttgcgacccctgtgggaacaggtgcaagggttccgagaggctgtggtccccatcatggcaaaggcccctcaaggggtgcatctcatctgctactcgcaggggggccttgtgtgccgggctctgctttctgtcatggatgatcacaacgtggattctttcatctccctctcctctccacagatgggacagtatggagacacggactacttgaagtggctgttccccacctccatgcggtctaacctctatcggatctgctatagcccctggggccaggaattctccatctgcaactactggcatgatccccaccacgatgacttgtacctcaatgccagcagcttcctggccctgatcaatggggaaagagaccatcccaatgccacagtatggcggaagaactttctgcgtgtgggccacctggtgctgattgggggccctgatgatggtgttattactccctggcagtccagcttctttggtttctatgatgcaaatgagaccgtcctggagatggaggagcaactgcctgccaggcccacccaccagtctgagctgcttctgctgaggctggtctgcttgaagcctcccaggagaaagaagccagcctgtagggtccagcgtcaaagcgaatcatggggtccagggctgagctgtgcactctcttaggcggattctccttcctcctgctactgataccaggcgagggggccaagggtggatccctcagagagagtcagggagtctgctccaagcagacactggtggtcccgctccactacaacgagtcctacagccaaccagtgtacaagccctacctgaccttgtgcgctgggaggcgcatctgcagcacttacaggaccatgtaccgcgttatgtggcgggaggtgaggcgggaggttcagcagacccatgcagtgtgctgccagggctggaagaagcggcacccgggggcgctcacctgtgaagccatctgcgccaagccttgcctgaacggaggcgtctgcgttaggcctgaccagtgcgagtgcgcccccggctggggagggaagcactgtcatgtggacgtggatgaatgtaggaccagcatcaccctctgctcgcaccattgttttaatacggcaggcagcttcacctgcggctgcccccatgacctagtgctaggcgtggacgggcgcacctgcatggaggggtccccagagcccccaaccagtgccagcatactcagcgtggccgttcgggaggcggaaaaagatgagcgcgctctgaagcaggagattcacgagctgcgagggcgcctggagcggctggagcaggtgagccaagcctgctgggtggggcgaggccagacgtcactgtcaataccctgaggcatctcttcctttctagtgggccggtcaggctggggcctgggtcagagcggtgctgcccgtgccgcctgaagagctgcagccagaacaggtggctgagctgtggggccggggtgaccggatcgaatctctcagcgaccaggctcctgtgaggacaacagcctgggcctcggcgtcaatcatcgataagaagcctctacagcacccctgccccctaatttatacagaaaccggacccactaatcctctgggattggccgactgtgagctgcagataaggctatcagccaccaaagagcaatgaacaatggaaacttcagagagctgaagaaagggggaggcctgtgttcttggcctgcccctgagtcttctggctgggggcaggttgcctgggcaagaactgcttcttcaattccttaacaaatgcaaccaccaacacccagatctctctctctctttattttcagtttttttgctgttatccagataattaataaaaaccaaccacgcaaaaaaaaaaa

SEQ ID NO: 350053 - DNA, 2204 bp, Homo sapiens
  misc_feature (311)..(311): n is a, c, g, or t
ggaagtggggagaatcaaggcggggaaatcggactttcgggtcgctgggggcaacgaagcctggagaggccttctttccattcccagaatatgtttgctgctttttcctctccccactggcctaaatggatcgctccgcctgtttcctccccagcacctagggcgcaatggaatattccattgcccctcctgtcctgggtctgtgttgcggggaacgctcgcgcggttgccagagaaagccccggacgtgacggatttgcgcgaccccaagcagcccgcccttccccctcccatccgtcattcccctgcgntctctttcctcacccttccccccgccaccgtgggttccagacttgggataagtaaacagcgggtggagcgaggcctacggacccaggccaggtgggagtctgcactcttcaaggggcctgggctgctgctcacgggtattaaagaactccgcgttgttcatggctgaggcgatgcattaggaagatcctggacctagagaacaagtcccccgaacgctgagttggaggcgggacttcgggtgcgcgttggcgggagcatgctggggctctgggggcagcggctccccgcggcgtgggtcctgcttctgttgcctttcctgccgctgctgctgcttgcagcccccgcgccccaccgcgcgtcctacaagccggtcatcgtggtgcatgggctcttcgacagctcgtacagcttccgccacctgctggaatacatcaatgagacacaccccgggactgtggtgacagtgctcgatctcttcgatgggagagagagcttgcgacccctgtgggaacaggtgcaagggttccgagaggctgtggtccccatcatggcaaaggcccctcaaggggtgcatctcatctgctactcgcaggggggccttgtgtgccgggctctgctttctgtcatggatgatcacaacgtggattctttcatctccctctcctctccacagatgggacagtatggagacacggactacttgaagtggctgttccccacctccatgcggtctaacctctatcggatctgctatagcccctggggccaggaattctccatctgcaactactggcatgatccccaccacgatgacttgtacctcaatgccagcagcttcctggccctgatcaatggggaaagagaccatcccaatgccacagtatggcggaagaactttctgcgtgtgggccacctggtgctgattgggggccctgatgatggtgttattactccctggcagtccaggtaataagggattttgtggcctgaagattggctaaagacatcccccaaccccagttggtctttatctcatgcctaaactggcctgctccttccactgttcagttagtgctcctccccccattcatcatgtcacccaagaccaaaacctgggagtcatatcccaaccccttgtatcaagccagtcactaagtcctgctgactcttctcctctccatccctatcaccccctcccccactttataaaaacttttaattttgaaattcttatagattcataggaaattgcaaagatagtatagcgaggcccttcacccagcttcccccagtggttgcatcctatgtaattatagcacagtatcaaaaccaggaaattcacattggttcaatgtgtgtgtgtagttttataccattttatcacatttcctaccacctctttacttacctggactattataacagcctccagctttgtcccctccatcctattccttagaaaaaaatccatggctccatggtactatgtgcttgcctgtgttataggtcaccatgtgtgatctgtaatgtcacctgagctacttgaattgctcaacaaatatttattcaacattatgggcgcaggcttgttctgggccctagggatgcagtggtaaataaaagagaagtccctaatgttatgtagcttatattctagtttgtaagatagctgatacatacatacaaatatatatgtcaggtaataaggcaggggaaaggattagaggatgtccggggcctagtttcaatagtggccgaagaagtcctcctggaaaagtcaccattcaattagagactgaaggaagtgaaggagggagttgtgctctgggtggaagaaccccccagggagaaggtctggcacctgcagaggccctgaagcacgtgtgagcaat

SEQ ID NO: 350054 - DNA, 1547 bp, Homo sapiens
  misc_feature (311)..(311): n is a, c, g, or t
ggaagtggggagaatcaaggcggggaaatcggactttcgggtcgctgggggcaacgaagcctggagaggccttctttccattcccagaatatgtttgctgctttttcctctccccactggcctaaatggatcgctccgcctgtttcctccccagcacctagggcgcaatggaatattccattgcccctcctgtcctgggtctgtgttgcggggaacgctcgcgcggttgccagagaaagccccggacgtgacggatttgcgcgaccccaagcagcccgcccttccccctcccatccgtcattcccctgcgntctctttcctcacccttccccccgccaccgtgggttccagacttgggataagtaaacagcgggtggagcgaggcctacggacccaggccaggtgggagtctgcactcttcaaggggcctgggctgctgctcacgggtattaaagaactccgcgttgttcatggctgaggcgatgcattaggaagatcctggacctagagaacaagtcccccgaacgctgagttggaggcgggacttcgggtgcgcgttggcgggagcatgctggggctctgggggcagcggctccccgcggcgtgggtcctgcttctgttgcctttcctgccgctgctgctgcttgcagcccccgcgccccaccgcgcgtcctacaagccggtcatcgtggtgcatgggctcttcgacagctcgtacagcttccgccacctgctggaatacatcaatgagacacaccccgggactgtggtgacagtgctcgatctcttcgatgggagagagagcttgcgacccctgtgggaacaggtgcaagggttccgagaggctgtggtccccatcatggcaaaggcccctcaaggggtgcatctcatctgctactcgcaggggggccttgtgtgccgggctctgctttctgtcatggatgatcacaacgtggattctttcatctccctctcctctccacagatgggacagtatggagacacggactacttgaagtggctgttccccacctccatgcggtctaacctctatcggatctgctatagcccctggggccaggaattctccatctgcaactactggcatgatccccaccacgatgacttgtacctcaatgccagcagcttcctggccctgatcaatggggaaagagaccatcccaatgccacagtatggcggaagaactttctgcgtgtgggccacctggtgctgattgggggccctgatgatggtgttattactccctggcagtccagcttcttggtctctatgatgcaaatgagacgtcccgggatggaggcgcactggttatcgcggatctttgggtggacaccctattggccgggggcccagtgggggtcctggccggttcccaaaggcgggtccaacggctttgaaacggtagactgccccgagaaataggggccgaactcgccaaacggggcggcacaattcttctggggggcccgccctctcccaggaaggggaagacgcaccactcgaaaaaacaccacttggtggtgcg

SEQ ID NO: 350055 - DNA, 1540 bp, Homo sapiens
  misc_feature (311)..(311): n is a, c, g, or t
ggaagtggggagaatcaaggcggggaaatcggactttcgggtcgctgggggcaacgaagcctggagaggccttctttccattcccagaatatgtttgctgctttttcctctccccactggcctaaatggatcgctccgcctgtttcctccccagcacctagggcgcaatggaatattccattgcccctcctgtcctgggtctgtgttgcggggaacgctcgcgcggttgccagagaaagccccggacgtgacggatttgcgcgaccccaagcagcccgcccttccccctcccatccgtcattcccctgcgntctctttcctcacccttccccccgccaccgtgggttccagacttgggataagtaaacagcgggtggagcgaggcctacggacccaggccaggtgggagtctgcactcttcaaggggcctgggctgctgctcacgggtattaaagaactccgcgttgttcatggctgaggcgatgcattaggaagatcctggacctagagaacaagtcccccgaacgctgagttggaggcgggacttcgggtgcgcgttggcgggagcatgctggggctctgggggcagcggctccccgcggcgtgggtcctgcttctgttgcctttcctgccgctgctgctgcttgcagcccccgcgccccaccgcgcgtcctacaagccggtcatcgtggtgcatgggctcttcgacagctcgtacagcttccgccacctgctggaatacatcaatgagacacaccccgggactgtggtgacagtgctcgatctcttcgatgggagagagagcttgcgacccctgtgggaacaggtgcaagggttccgagaggctgtggtccccatcatggcaaaggcccctcaaggggtgcatctcatctgctactcgcaggggggccttgtgtgccgggctctgctttctgtcatggatgatcacaacgtggattctttcatctccctctcctctccacagatgggacagtatggagacacggactacttgaagtggctgttccccacctccatgcggtctaacctctatcggatctgctatagcccctggggccaggaattctccatctgcaactactggcatgatccccaccacgatgacttgtacctcaatgccagcagcttcctggccctgatcaatggggaaagagaccatcccaatgccacagtatggcggaagaactttctgcgtgtgggccacctggtgctgattgggggccctgatgatggtgttattactccctggcagtccagctaccttaggaattcctatgatgcaaactagaacccgacttgcagatggaagcgagccacacatgggtttacatcattgcgcggataccattaagaggttgaaacacatcatattggccccagaggtgacccaaattaaaggatgtccaaatgaccgcgaatatcccaacacagcctgtcactctctacggtacccacttaatgaaacctgagattgaaccttgttactcctaaggcaataattacgggtcaccagtaagac

SEQ ID NO: 350056 - DNA, 702 bp, Homo sapiens
  misc_feature (2)..(2): n is a, c, g, or t
  misc_feature (8)..(8): n is a, c, g, or t
tngactcnagaggatccccgacggatagcggatctgcatggaggggtccccagagcccccaaccagtgccagcatactcagcgtggccgttcgggaggcggaaaaagatgagcgcgctctgaagcaggagattcacgagctgcgagggcgcctggagcggctggagcagtgggccggtcaggctggggcctgggtcagagcggtgctgcccgtgccgcctgaagagctgcagccagaacaggtggctgagctgtggggccggggtgaccggatcgaatctctcagcgaccaggtgctgctgctggaggagaggctaggtgcctgctcctgtgaggacaacagcctgggcctcggcgtcaatcatcgataagaagcctctacagcacccctgccccctaatttatacagaaaccggacccactaatcctctgggattggccgactgtgagctgcagataaggctatcagccaccaaagagcaatgaacaatggaaacttcagagagctgaagaaagggggaggcctgtgttcttggcctgcccctgagtcttctggctgggggcaggttgcctgggcaagaactgcttcttcaattccttaacaaatgcaaccaccaacacccagatctctctctctctttattttcagtttttttgctgttatccagataattaataaaaaccaaccacgcaaaaaaaaaaa

SEQ ID NO: 350057 - DNA, 768 bp, Homo sapiens
  misc_feature (311)..(311): n is a, c, g, or t
ggaagtggggagaatcaaggcggggaaatcggactttcgggtcgctgggggcaacgaagcctggagaggccttctttccattcccagaatatgtttgctgctttttcctctccccactggcctaaatggatcgctccgcctgtttcctccccagcacctagggcgcaatggaatattccattgcccctcctgtcctgggtctgtgttgcggggaacgctcgcgcggttgccagagaaagccccggacgtgacggatttgcgcgaccccaagcagcccgcccttccccctcccatccgtcattcccctgcgntctctttcctcacccttccccccgccaccgtgggttccagacttgggataagtaaacagcgggtggagcgaggcctacggacccaggccaggtgggagtctgcactcttcaaggggcctgggctgctgctcacgggtattaaagaactccgcgttgttcatggctgaggcgatgcattaggaagatcctggactacccatgagagtggggttctgaggctcccctatggggacagttccgttcttgaagtgtcagtgttggggaatatctgtggcctatgaggcccatctcaggtttggggatcccccagtccctatgatcagtgttggagtacccccctgggagagcctagtttctttgaggccccaggccctcttttaactacctttgaataggtgttatccctgtatttatggaaataaagttccatttcctcagtagtgcacaatggatctca

SEQ ID NO: 350058 - DNA, 441 bp, Homo sapiens
cccctacctcatgtcctctcatttgggggattgctccgtgctgtccctttctctcaaggccgaagttgggaagtgagaaaccatgtttttaacttgtggctgcttttgctgctgctgctcctccgtatctggctgtatgggtggagaacccaccccctgcccaccacaggggtctccttccaggccactcaggacatttttagcttctctcctccccatgttcccttttttctctaaagtcccctgacatcagccctcccaactcctaagagggactacccatgagagtggggttctgaggctcccctatggggacagttccgttcttgaagtgtcagtgttggggaatatctgtggcctatgaggcccatctcaggtttggggatcccccagtccctatgatcagtgttggagtacccccctgggagagcctagtttctt

SEQ ID NO: 350059 - DNA, 2222 bp, Homo sapiens
  misc_feature (311)..(311): n is a, c, g, or t
ggaagtggggagaatcaaggcggggaaatcggactttcgggtcgctgggggcaacgaagcctggagaggccttctttccattcccagaatatgtttgctgctttttcctctccccactggcctaaatggatcgctccgcctgtttcctccccagcacctagggcgcaatggaatattccattgcccctcctgtcctgggtctgtgttgcggggaacgctcgcgcggttgccagagaaagccccggacgtgacggatttgcgcgaccccaagcagcccgcccttccccctcccatccgtcattcccctgcgntctctttcctcacccttccccccgccaccgtgggttccagacttgggataagtaaacagcgggtggagcgaggcctacggacccaggccaggtgggagtctgcactcttcaaggggcctgggctgctgctcacgggtattaaagaactccgcgttgttcatggctgaggcgatgcattaggaagatcctggacctagagaacaagtcccccgaacgctgagttggaggcgggacttcgggtgcgcgttggcgggagcatgctggggctctgggggcagcggctccccgcggcgtgggtcctgcttctgttgcctttcctgccgctgctgctgcttgcagcccccgcgccccaccgcgcgtcctacaagccggtcatcgtggtgcatgggctcttcgacagctcgtacagcttccgccacctgctggaatacatcaatgagacacaccccgggactgtggtgacagtgctcgatctcttcgatgggagagagagcttgcgacccctgtgggaacaggtgcaagggttccgagaggctgtggtccccatcatggcaaaggcccctcaaggggtgcatctcatctgctactcgcaggggggccttgtgtgccgggctctgctttctgtcatggatgatcacaacgtggattctttcatctccctctcctctccacagatgggacagtatggagacacggactacttgaagtggctgttccccacctccatgcggtctaacctctatcggatctgctatagcccctggggccaggaattctccatctgcaactactggcatgatccccaccacgatgacttgtacctcaatgccagcagcttcctggccctgatcaatggggaaagagaccatcccaatgccacagtatggcggaagaactttctgcgtgtgggccacctggtgctgattgggggccctgatgatggtgttattactccctggcagtccagcttctttggtttctatgatgcaaatgagaccgtcctggagatggaggagcaactggtttatctgcgggattcttttgggttgaagactctattggcccggggggccatagtgaggtgtccaatggccggtatctcccacacagcctggcactccaaccgtaccctttatgagacctgcattgaaccttggctctcctgaggatatattcaggggtccccaggaactcctcggtccagagaccaagtggtggccttggaaagcagatgtcaggctttggtgtgcctgtgaccacctcattgctcccatattatcccccatttttagtagagacggggttttagtagagacttggcctcccagaacccccttcctctgctcctccatgaatgacaattccaggcctcccctacctcatgtcctctcatttgggggattgctccgtgctgtccctttctctcaaggccgaagttgggaagtgagaaaccatgtttttaacttgtggctgcttttgctgctgctgctcctccgtatctggctgtatgggtggagaacccaccccctgcccaccacaggggtctccttccaggccactcaggacatttttagcttctctcctccccatgttcccttttttctctaaagtcccctgacatcagccctcccaactcctaagagggactacccatgagagtggggttctgaggctcccctatggggacagttccgttcttgaagtgtcagtgttggggaatatctgtggcctatgaggcccatctcaggtttggggatcccccagtccctatgatcagtgttggagtacccccctgggagagcctagtttctttgaggccccaggccctcttttaactacctttgaataggtgttatccctgtatttatggaaataaagttccatttcctcagtagtgcacaatggatctca

SEQ ID NO: 350060 - DNA, 2885 bp, Homo sapiens
  misc_feature (311)..(311): n is a, c, g, or t
ggaagtggggagaatcaaggcggggaaatcggactttcgggtcgctgggggcaacgaagcctggagaggccttctttccattcccagaatatgtttgctgctttttcctctccccactggcctaaatggatcgctccgcctgtttcctccccagcacctagggcgcaatggaatattccattgcccctcctgtcctgggtctgtgttgcggggaacgctcgcgcggttgccagagaaagccccggacgtgacggatttgcgcgaccccaagcagcccgcccttccccctcccatccgtcattcccctgcgntctctttcctcacccttccccccgccaccgtgggttccagacttgggataagtaaacagcgggtggagcgaggcctacggacccaggccaggtgggagtctgcactcttcaaggggcctgggctgctgctcacgggtattaaagaactccgcgttgttcatggctgaggcgatgcattaggaagatcctggacctagagaacaagtcccccgaacgctgagttggaggcgggacttcgggtgcgcgttggcgggagcatgctggggctctgggggcagcggctccccgcggcgtgggtcctgcttctgttgcctttcctgccgctgctgctgcttgcagcccccgcgccccaccgcgcgtcctacaagccggtcatcgtggtgcatgggctcttcgacagctcgtacagcttccgccacctgctggaatacatcaatgagacacaccccgggactgtggtgacagtgctcgatctcttcgatgggagagagagcttgcgacccctgtgggaacaggtgcaagggttccgagaggctgtggtccccatcatggcaaaggcccctcaaggggtgcatctcatctgctactcgcaggggggccttgtgtgccgggctctgctttctgtcatggatgatcacaacgtggattctttcatctccctctcctctccacagatgggacagtatggagacacggactacttgaagtggctgttccccacctccatgcggtctaacctctatcggatctgctatagcccctggggccaggaattctccatctgcaactactggcatgatccccaccacgatgacttgtacctcaatgccagcagcttcctggccctgatcaatggggaaagagaccatcccaatgccacagtatggcggaagaactttctgcgtgtgggccacctggtgctgattgggggccctgatgatggtgttattactccctggcagtccagcttctttggtttctatgatgcaaatgagaccgtcctggagatggaggagcaactgcctgccaggcccacccaccagtctgagctgcttctgctgaggctggtctgcttgaagcctcccaggagaaagaagccagcctgtagggtccagcgtcaaagcgaatcatggggtccagggctgagctgtgcactctcttaggcggattctccttcctcctgctactgataccaggcgagggggccaagggtggatccctcagagagaggtgacaacagagggggtagggcccggggtgagctcttctcaggagccttctgctgggggtggggcttcacaggaggcaaaacataactgtaagtttagaatgggggtgagaggctgtcatctggagggagagcggggggcctcagtagcctcttgagggaagtgggactcctggctccccagggcctggcctactcaatctctcccacctcatcctctggcatggacgcagtcagggagtctgctccaagcagacactggtggtcccgctccactacaacgagtcctacagccaaccagtgtacaagccctacctgaccttgtgcgctgggaggcgcatctgcagcacttacaggaccatgtaccgcgttatgtggcgggaggtgaggcgggaggttcagcagacccatgcagtgtgctgccagggctggaagaagcggcacccgggggcgctcacctgtgaagccatctgcgccaagccttgcctgaacggaggcgtctgcgttaggcctgaccagtgcgagtgcgcccccggctggggagggaagcactgtcatgtggacgtggatgaatgtaggaccagcatcaccctctgctcgcaccattgttttaatacggcaggcagcttcacctgcggctgcccccatgacctagtgctaggcgtggacgggcgcacctgcatggaggggtccccagagcccccaaccagtgccagcatactcagcgtggccgttcgggaggcggaaaaagatgagcgcgctctgaagcaggagattcacgagctgcgagggcgcctggagcggctggagcagtgggccggtcaggctggggcctgggtcagagcggtgctgcccgtgccgcctgaagagctgcagccagaacaggtggctgagctgtggggccggggtgaccggatcgaatctctcagcgaccaggtgctgctgctggaggagaggctaggtgcctgctcctgtgaggacaacagcctgggcctcggcgtcaatcatcgataagaagcctctacagcacccctgccccctaatttatacagaaaccggacccactaatcctctgggattggccgactgtgagctgcagataaggctatcagccaccaaagagcaatgaacaatggaaacttcagagagctgaagaaagggggaggcctgtgttcttggcctgcccctgagtcttctggctgggggcaggttgcctgggcaagaactgcttcttcaattccttaacaaatgcaaccaccaacacccagatctctctctctctttattttcagtttttttgctgttatccagataattaataaaaaccaaccacgcaaaaaaaaaaa

SEQ ID NO: 350061 - DNA, 1245 bp, Homo sapiens
agcggtgtgagccaccgcacctggcctacattatcactactattttattactatccaccttgactattgctacagcttccttattgggcttttcaccaccagtcttgcctcccttttctgcttctttttctaactgctgtttgtacccagatccccaccacgatgacttgtacctcaatgccagcagcttcctggccctgatcaatggggaaagagaccatcccaatgccacagtatggcggaagaactttctgcgtgtgggccacctggtgctgattgggggccctgatgatggtgttattactccctggcagtccaggtaataagggattttgtggcctgaagattggctaaagacatcccccaaccccagttggtctttatctcatgcctaaactggcctgctccttccactgttcagttagtgctcctccccccattcatcatgtcacccaagaccaaaacctgggagtcatatcccaaccccttgtatcaagccagtcactaagtcctgctgactcttctcctctccatccctatcaccccctcccccactttataaaaacttttaattttgaaattcttatagattcataggaaattgcaaagatagtatagcgaggcccttcacccagcttcccccagtggttgcatcctatgtaattatagcacagtatcaaaaccaggaaattcacattggttcaatgtgtgtgtgtagttttataccattttatcacatttcctaccacctctttacttacctggactattataacagcctccagctttgtcccctccatcctattccttagaaaaaaatccatggctccatggtactatgtgcttgcctgtgttataggtcaccatgtgtgatctgtaatgtcacctgagctacttgaattgctcaacaaatatttattcaacattatgggcgcaggcttgttctgggccctagggatgcagtggtaaataaaagagaagtccctaatgttatgtagcttatattctagtttgtaagatagctgatacatacatacaaatatatatgtcaggtaataaggcaggggaaaggattagaggatgtccggggcctagtttcaatagtggccgaagaagtcctcctggaaaagtcaccattcaattagagactgaaggaagtgaaggagggagttgtgctctgggtggaagaaccccccagggagaaggtctggcacctgcagaggccctgaagcacgtgtgagcaat

SEQ ID NO: 350062 - DNA, 2654 bp, Homo sapiens
  misc_feature (311)..(311): n is a, c, g, or t
ggaagtggggagaatcaaggcggggaaatcggactttcgggtcgctgggggcaacgaagcctggagaggccttctttccattcccagaatatgtttgctgctttttcctctccccactggcctaaatggatcgctccgcctgtttcctccccagcacctagggcgcaatggaatattccattgcccctcctgtcctgggtctgtgttgcggggaacgctcgcgcggttgccagagaaagccccggacgtgacggatttgcgcgaccccaagcagcccgcccttccccctcccatccgtcattcccctgcgntctctttcctcacccttccccccgccaccgtgggttccagacttgggataagtaaacagcgggtggagcgaggcctacggacccaggccaggtgggagtctgcactcttcaaggggcctgggctgctgctcacgggtattaaagaactccgcgttgttcatggctgaggcgatgcattaggaagatcctggacctagagaacaagtcccccgaacgctgagttggaggcgggacttcgggtgcgcgttggcgggagcatgctggggctctgggggcagcggctccccgcggcgtgggtcctgcttctgttgcctttcctgccgctgctgctgcttgcagcccccgcgccccaccgcgcgtcctacaagccggtcatcgtggtgcatgggctcttcgacagctcgtacagcttccgccacctgctggaatacatcaatgagacacaccccgggactgtggtgacagtgctcgatctcttcgatgggagagagagcttgcgacccctgtgggaacaggtgcaagggttccgagaggctgtggtccccatcatggcaaaggcccctcaaggggtgcatctcatctgctactcgcaggggggccttgtgtgccgggctctgctttctgtcatggatgatcacaacgtggattctttcatctccctctcctctccacagatgggacagtatggagacacggactacttgaagtggctgttccccacctccatgcggtctaacctctatcggatctgctatagcccctggggccaggaattctccatctgcaactactggcatgatccccaccacgatgacttgtacctcaatgccagcagcttcctggccctgatcaatggggaaagagaccatcccaatgccacagtatggcggaagaactttctgcgtgtgggccacctggtgctgattgggggccctgatgatggtgttattactccctggcagtccagcttctttggtttctatgatgcaaatgagaccgtcctggagatggaggagcaactgcctgccaggcccacccaccagtctgagctgcttctgctgaggctggtctgcttgaagcctcccaggagaaagaagccagcctgtagggtccagcgtcaaagcgaatcatggggtccagggctgagctgtgcactctcttaggcggattctccttcctcctgctactgataccaggcgagggggccaagggtggatccctcagagagagtcagggagtctgctccaagcagacactggtggtcccgctccactacaacgagtcctacagccaaccagtgtacaagccctacctgaccttgtgcgctgggaggcgcatctgcagcacttacaggaccatgtaccgcgttatgtggcgggaggtgaggcgggaggttcagcagacccatgcagtgtgctgccagggctggaagaagcggcacccgggggcgctcacctgtgaagccatctgcgccaagccttgcctgaacggaggcgtctgcgttaggcctgaccagtgcgagtgcgcccccggctggggagggaagcactgtcatgtggacgtggatgaatgtaggaccagcatcaccctctgctcgcaccattgttttaatacggcaggcagcttcacctgcggctgcccccatgacctagtgctaggcgtggacgggcgcacctgcatggaggggtccccagagcccccaaccagtgccagcatactcagcgtggccgttcgggaggcggaaaaagatgagcgcgctctgaagcaggagattcacgagctgcgagggcgcctggagcggctggagcagtgggccggtcaggctggggcctgggtcagagcggtgctgcccgtgccgcctgaagagctgcagccagaacaggtggctgagctgtggggccggggtgaccggatcgaatctctcagcgaccaggtgctgctgctggaggagaggctaggtgcctgctcctgtgaggacaacagcctgggcctcggcgtcaatcatcgataagaagcctctacagcacccctgccccctaatttatacagaaaccggacccactaatcctctgggattggccgactgtgagctgcagataaggctatcagccaccaaagagcaatgaacaatggaaacttcagagagctgaagaaagggggaggcctgtgttcttggcctgcccctgagtcttctggctgggggcaggttgcctgggcaagaactgcttcttcaattccttaacaaatgcaaccaccaacacccagatctctctctctctttattttcagtttttttgctgttatccagataattaataaaaaccaaccacgcaaaaaaaaaaa

SEQ ID NO: 350063 - DNA, 2727 bp, Homo sapiens
  misc_feature (311)..(311): n is a, c, g, or t
ggaagtggggagaatcaaggcggggaaatcggactttcgggtcgctgggggcaacgaagcctggagaggccttctttccattcccagaatatgtttgctgctttttcctctccccactggcctaaatggatcgctccgcctgtttcctccccagcacctagggcgcaatggaatattccattgcccctcctgtcctgggtctgtgttgcggggaacgctcgcgcggttgccagagaaagccccggacgtgacggatttgcgcgaccccaagcagcccgcccttccccctcccatccgtcattcccctgcgntctctttcctcacccttccccccgccaccgtgggttccagacttgggataagtaaacagcgggtggagcgaggcctacggacccaggccaggtgggagtctgcactcttcaaggggcctgggctgctgctcacgggtattaaagaactccgcgttgttcatggctgaggcgatgcattaggaagatcctggacctagagaacaagtcccccgaacgctgagttggaggcgggacttcgggtgcgcgttggcgggagcatgctggggctctgggggcagcggctccccgcggcgtgggtcctgcttctgttgcctttcctgccgctgctgctgcttgcagcccccgcgccccaccgcgcgtcctacaagccggtcatcgtggtgcatgggctcttcgacagctcgtacagcttccgccacctgctggaatacatcaatgagacacaccccgggactgtggtgacagtgctcgatctcttcgatgggagagagagcttgcgacccctgtgggaacaggtgcaagggttccgagaggctgtggtccccatcatggcaaaggcccctcaaggggtgcatctcatctgctactcgcaggggggccttgtgtgccgggctctgctttctgtcatggatgatcacaacgtggattctttcatctccctctcctctccacagatgggacagtatggagacacggactacttgaagtggctgttccccacctccatgcggtctaacctctatcggatctgctatagcccctggggccaggaattctccatctgcaactactggcatgatccccaccacgatgacttgtacctcaatgccagcagcttcctggccctgatcaatggggaaagagaccatcccaatgccacagtatggcggaagaactttctgcgtgtgggccacctggtgctgattgggggccctgatgatggtgttattactccctggcagtccagcttctttggtttctatgatgcaaatgagaccgtcctggagatggaggagcaactgcctgccaggcccacccaccagtctgagctgcttctgctgaggctggtctgcttgaagcctcccaggagaaagaagccagcctgtagggtccagcgtcaaagcgaatcatggggtccagggctgagctgtgcactctcttaggcggattctccttcctcctgctactgataccaggcgagggggccaagggtggatccctcagagagagtcagggagtctgctccaagcagacactggtggtcccgctccactacaacgagtcctacagccaaccagtgtacaagccctacctgaccttgtgcgctgggaggcgcatctgcagcacttacaggaccatgtaccgcgttatgtggcgggaggtgaggcgggaggttcagcagacccatgcagtgtgctgccagggctggaagaagcggcacccgggggcgctcacctgtgaagccatctgcgccaagccttgcctgaacggaggcgtctgcgttaggcctgaccagtgcgagtgcgcccccggctggggagggaagcactgtcatgtggacgtggatgaatgtaggaccagcatcaccctctgctcgcaccattgttttaatacggcaggcagcttcacctgcggctgcccccatgacctagtgctaggcgtggacgggcgcacctgcatggaggggtccccagagcccccaaccagtgccagcatactcagcgtggccgttcgggaggcggaaaaagatgagcgcgctctgaagcaggagattcacgagctgcgagggcgcctggagcggctggagcaggtgagccaagcctgctgggtggggcgaggccagacgtcactgtcaataccctgaggcatctcttcctttctagtgggccggtcaggctggggcctgggtcagagcggtgctgcccgtgccgcctgaagagctgcagccagaacaggtggctgagctgtggggccggggtgaccggatcgaatctctcagcgaccaggtgctgctgctggaggagaggctaggtgcctgctcctgtgaggacaacagcctgggcctcggcgtcaatcatcgataagaagcctctacagcacccctgccccctaatttatacagaaaccggacccactaatcctctgggattggccgactgtgagctgcagataaggctatcagccaccaaagagcaatgaacaatggaaacttcagagagctgaagaaagggggaggcctgtgttcttggcctgcccctgagtcttctggctgggggcaggttgcctgggcaagaactgcttcttcaattccttaacaaatgcaaccaccaacacccagatctctctctctctttattttcagtttttttgctgttatccagataattaataaaaaccaaccacgcaaaaaaaaaaa

SEQ ID NO: 350064 - DNA, 2068 bp, Homo sapiens
  misc_feature (311)..(311): n is a, c, g, or t
ggaagtggggagaatcaaggcggggaaatcggactttcgggtcgctgggggcaacgaagcctggagaggccttctttccattcccagaatatgtttgctgctttttcctctccccactggcctaaatggatcgctccgcctgtttcctccccagcacctagggcgcaatggaatattccattgcccctcctgtcctgggtctgtgttgcggggaacgctcgcgcggttgccagagaaagccccggacgtgacggatttgcgcgaccccaagcagcccgcccttccccctcccatccgtcattcccctgcgntctctttcctcacccttccccccgccaccgtgggttccagacttgggataagtaaacagcgggtggagcgaggcctacggacccaggccaggtgggagtctgcactcttcaaggggcctgggctgctgctcacgggtattaaagaactccgcgttgttcatggctgaggcgatgcattaggaagatcctggacctagagaacaagtcccccgaacgctgagttggaggcgggacttcgggtgcgcgttggcgggagcatgctggggctctgggggcagcggctccccgcggcgtgggtcctgcttctgttgcctttcctgccgctgctgctgcttgcagcccccgcgccccaccgcgcgtcctacaagccggtcatcgtggtgcatgggctcttcgacagctcgtacagcttccgccacctgctggaatacatcaatgagggggccttgtgtgccgggctctgctttctgtcatggatgatcacaacgtggattctttcatctccctctcctctccacagatgggacagtatggagacacggactacttgaagtggctgttccccacctccatgcggtctaacctctatcggatctgctatagcccctggggccaggaattctccatctgcaactactggcatgatccccaccacgatgacttgtacctcaatgccagcagcttcctggccctgatcaatggggaaagagaccatcccaatgccacagtatggcggaagaactttctgcgtgtgggccacctggtgctgattgggggccctgatgatggtgttattactccctggcagtccagcttctttggtttctatgatgcaaatgagaccgtcctggagatggaggagcaactggtttatctgcgggattcttttgggttgaagactctattggcccggggggccatagtgaggtgtccaatggccggtatctcccacacagcctggcactccaaccgtaccctttatgagacctgcattgaaccttggctctcctgaggatatattcaggggtccccaggaactcctcggtccagagaccaagtggtggccttggaaagcagatgtcaggctttggtgtgcctgtgaccacctcattgctcccatattatcccccatttttagtagagacggggttttagtagagacttggcctcccagaacccccttcctctgctcctccatgaatgacaattccaggcctcccctacctcatgtcctctcatttgggggattgctccgtgctgtccctttctctcaaggccgaagttgggaagtgagaaaccatgtttttaacttgtggctgcttttgctgctgctgctcctccgtatctggctgtatgggtggagaacccaccccctgcccaccacaggggtctccttccaggccactcaggacatttttagcttctctcctccccatgttcccttttttctctaaagtcccctgacatcagccctcccaactcctaagagggactacccatgagagtggggttctgaggctcccctatggggacagttccgttcttgaagtgtcagtgttggggaatatctgtggcctatgaggcccatctcaggtttggggatcccccagtccctatgatcagtgttggagtacccccctgggagagcctagtttctttgaggccccaggccctcttttaactacctttgaataggtgttatccctgtatttatggaaataaagttccatttcctcagtagtgcacaatggatctca

SEQ ID NO: 350065 - DNA, 2126 bp, Homo sapiens
  misc_feature (311)..(311): n is a, c, g, or t
ggaagtggggagaatcaaggcggggaaatcggactttcgggtcgctgggggcaacgaagcctggagaggccttctttccattcccagaatatgtttgctgctttttcctctccccactggcctaaatggatcgctccgcctgtttcctccccagcacctagggcgcaatggaatattccattgcccctcctgtcctgggtctgtgttgcggggaacgctcgcgcggttgccagagaaagccccggacgtgacggatttgcgcgaccccaagcagcccgcccttccccctcccatccgtcattcccctgcgntctctttcctcacccttccccccgccaccgtgggttccagacttgggataagtaaacagcgggtggagcgaggcctacggacccaggccaggtgggagtctgcactcttcaaggggcctgggctgctgctcacgggtattaaagaactccgcgttgttcatggctgaggcgatgcattaggaagatcctggacctagagaacaagtcccccgaacgctgagttggaggcgggacttcgggtgcgcgttggcgggagcatgctggggctctgggggcagcggctccccgcggcgtgggtcctgcttctgttgcctttcctgccgctgctgctgcttgcagcccccgcgccccaccgcgcgtcctacaagccggtcatcgtggtgcatgggctcttcgacagctcgtacagcttccgccacctgctggaatacatcaatgagacacaccccgggactgtggtgacagtgctcgatctcttcgatgggagagagagcttgcgacccctgtgggaacaggtgcaagggttccgagaggctgtggtccccatcatggcaaaggcccctcaaggggtgcatctcatctgctactcgcaggacacggactacttgaagtggctgttccccacctccatgcggtctaacctctatcggatctgctatagcccctggggccaggaattctccatctgcaactactggcatgatccccaccacgatgacttgtacctcaatgccagcagcttcctggccctgatcaatggggaaagagaccatcccaatgccacagtatggcggaagaactttctgcgtgtgggccacctggtgctgattgggggccctgatgatggtgttattactccctggcagtccagcttctttggtttctatgatgcaaatgagaccgtcctggagatggaggagcaactggtttatctgcgggattcttttgggttgaagactctattggcccggggggccatagtgaggtgtccaatggccggtatctcccacacagcctggcactccaaccgtaccctttatgagacctgcattgaaccttggctctcctgaggatatattcaggggtccccaggaactcctcggtccagagaccaagtggtggccttggaaagcagatgtcaggctttggtgtgcctgtgaccacctcattgctcccatattatcccccatttttagtagagacggggttttagtagagacttggcctcccagaacccccttcctctgctcctccatgaatgacaattccaggcctcccctacctcatgtcctctcatttgggggattgctccgtgctgtccctttctctcaaggccgaagttgggaagtgagaaaccatgtttttaacttgtggctgcttttgctgctgctgctcctccgtatctggctgtatgggtggagaacccaccccctgcccaccacaggggtctccttccaggccactcaggacatttttagcttctctcctccccatgttcccttttttctctaaagtcccctgacatcagccctcccaactcctaagagggactacccatgagagtggggttctgaggctcccctatggggacagttccgttcttgaagtgtcagtgttggggaatatctgtggcctatgaggcccatctcaggtttggggatcccccagtccctatgatcagtgttggagtacccccctgggagagcctagtttctttgaggccccaggccctcttttaactacctttgaataggtgttatccctgtatttatggaaataaagttccatttcctcagtagtgcacaatggatctca

SEQ ID NO: 350066 - DNA, 1301 bp, Homo sapiens
gaggctggtcccggccggaattagggatggcttgaagcctcccaggagaaagaagccagcctgtagggtccagcgtcaaagcgaatcatggggtccagggctgagctgtgcactctcttaggcggattctccttcctcctgctactgataccaggcgagggggccaagggtggatccctcagagagagtcagggagtctgctccaagcagacactggtggtcccgctccactacaacgagtcctacagccaaccagtgtacaagccctacctgaccttgtgcgctgggaggcgcatctgcagcacttacaggaccatgtaccgcgttatgtggcgggaggtgaggcgggaggttcagcagacccatgcagtgtgctgccagggctggaagaagcggcacccgggggcgctcacctgtgaagccatctgcgccaagccttgcctgaacggaggcgtctgcgttaggcctgaccagtgcgagtgcgcccccggctggggagggaagcactgtcatgtggacgtggatgaatgtaggaccagcatcaccctctgctcgcaccattgttttaatacggcaggcagcttcacctgcggctgcccccatgacctagtgctaggcgtggacgggcgcacctgcatggaggggtccccagagcccccaaccagtgccagcatactcagcgtggccgttcgggaggcggaaaaagatgagcgcgctctgaagcaggagattcacgagctgcgagggcgcctggagcggctggagcagtgggccggtcaggctggggcctgggtcagagcggtgctgcccgtgccgcctgaagagctgcagccagaacaggtggctgagctgtggggccggggtgaccggatcgaatctctcagcgaccaggtgctgctgctggaggagaggctaggtgcctgctcctgtgaggacaacagcctgggcctcggcgtcaatcatcgataagaagcctctacagcacccctgccccctaatttatacagaaaccggacccactaatcctctgggattggccgactgtgagctgcagataaggctatcagccaccaaagagcaatgaacaatggaaacttcagagagctgaagaaagggggaggcctgtgttcttggcctgcccctgagtcttctggctgggggcaggttgcctgggcaagaactgcttcttcaattccttaacaaatgcaaccaccaacacccagatctctctctctctttattttcagtttttttgctgttatccagataattaataaaaaccaaccacgcaaaaaaaaaaa

SEQ ID NO: 350067 - DNA, 1368 bp, Homo sapiens
  misc_feature (311)..(311): n is a, c, g, or t
ggaagtggggagaatcaaggcggggaaatcggactttcgggtcgctgggggcaacgaagcctggagaggccttctttccattcccagaatatgtttgctgctttttcctctccccactggcctaaatggatcgctccgcctgtttcctccccagcacctagggcgcaatggaatattccattgcccctcctgtcctgggtctgtgttgcggggaacgctcgcgcggttgccagagaaagccccggacgtgacggatttgcgcgaccccaagcagcccgcccttccccctcccatccgtcattcccctgcgntctctttcctcacccttccccccgccaccgtgggttccagacttgggataagtaaacagcgggtggagcgaggcctacggacccaggccaggtgggagtctgcactcttcaaggggcctgggctgctgctcacgggtattaaagaactccgcgttgttcatggctgaggcgatgcattaggaagatcctggacctagagaacaagtcccccgaacgctgagttggaggcgggacttcgggtgcgcgttggcgggagcatgctggggctctgggggcagcggctccccgcggcgtgggtcctgcttctgttgcctttcctgccgctgctgctgcttgcagcccccgcgccccaccgcgcgtcctacaagccggtcatcgtggtgcatgggctcttcgacagctcgtacagcttccgccacctgctggaatacatcaatgagacacaccccgggactgtggtgacagtgctcgatctcttcgatgggagagagagcttgcgacccctgtgggaacaggtgcaagggttccgagaggctgtggtccccatcatggcaaaggcccctcaaggggtgcatctcatctgctactcgcaggggggccttgtgtgccgggctctgctttctgtcatggatgatcacaacgtggattctttcatctccctctcctctccacagatgggacagtatggagacacggactacttgaagtggctgttccccacctccatgcggtctaacctctatcggatctgctatagcccctggggccaggaattctccatctgcaactactggcatgatccccaccacgatgacttgtacctcaatgccagcagcttcctggccctgatcaatggggaaagagaccatcccaatgccacagtatggcggaagaactttctgcgtgtgggccacctggtgctgattgggggccctgatgatggtgttattactccctggcagtccagctttttgggttcctatgtatcaaatgacaccgtcttgaaataggagatgaaactgttaatcgggggattctttggggttaaaactttttg

SEQ ID NO: 350068 - DNA, 387 bp, Homo sapiens
caaatgagaccgtcctggagatggaggagcaactggtgagccccctgggattacttccccttctagccgctgtcccaccttattccagagccctctctgtgactcctgagctgaagggttcaccctgtggggaggaggtccaggatcccagcagtaactcactttgtctctccttgtgtctctcttccatgcttccacgccccttcgaccaccttgaaggtttatctgcgggattcttttgggttgaagactctattggcccggggggccatagtgaggtgtccaatggccggtatctcccacacagcctggcactccaaccgtaccctttatgagacctgcattgaaccttggctctcctgaggatatattcaggggtccccagga

SEQ ID NO: 350069 - DNA, 2464 bp, Homo sapiens
taggcttctccaagctgccaaatttaagtattgagtacataaaaggaggagattggcattagtgagaacatggccctgaggcttgatggacccaaagcctcccagggtatgtgcgttttgagggggtggggggtgcacatgggtgtccgggacctcgtctaggtaatgtctgcagccacataggatgatctgactgaatctgtgtgaggacaaccgtttgtgtgcctgtgtgtgcgcgcccacgtgcatgcgcgtgtgtggtcctagtgtaggtgatgtctgcggccacacaggatgctgactgcgtgtgtgactcgtgggcgtgcagatgcaagcacaggcctacgacacatctgtgtacaggctgaagatcacaacgggtctggccagggcccgccgagggcctccgagctggcgagcacaccgacggctggatggggcgacgcttcctgctccggtccctaactcattattaagctcctcgctctttgcagacgctccctgcgcctcccccgctccgggctgcagcggcgcaggcgccgggccgagccgagcgccgagcagggagcgggcggccgcgctccgggccggggtcccgggggagcagatcctcagaatggcccttggtgctgcaggcgcggtgggctccgggcccaggcaccgagggggcactggatgactctccaggtgcaggaccctgccatctatgactccaggtcttcagcacccacccaccgtggtacagcgccccgggatgccgtctggagcccggatgccccaccagggggcgcccatgggccccccgggctccccgtacatgggcagccccgccgtgcgacccggcctggcccccgcgggcatggagcccgcccgcaagcgagcagcgcccccgcccgggcagagccaggcacagagccagggccagccggtgcccaccgcccccgcgcggagccgcagtgccaagaggaggaagatggctgacaaaatcctccctcaaaggattcgggagctggtccccgagtcccaggcttacatggacctcttggcatttgagaggaaactggatcaaaccatcatgcggaagcgggtggacatccaggaggctctgaagaggcccatgaagcaaaagcggaagctgcgactctatatctccaacacttttaaccctgcgaagcctgatgctgaggattccgacggcagcattgcctcctgggagctacgggtggaggggaagctcctggatgatcccagcaaacagaagcggaagttctcttctttcttcaagagtttggtcatcgagctggacaaagatctttatggccctgacaaccacctcgttgagtggcatcggacacccacgacccaggagacggacggcttccaggtgaaacggcctggggacctgagtgtgcgctgcacgctgctcctcatgctggactaccagcctccccagttcaaactggatccccgcctagcccggctgctggggctgcacacacagagccgctcagccattgtccaggccctgtggcagtatgtgaagaccaacaggctgcaggactcccatgacaaggaatacatcaatggggacaagtatttccagcagatttttgattgtccccggctgaagttttctgagattccccagcgcctcacagccctgctattgccccctgacccaattgtcatcaaccatgtcatcagcgtggacccttcagaccagaagaagacggcgtgctatgacattgacgtggaggtggaggagccattaaaggggcagatgagcagcttcctcctatccacggccaaccagcaggagatcagtgctctggacagtaagatccatgagacgattgagtccataaaccagctcaagatccagagggacttcatgctaagcttctccagagaccccaaaggctatgtccaagacctgctccgctcccagagccgggacctcaaggtgatgacagatgtagccggcaaccctgaagaggagcgccgggctgagttctaccaccagccctggtcccaggaggccgtcagtcgctacttctactgcaagatccagcagcgcaggcaggagctggagcagtcgctggttgtgcgcaacacctaggagcccaaaaataagcagcacgacggaactttcagccgtgtcccgggccccagcattttgccccgggctccagcatcactcctctgccaccttggggtgtggggctggattaaaagtcattcatctgacagcattccgtgtggtcattggaaactggggaggggagggggagagaaggggaagggaagaaggtggggaggcagtgggtccctcgggacgactccccattcccttcccttggattcttctccttactcaattttccctagacctaaaaacagtttggcagaagacatgtttaataacattttcatatttaaaaaatacagcaacaattctctatct

SEQ ID NO: 350070 - DNA, 1364 bp, Homo sapiens
  misc_feature (1213)..(1213): n is a, c, g, or t
gggcccccaggaggcagcccttcaggggctgcctgggccaggatgagctgtgtgaccttggcgaggtcatttttctccttgagccacagtggccccatccgtcaagtggggatgaaaggacctgctcaggctgtcttgcagaggagcatgtggatgtgaacatctttgaaagcgccccgggatgccgtctggagcccggatgccccaccagggggcgcccatgggccccccgggctccccgtacatgggcagccccgccgtgcgacccggcctggcccccgcgggcatggagcccgcccgcaagcgagcagcgcccccgcccgggcagagccaggcacagagccagggccagccggtgcccaccgcccccgcgcggagccgcagtgccaagaggaggaagatggctgacaaaatcctccctcaaaggattcgggagctggtccccgagtcccaggcttacatggacctcttggcatttgagaggaaactggatcaaaccatcatgcggaagcgggtggacatccaggaggctctgaagaggcccatgaagcaaaagcggaagctgcgactctatatctccaacacttttaaccctgcgaagcctgatgctgaggattccgacggcagcattgcctcctgggagctacgggtggaggggaagctcctggatgatcccagaaaaaagaaaggggaaaggttctctatcttcatcctcccaaagacgttggggcccattccgaggctggacaacacagattcttttagtgcccgcgggccttgtcagtagtagaccaacccacccttcgttcaggattgtgggcactcgggacacccccaagggaggaaacccccccctaataggggggtcgtgacacacacctagccaacacaaccccgctcggtagcgagcagcaacaaacacaccgacgggcggaggacgccagagagaccgactacaccaacacctacctttcatatcctacctactccctcccacacgcccacacccatcccaatactatacaaccgtggggtgttgctccgcctgcgcgacaccctgcctccaccccacaccattctagtaagcgagcaccaacaacaaccaccacaaaccaccacgacaacctactcgatccacatccgctctccctgcaccattgcgcgagacacagtagatgttcacatcgcccacacgacaccacaactaacgacntaccgccatatcgcaactatccactacagacggacgaaatctcatactttattcgtagtgtggcgagtgaccgaccctatccacgctcaaacaacagctatactaacacgcaccaccccaatacgagcaaccacacagccgaccaccccaa

SEQ ID NO: 350071 - DNA, 1990 bp, Homo sapiens
  misc_feature (207)..(207): n is a, c, g, or t
ggcctcggcggcttcgggctgcagcactgctgcccagcgcccgcggccgggctggtcggcgcgcctcgccgcttatctgcgctgtttggacagcgggcttggaaaggcaggcggccccgtccccgccgagtcaacaggcagaccccgggccgccggactatttctgtcttatcagtgcaggaatgcggcagccgcggcggcggcggncggcggcgggcgggcggcggcggcgtgggccgtgggccgtcagggcagccctgaaggggccccctccccactccgctcgagtagaagtgtgagagagcccagcaggactcagaggggagagttggaggaaaaaaaaaggcagaaaagggaaagaaagaggaagagagagagagagtgagaggagccgctgagcccaccccgatggccgcggacgaagttgccggaggggcgcgcaaagccacgaaaagcaaactttttgagtttctggtccatggggtgcgccccgggatgccgtctggagcccggatgccccaccagggggcgcccatgggccccccgggctccccgtacatgggcagccccgccgtgcgacccggcctggcccccgcgggcatggagcccgcccgcaagcgagcagcgcccccgcccgggcagagccaggcacagagccagggccagccggtgcccaccgcccccgcgcggagccgcagtgccaagaggaggaagatggctgacaaaatcctccctcaaaggattcgggagctggtccccgagtcccaggcttacatggacctcttggcatttgagaggaaactggatcaaaccatcatgcggaagcgggtggacatccaggaggctctgaagaggcccatgaagcaaaagcggaagctgcgactctatatctccaacacttttaaccctgcgaagcctgatgctgaggattccgacggcagcattgcctcctgggagctacgggtggaggggaagctcctggatgatcccagcaaacagaagcggaagttctcttctttcttcaagagtttggtcatcgagctggacaaagatctttatggccctgacaaccacctcgttgagtggcatcggacacccacgacccaggagacggacggcttccaggtgaaacggcctggggacctgagtgtgcgctgcacgctgctcctcatgctggactaccagcctccccagttcaaactggatccccgcctagcccggctgctggggctgcacacacagagccgctcagccattgtccaggccctgtggcagtatgtgaagaccaacaggctgcaggactcccatgacaaggaatacatcaatggggacaagtatttccagcagatttttgattgtccccggctgaagttttctgagattccccagcgcctcacagccctgctattgccccctgacccaattgtcatcaaccatgtcatcagcgtggacccttcagaccagaagaagacggcgtgctatgacattgacgtggaggtggaggagccattaaaggggcagatgagcagcttcctcctatccacggccaaccagcaggagatcagtgctctggacagtaagatccatgagacgattgagtccataaaccagctcaagatccagagggacttcatgctaagcttctccagagaccccaaaggctatgtccaagacctgctccgctcccagagccgggacctcaaggtgatgacagatgtagccggcaaccctgaagaggagcgccgggctgagttctaccaccagccctggtcccaggaggccgtcagtcgctacttctactgcaagatccagcagcgcaggcaggagctggagcagtcgctggttgtgcgcaacacctaggagcccaaaaataagcagcacgacggaactttcagccgtgtcccgggccccagcattttgccccgggctccagcatcactcctctgccaccttggggtgtggggctggattaaaagtcattcatctgaca

SEQ ID NO: 350072 - DNA, 1782 bp, Homo sapiens
  misc_feature (6)..(6): n is a, c, g, or t
  misc_feature (250)..(250): n is a, c, g, or t
  misc_feature (337)..(337): n is a, c, g, or t
  misc_feature (345)..(345): n is a, c, g, or t
aaggtntagttccctcctgtaggtggacagcttcagggttcctgattgaggcaccttcatgtccactgacgggtccccctgcagcagtgcccactcatactggacgatggcgtggtcatctgtgctctcgcggccgtctagaaccacccccgtctgtgggcagatgcagaaccacatcctgcccagccttgctaagtggaggcgcatccttttcctgccggggcgaggcgcgcgcggtggccaggggcgngccgtccggcgcgcggctgaggctgtagctgctgtagccgctgtgcagcgcgaacttgcagacgttgcggccgcgctccgggccggngtcccggnggagcagatcctcagaatggcccttggtgctgcaggcgcggtgggctccgggcccaggcaccgagggggcactggatgactctccaggtgcaggaccctgccatctatgactccaggtcttcagcacccacccaccgtggtacagtgccaagaggaggaagatggctgacaaaatcctccctcaaaggattcgggagctggtccccgagtcccaggcttacatggacctcttggcatttgagaggaaactggatcaaaccatcatgcggaagcgggtggacatccaggaggctctgaagaggcccatgaagcaaaagcggaagctgcgactctatatctccaacacttttaaccctgcgaagcctgatgctgaggattccgacggcagcattgcctcctgggagctacgggtggaggggaagctcctggatgatcccagcaaacagaagcggaagttctcttctttcttcaagagtttggtcatcgagctggacaaagatctttatggccctgacaaccacctcgttgagtggcatcggacacccacgacccaggagacggacggcttccaggtgaaacggcctggggacctgagtgtgcgctgcacgctgctcctcatgctggactaccagcctccccagttcaaactggatccccgcctagcccggctgctggggctgcacacacagagccgctcagccattgtccaggccctgtggcagtatgtgaagaccaacaggctgcaggactcccatgacaaggaatacatcaatggggacaagtatttccagcagatttttgattgtccccggctgaagttttctgagattccccagcgcctcacagccctgctattgccccctgacccaattgtcatcaaccatgtcatcagcgtggacccttcagaccagaagaagacggcgtgctatgacattgacgtggaggtggaggagccattaaaggggcagatgagcagcttcctcctatccacggccaaccagcaggagatcagtgctctggacagtaagatccatgagacgattgagtccataaaccagctcaagatccagagggacttcatgctaagcttctccagagaccccaaaggctatgtccaagacctgctccgctcccagagccgggacctcaaggtgatgacagatgtagccggcaaccctgaagaggagcgccgggctgagttctaccaccagccctggtcccaggaggccgtcagtcgctacttctactgcaagatccagcagcgcaggcaggagctggagcagtcgctggttgtgcgcaacacctaggagcccaaaaataagcagcacgacggaactttcagccgtgtcccgggccccagcattttgccccgggctccagcatcactcctctgccaccttggggtgtggggctggattaaaagtcattcatctgaca

SEQ ID NO: 350073 - DNA, 1637 bp, Homo sapiens
  misc_feature (1)..(1): n is a, c, g, or t
  misc_feature (4)..(4): n is a, c, g, or t
  misc_feature (6)..(6): n is a, c, g, or t
  misc_feature (13)..(15): n is a, c, g, or t
  misc_feature (19)..(20): n is a, c, g, or t
ngcngnggctcannntctnncctctcctttccagatcctcagaatggcccttggtgctgcaggcgcggtgggctccgggcccaggcaccgagggggcactggatgactctccaggtgcaggaccctgccatctatgactccaggtcttcagcacccacccaccgtggtacagcgccccgggatgccgtctggagcccggatgccccaccagggggcgcccatgggccccccgggctccccgtacatgggcagccccgccgtgcgacccggcctggcccccgcgggcatggagcccgcccgcaagcgagcagcgcccccgcccgggcagagccaggcacagagccagggccagccggtgcccaccgcccccgcgcggagccgcagtgccaagaggaggaagatggctgacaaaatcctccctcaaaggattcgggagctggtccccgagtcccaggcttacatggacctcttggcatttgagaggaaactggatcaaaccatcatgcggaagcaaaagcggaagctgcgactctatatctccaacacttttaaccctgcgaagcctgatgctgaggattccgacggcagcattgcctcctgggagctacgggtggaggggaagctcctggatgatcccagcaaacagaagcggaagttctcttctttcttcaagagtttggtcatcgagctggacaaagatctttatggccctgacaaccacctcgttgagtggcatcggacacccacgacccaggagacggacggcttccaggtgaaacggcctggggacctgagtgtgcgctgcacgctgctcctcatgctggactaccagcctccccagttcaaactggatccccgcctagcccggctgctggggctgcacacacagagccgctcagccattgtccaggccctgtggcagtatgtgaagaccaacaggctgcaggactcccatgacaaggaatacatcaatggggacaagtatttccagcagatttttgattgtccccggctgaagttttctgagattccccagcgcctcacagccctgctattgccccctgacccaattgtcatcaaccatgtcatcagcgtggacccttcagaccagaagaagacggcgtgctatgacattgacgtggaggtggaggagccattaaaggggcagatgagcagcttcctcctatccacggccaaccagcaggagatcagtgctctggacagtaagatccatgagacgattgagtccataaaccagctcaagatccagagggacttcatgctaagcttctccagagaccccaaaggctatgtccaagacctgctccgctcccagagccgggacctcaaggtgatgacagatgtagccggcaaccctgaagaggagcgccgggctgagttctaccaccagccctggtcccaggaggccgtcagtcgctacttctactgcaagatccagcagcgcaggcaggagctggagcagtcgctggttgtgcgcaacacctaggagcccaaaaataagcagcacgacggaactttcagccgtgtcccgggccccagcattttgccccgggctccagcatcactcctctgccaccttggggtgtggggctggattaaaagtcattcatctgaca

SEQ ID NO: 350074 - DNA, 2960 bp, Homo sapiens
  misc_feature (207)..(207): n is a, c, g, or t
ggcctcggcggcttcgggctgcagcactgctgcccagcgcccgcggccgggctggtcggcgcgcctcgccgcttatctgcgctgtttggacagcgggcttggaaaggcaggcggccccgtccccgccgagtcaacaggcagaccccgggccgccggactatttctgtcttatcagtgcaggaatgcggcagccgcggcggcggcggncggcggcgggcgggcggcggcggcgtgggccgtgggccgtcagggcagccctgaaggggccccctccccactccgctcgagtagaagtgtgagagagcccagcaggactcagaggggagagttggaggaaaaaaaaaggcagaaaagggaaagaaagaggaagagagagagagagtgagaggagccgctgagcccaccccgatggccgcggacgaagttgccggaggggcgcgcaaagccacgaaaagcaaactttttgagtttctggtccatggggtgcgccccgggatgccgtctggagcccggatgccccaccagggggcgcccatgggccccccgggctccccgtacatgggcagccccgccgtgcgacccggcctggcccccgcgggcatggagcccgcccgcaagcgagcagcgcccccgcccgggcagagccaggcacagagccagggccagccggtgcccaccgcccccgcgcggagccgcagtgccaagaggaggaagatggctgacaaaatcctccctcaaaggattcgggagctggtccccgagtcccaggcttacatggacctcttggcatttgagaggaaactggatcaaaccatcatgcggaagcgggtggacatccaggaggctctgaagaggcccatgaagcaaaagcggaagctgcgactctatatctccaacacttttaaccctgcgaagcctgatgctgaggattccgacggcagcattgcctcctgggagctacgggtggaggggaagctcctggatgatcccagcaaacagaagcggaagttctcttctttcttcaagagtttggtcatcgagctggacaaagatctttatggccctgacaaccacctcgttgagtggcatcggacacccacgacccaggagacggacggcttccaggtgaaacggcctggggacctgagtgtgcgctgcacgctgctcctcatgctggactaccagcctccccagttcaaactggatccccgcctagcccggctgctggggctgcacacacagagccgctcagccattgtccaggccctgtggcagtatgtgaagaccaacaggctgcaggactcccatgacaaggaatacatcaatggggacaagtatttccagcaggtaacctctctcctgaaccctgggatctggggagcaggcggagttctccagcaggggaagtacctctaccaaggtaactaccacccctcccttctagattcctgagtagcagaagcagtacacagtcatggtcttggagccaagagaccgaccaggattctagttcaggccctactgtggattagctctgtgctgcagccaatccatgttagcccccccaagttaggaagacctggaaaccctacaaagccaaccgctttctggaatgtaatattcttggcacttggagttaggatccccaggttctagtcctgagtctggactctgggtaagtgactcagcgattctgaaccttgtttccttatctttgaagtggagtgacaatacctgtcctatctactctcctgggcagttaggaaaatcaaattgctgcaaaagtgattgagcaaaattccaccaaaacagagaatattcttattaatgcatttaaaaataaatacagcagataaacctgaggagtaaaaatagcagttgatatttattgggcacttaccatgtgccaggcactgtcccaagcactttatgtgtattagttcactgacttctcacggcagccctgggagataggtattcttttcatccccactctagagatgaagacactgagccctgaggtgttaacttgctccaggttgcatagtaagtggcagaggcaggactgatacataagcaggctgacccagggcccgcactctcaacccctgccccacactgacccaccccctatcttgtcagccataccggtggctccaccaccagaccagcccaccccaatcccatccccatgcgcactgaggaatcagacttcctctcagcttcttgtggcctttctagaacaaaaggatctacaactgcatgatgatctcttcaagaagagtgatctctctctccccaattgtcctgcttcagaatttttgattgtccccggctgaagttttctgagattccccagcgcctcacagccctgctattgccccctgacccaattgtcatcaaccatgtcatcagcgtggacccttcagaccagaagaagacggcgtgctatgacattgacgtggaggtggaggagccattaaaggggcagatgagcagcttcctcctatccacggccaaccagcaggagatcagtgctctggacagtaagatccatgagacgattgagtccataaaccagctcaagatccagagggacttcatgctaagcttctccagagaccccaaaggctatgtccaagacctgctccgctcccagagccgggacctcaaggtgatgacagatgtagccggcaaccctgaagaggagcgccgggctgagttctaccaccagccctggtcccaggaggccgtcagtcgctacttctactgcaagatccagcagcgcaggcaggagctggagcagtcgctggttgtgcgcaacacctaggagcccaaaaataagcagcacgacggaactttcagccgtgtcccgggccccagcattttgccccgggctccagcatcactcctctgccaccttggggtgtggggctggattaaaagtcattcatctgaca

SEQ ID NO: 350075 - DNA, 2863 bp, Homo sapiens
  misc_feature (207)..(207): n is a, c, g, or t
ggcctcggcggcttcgggctgcagcactgctgcccagcgcccgcggccgggctggtcggcgcgcctcgccgcttatctgcgctgtttggacagcgggcttggaaaggcaggcggccccgtccccgccgagtcaacaggcagaccccgggccgccggactatttctgtcttatcagtgcaggaatgcggcagccgcggcggcggcggncggcggcgggcgggcggcggcggcgtgggccgtgggccgtcagggcagccctgaaggggccccctccccactccgctcgagtagaagtgtgagagagcccagcaggactcagaggggagagttggaggaaaaaaaaaggcagaaaagggaaagaaagaggaagagagagagagagtgagaggagccgctgagcccaccccgatggccgcggacgaagttgccggaggggcgcgcaaagccacgaaaagcaaactttttgagtttctggtccatggggtgcgccccgggatgccgtctggagcccggatgccccaccagggggcgcccatgggccccccgggctccccgtacatgggcagccccgccgtgcgacccggcctggcccccgcgggcatggagcccgcccgcaagcgagcagcgcccccgcccgggcagagccaggcacagagccagggccagccggtgcccaccgcccccgcgcggagccgcagtgccaagaggaggaagatggctgacaaaatcctccctcaaaggattcgggagctggtccccgagtcccaggcttacatggacctcttggcatttgagaggaaactggatcaaaccatcatgcggaagcgggtggacatccaggaggctctgaagaggcccatgaagcaaaagcggaagctgcgactctatatctccaacacttttaaccctgcgaagcctgatgctgaggattccgacggcagcattgcctcctgggagctacgggtggaggggaagctcctggatgatcccagcaaacagaagcggaagttctcttctttcttcaagagtttggtcatcgagctggacaaagatctttatggccctgacaaccacctcgttgagtggcatcggacacccacgacccaggagacggacggcttccaggtgaaacggcctggggacctgagtgtgcgctgcacgctgctcctcatgctggactaccagcctccccagttcaaactggatccccgcctagcccggctgctggggctgcacacacagagccgctcagccattgtccaggccctgtggcagtatgtgaagaccaacaggctgcaggactcccatgacaaggaatacatcaatggggacaagtatttccagcagattcctgagtagcagaagcagtacacagtcatggtcttggagccaagagaccgaccaggattctagttcaggccctactgtggattagctctgtgctgcagccaatccatgttagcccccccaagttaggaagacctggaaaccctacaaagccaaccgctttctggaatgtaatattcttggcacttggagttaggatccccaggttctagtcctgagtctggactctgggtaagtgactcagcgattctgaaccttgtttccttatctttgaagtggagtgacaatacctgtcctatctactctcctgggcagttaggaaaatcaaattgctgcaaaagtgattgagcaaaattccaccaaaacagagaatattcttattaatgcatttaaaaataaatacagcagataaacctgaggagtaaaaatagcagttgatatttattgggcacttaccatgtgccaggcactgtcccaagcactttatgtgtattagttcactgacttctcacggcagccctgggagataggtattcttttcatccccactctagagatgaagacactgagccctgaggtgttaacttgctccaggttgcatagtaagtggcagaggcaggactgatacataagcaggctgacccagggcccgcactctcaacccctgccccacactgacccaccccctatcttgtcagccataccggtggctccaccaccagaccagcccaccccaatcccatccccatgcgcactgaggaatcagacttcctctcagcttcttgtggcctttctagaacaaaaggatctacaactgcatgatgatctcttcaagaagagtgatctctctctccccaattgtcctgcttcagaatttttgattgtccccggctgaagttttctgagattccccagcgcctcacagccctgctattgccccctgacccaattgtcatcaaccatgtcatcagcgtggacccttcagaccagaagaagacggcgtgctatgacattgacgtggaggtggaggagccattaaaggggcagatgagcagcttcctcctatccacggccaaccagcaggagatcagtgctctggacagtaagatccatgagacgattgagtccataaaccagctcaagatccagagggacttcatgctaagcttctccagagaccccaaaggctatgtccaagacctgctccgctcccagagccgggacctcaaggtgatgacagatgtagccggcaaccctgaagaggagcgccgggctgagttctaccaccagccctggtcccaggaggccgtcagtcgctacttctactgcaagatccagcagcgcaggcaggagctggagcagtcgctggttgtgcgcaacacctaggagcccaaaaataagcagcacgacggaactttcagccgtgtcccgggccccagcattttgccccgggctccagcatcactcctctgccaccttggggtgtggggctggattaaaagtcattcatctgaca

SEQ ID NO: 350076 - DNA, 1924 bp, Homo sapiens
  misc_feature (1)..(1): n is a, c, g, or t
  misc_feature (4)..(4): n is a, c, g, or t
  misc_feature (6)..(6): n is a, c, g, or t
  misc_feature (13)..(15): n is a, c, g, or t
  misc_feature (19)..(20): n is a, c, g, or t
ngcngnggctcannntctnncctctcctttccagatcctcagaatggcccttggtgctgcaggcgcggtgggctccgggcccaggcaccgagggggcactggatgactctccaggtgcaggaccctgccatctatgactccaggtcttcagcacccacccaccgtggtacagcgccccgggatgccgtctggagcccggatgccccaccagggggcgcccatgggccccccgggctccccgtacatgggcagccccgccgtgcgacccggcctggcccccgcgggcatggagcccgcccgcaagcgagcagcgcccccgcccgggcagagccaggcacagagccagggccagccggtgcccaccgcccccgcgcggagccgcagtgccaagaggaggaagatggctgacaaaatcctccctcaaaggattcgggagctggtccccgagtcccaggcttacatggacctcttggcatttgagaggaaactggatcaaaccatcatgcggaagcgggtggacatccaggaggctctgaagaggcccatgaagcaaaagcggaagctgcgactctatatctccaacacttttaaccctgcgaagcctgatgctgaggattccgacggcagcattgcctcctgggagctacgggtggaggggaagctcctggatgatgtacgtcccggcccaggtctctccaggtgtcctggggtgggcatgggctgcactgagaacagaacaaggtgtctgcactaagggctagggagtcagcccaggctgggtggaggggcaggcctagagacattccaagtgcagaggatttcatctaagcccactgccctgtctgctgccaacttggcctccttctgctcctcccacctcatccctgttctgcccccatggtccctgttgctctcccacagcccagcaaacagaagcggaagttctcttctttcttcaagagtttggtcatcgagctggacaaagatctttatggccctgacaaccacctcgttgagtggcatcggacacccacgacccaggagacggacggcttccaggtgaaacggcctggggacctgagtgtgcgctgcacgctgctcctcatgctggactaccagcctccccagttcaaactggatccccgcctagcccggctgctggggctgcacacacagagccgctcagccattgtccaggccctgtggcagtatgtgaagaccaacaggctgcaggactcccatgacaaggaatacatcaatggggacaagtatttccagcagatttttgattgtccccggctgaagttttctgagattccccagcgcctcacagccctgctattgccccctgacccaattgtcatcaaccatgtcatcagcgtggacccttcagaccagaagaagacggcgtgctatgacattgacgtggaggtggaggagccattaaaggggcagatgagcagcttcctcctatccacggccaaccagcaggagatcagtgctctggacagtaagatccatgagacgattgagtccataaaccagctcaagatccagagggacttcatgctaagcttctccagagaccccaaaggctatgtccaagacctgctccgctcccagagccgggacctcaaggtgatgacagatgtagccggcaaccctgaagaggagcgccgggctgagttctaccaccagccctggtcccaggaggccgtcagtcgctacttctactgcaagatccagcagcgcaggcaggagctggagcagtcgctggttgtgcgcaacacctaggagcccaaaaataagcagcacgacggaactttcagccgtgtcccgggccccagcattttgccccgggctccagcatcactcctctgccaccttggggtgtggggctggattaaaagtcattcatctgaca

SEQ ID NO: 350077 - DNA, 2835 bp, Homo sapiens
  misc_feature (207)..(207): n is a, c, g, or t
ggcctcggcggcttcgggctgcagcactgctgcccagcgcccgcggccgggctggtcggcgcgcctcgccgcttatctgcgctgtttggacagcgggcttggaaaggcaggcggccccgtccccgccgagtcaacaggcagaccccgggccgccggactatttctgtcttatcagtgcaggaatgcggcagccgcggcggcggcggncggcggcgggcgggcggcggcggcgtgggccgtgggccgtcagggcagccctgaaggggccccctccccactccgctcgagtagaagtgtgagagagcccagcaggactcagaggggagagttggaggaaaaaaaaaggcagaaaagggaaagaaagaggaagagagagagagagtgagaggagccgctgagcccaccccgatggccgcggacgaagttgccggaggggcgcgcaaagccacgaaaagcaaactttttgagtttctggtccatggggtgcgccccgggatgccgtctggagcccggatgccccaccagggggcgcccatgggccccccgggctccccgtacatgggcagccccgccgtgcgacccggcctggcccccgcgggcatggagcccgcccgcaagcgagcagcgcccccgcccgggcagagccaggcacagagccagggccagccggtgcccaccgcccccgcgcggagccgcagtgccaagaggaggaagatggctgacaaaatcctccctcaaaggattcgggagctggtccccgagtcccaggcttacatggacctcttggcatttgagaggaaactggatcaaaccatcatgcggaagcgggtggacatccaggaggctctgaagaggcccatgaagcaaaagcggaagctgcgactctatatctccaacacttttaaccctgcgaagcctgatgctgaggattccgacggcagcattgcctcctgggagctacgggtggaggggaagctcctggatgatcccagcaaacagaagcggaagttctcttctttcttcaagagtttggtcatcgagctggacaaagatctttatggccctgacaaccacctcgttgagtggcatcggacacccacgacccaggagacggacggcttccaggtgaaacggcctggggacctgagtgtgcgctgcacgctgctcctcatgctggactaccagcctccccagttcaaactggatccccgcctagcccggctgctggggctgcacacacagagccgctcagccattgtccaggccctgtggcagtatgtgaagaccaacaggctgcaggactcccatgacaaggaatacatcaatggggacaagtatttccagcaggtaacctctctcctgaaccctgggatctggggagcaggcggagttctccagcaggggaagtacctctaccaaggtaactaccacccctcccttctagattcctgagtagcagaagcagtacacagtcatggtcttggagccaagagaccgaccaggattctagttcaggccctactgtggattagctctgtgctgcagccaatccatgttagcccccccaagttaggaagacctggaaaccctacaaagccaaccgctttctggaatgtaatattcttggcacttggagttaggatccccaggttctagtcctgagtctggactctgggtaagtgactcagcgattctgaaccttgtttccttatctttgaagtggagtgacaatacctgtcctatctactctcctgggcagttaggaaaatcaaattgctgcaaaagtgattgagcaaaattccaccaaaacagagaatattcttattaatgcatttaaaaataaatacagcagataaacctgaggagtaaaaatagcagttgatatttattgggcacttaccatgtgccaggcactgtcccaagcactttatgtgtattagttcactgacttctcacggcagccctgggagataggtattcttttcatccccactctagagatgaagacactgagccctgaggtgttaacttgctccaggttgcatagtaagtggcagaggcaggactgatacataagcaggctgacccagggcccgcactctcaacccctgccccacactgacccaccccctatcttgtcagccataccggtggctccaccaccagaccagcccaccccaatcccatccccatgcgcactgaggaatcagacttcctctcagcttcttgtggcctttctagaacaaaaggatctacaactgcatgatgatctcttcaagaagagtgatctctctctccccaattgtcctgcttcagaatttttgattgtccccggctgaagttttctgagattccccagcgcctcacagccctgctattgccccctgacccaattgtcatcaaccatgtcatcaggtgaggtggccccagcttgcttctcagaccagggaatgatctcgttcctgccttccctgcccctccctctcctcccactcccatctcttctccctccctgttggatctgccccagccccggggccctggggcccgtatgggggcatcgtggacacgaagggctggacttccctggcagcgtggacccttcagaccagaagaagacggcgtgctatgacattgacgtggaggtggaggagccattaaaggggcagatgagcagcttcctcctatccacggccaaccagcaggagatcagtgctctggacagtaaggtggggcccaagcccagagctggagtgggacattaacccagagatgatagaggagacttttctgagaccagggtgtggttgcagatgagcagtctgggttaaatta

SEQ ID NO: 350078 - DNA, 1364 bp, Homo sapiens
  misc_feature (1)..(1): n is a, c, g, or t
  misc_feature (4)..(4): n is a, c, g, or t
  misc_feature (6)..(6): n is a, c, g, or t
  misc_feature (13)..(15): n is a, c, g, or t
  misc_feature (19)..(20): n is a, c, g, or t
  misc_feature (1213)..(1213): n is a, c, g, or t
ngcngnggctcannntctnncctctcctttccagatcctcagaatggcccttggtgctgcaggcgcggtgggctccgggcccaggcaccgagggggcactggatgactctccaggtgcaggaccctgccatctatgactccaggtcttcagcacccacccaccgtggtacagcgccccgggatgccgtctggagcccggatgccccaccagggggcgcccatgggccccccgggctccccgtacatgggcagccccgccgtgcgacccggcctggcccccgcgggcatggagcccgcccgcaagcgagcagcgcccccgcccgggcagagccaggcacagagccagggccagccggtgcccaccgcccccgcgcggagccgcagtgccaagaggaggaagatggctgacaaaatcctccctcaaaggattcgggagctggtccccgagtcccaggcttacatggacctcttggcatttgagaggaaactggatcaaaccatcatgcggaagcgggtggacatccaggaggctctgaagaggcccatgaagcaaaagcggaagctgcgactctatatctccaacacttttaaccctgcgaagcctgatgctgaggattccgacggcagcattgcctcctgggagctacgggtggaggggaagctcctggatgatcccagaaaaaagaaaggggaaaggttctctatcttcatcctcccaaagacgttggggcccattccgaggctggacaacacagattcttttagtgcccgcgggccttgtcagtagtagaccaacccacccttcgttcaggattgtgggcactcgggacacccccaagggaggaaacccccccctaataggggggtcgtgacacacacctagccaacacaaccccgctcggtagcgagcagcaacaaacacaccgacgggcggaggacgccagagagaccgactacaccaacacctacctttcatatcctacctactccctcccacacgcccacacccatcccaatactatacaaccgtggggtgttgctccgcctgcgcgacaccctgcctccaccccacaccattctagtaagcgagcaccaacaacaaccaccacaaaccaccacgacaacctactcgatccacatccgctctccctgcaccattgcgcgagacacagtagatgttcacatcgcccacacgacaccacaactaacgacntaccgccatatcgcaactatccactacagacggacgaaatctcatactttattcgtagtgtggcgagtgaccgaccctatccacgctcaaacaacagctatactaacacgcaccaccccaatacgagcaaccacacagccgaccaccccaa

SEQ ID NO: 350079 - DNA, 1676 bp, Homo sapiens
  misc_feature (1)..(1): n is a, c, g, or t
  misc_feature (4)..(4): n is a, c, g, or t
  misc_feature (6)..(6): n is a, c, g, or t
  misc_feature (13)..(15): n is a, c, g, or t
  misc_feature (19)..(20): n is a, c, g, or t
ngcngnggctcannntctnncctctcctttccagatcctcagaatggcccttggtgctgcaggcgcggtgggctccgggcccaggcaccgagggggcactggatgactctccaggtgcaggaccctgccatctatgactccaggtcttcagcacccacccaccgtggtacagcgccccgggatgccgtctggagcccggatgccccaccagggggcgcccatgggccccccgggctccccgtacatgggcagccccgccgtgcgacccggcctggcccccgcgggcatggagcccgcccgcaagcgagcagcgcccccgcccgggcagagccaggcacagagccagggccagccggtgcccaccgcccccgcgcggagccgcagtgccaagaggaggaagatggctgacaaaatcctccctcaaaggattcgggagctggtccccgagtcccaggcttacatggacctcttggcatttgagaggaaactggatcaaaccatcatgcggaagcgggtggacatccaggaggctctgaagaggcccatgaagcaaaagcggaagctgcgactctatatctccaacacttttaaccctgcgaagcctgatgctgaggattccgacggcagcattgcctcctgggagctacgggtggaggggaagctcctggatgatcccagcaaacagaagcggaagttctcttctttcttcaagagtttggtcatcgagctggacaaagatctttatggccctgacaaccacctcgttgagtggcatcggacacccacgacccaggagacggacggcttccaggtgaaacggcctggggacctgagtgtgcgctgcacgctgctcctcatgctggactaccagcctccccagttcaaactggatccccgcctagcccggctgctggggctgcacacacagagccgctcagccattgtccaggccctgtggcagtatgtgaagaccaacaggctgcaggactcccatgacaaggaatacatcaatggggacaagtatttccagcagatttttgattgtccccggctgaagttttctgagattccccagcgcctcacagccctgctattgccccctgacccaattgtcatcaaccatgtcatcagcgtggacccttcagaccagaagaagacggcgtgctatgacattgacgtggaggtggaggagccattaaaggggcagatgagcagcttcctcctatccacggccaaccagcaggagatcagtgctctggacagtaagatccatgagacgattgagtccataaaccagctcaagatccagagggacttcatgctaagcttctccagagaccccaaaggctatgtccaagacctgctccgctcccagagccgggacctcaaggtgatgacagatgtagccggcaaccctgaagaggagcgccgggctgagttctaccaccagccctggtcccaggaggccgtcagtcgctacttctactgcaagatccagcagcgcaggcaggagctggagcagtcgctggttgtgcgcaacacctaggagcccaaaaataagcagcacgacggaactttcagccgtgtcccgggccccagcattttgccccgggctccagcatcactcctctgccaccttggggtgtggggctggattaaaagtcattcatctgaca

SEQ ID NO: 350080 - DNA, 1296 bp, Homo sapiens
  misc_feature (207)..(207): n is a, c, g, or t
ggcctcggcggcttcgggctgcagcactgctgcccagcgcccgcggccgggctggtcggcgcgcctcgccgcttatctgcgctgtttggacagcgggcttggaaaggcaggcggccccgtccccgccgagtcaacaggcagaccccgggccgccggactatttctgtcttatcagtgcaggaatgcggcagccgcggcggcggcggncggcggcgggcgggcggcggcggcgtgggccgtgggccgtcagggcagccctgaaggggccccctccccactccgctcgagtagaagtgtgagagagcccagcaggactcagaggggagagttggaggaaaaaaaaaggcagaaaagggaaagaaagaggaagagagagagagagtgagaggagccgctgagcccaccccgatggccgcggacgaagttgccggaggggcgcgcaaagccacgaaaagcaaactttttgagtttctggtccatggggtgcgccccgggatgccgtctggagcccggatgccccaccagggggcgcccatgggccccccgggctccccgtacatgggcagccccgccgtgcgacccggcctggcccccgcgggcatggagcccgcccgcaagcgagcagcgcccccgcccgggcagagccaggcacagagccagggccagccggtgcccaccgcccccgcgcggagccgcagtgccaagaggaggaagatggctgacaaaatcctccctcaaaggattcgggagctggtccccgagtcccaggcttacatggacctcttggcatttgagaggaaactggatcaaaccatcatgcggaagcgggtggacatccaggaggctctgaagaggcccatgaagcaaaagcggaagctgcgactctatatctccaacacttttaaccctgcgaagcctgatgctgaggattccgacggcagcattgcctcctgggagctacgggtggaggggaagctcctggatgatcccagcaaacagaagcggaagttctcttctttcttcaagagtttggtcatcgagctggacaaagatctttatggccctgacaaccacctcgttgagtggcatcggacacccacgacccaggagacggacggcttccaggtgaaacggcctggggacctgagtgtgcgctgcacgctgctcctcatgctggactaccagcctccccagttcaaactggatccccgcctagcccggctgctgggggtggcaacaagcgtcacattgccgccttgcgttttaacaccgctggacccgccgctcttcgggcca

SEQ ID NO: 350081 - DNA, 2249 bp, Homo sapiens
taggcttctccaagctgccaaatttaagtattgagtacataaaaggaggagattggcattagtgagaacatggccctgaggcttgatggacccaaagcctcccagggtatgtgcgttttgagggggtggggggtgcacatgggtgtccgggacctcgtctaggtaatgtctgcagccacataggatgatctgactgaatctgtgtgaggacaaccgtttgtgtgcctgtgtgtgcgcgcccacgtgcatgcgcgtgtgtggtcctagtgtaggtgatgtctgcggccacacaggatgctgactgcgtgtgtgactcgtgggcgtgcagatgcaagcacaggcctacgacacatctgtgtacaggctgaagatcacaacgggtctggccagggcccgccgagggcctccgagctggcgagcacaccgacggctggatggggcgacgcttcctgctccggtccctaactcattattaagctcctcgctctttgcagacgctccctgcgcctcccccgctccgggctgcagcggcgcaggcgccgggccgagccgagcgccgagcagggagcgggcggccgcgctccgggccggggtcccgggggagcagatcctcagaatggcccttggtgctgcaggcgcggtgggctccgggcccaggcaccgagggggcactggatgactctccaggtgcaggaccctgccatctatgactccaggtcttcagcacccacccaccgtggtacagcgccccgggatgccgtctggagcccggatgccccaccagggggcgcccatgggccccccgggctccccgtacatgggcagccccgccgtgcgacccggcctggcccccgcgggcatggagcccgcccgcaagcgagcagcgcccccgcccgggcagagccaggcacagagccagggccagccggtgcccaccgcccccgcgcggagccgcagtgccaagaggaggaagatggctgacaaaatcctccctcaaaggattcgggagctggtccccgagtcccaggcttacatggacctcttggcatttgagaggaaactggatcaaaccatcatgcggaagcgggtggacatccaggaggctctgaagaggcccatgaagcaaaagcggaagctgcgactctatatctccaacacttttaaccctgcgaagcctgatgctgaggattccgacggcagcattgcctcctgggagctacgggtggaggggaagctcctggatgatcccagcaaacagaagcggaagttctcttctttcttcaagagtttggtcatcgagctggacaaagatctttatggccctgacaaccacctcgttgagtggcatcggacacccacgacccaggagacggacggcttccaggtgaaacggcctggggacctgagtgtgcgctgcacgctgctcctcatgctggactaccagcctccccagttcaaactggatccccgcctagcccggctgctggggctgcacacacagagccgctcagccattgtccaggccctgtggcagtatgtgaagaccaacaggctgcaggactcccatgacaaggaatacatcaatggggacaagtatttccagcagatttttgattgtccccggctgaagttttctgagattccccagcgcctcacagccctgctattgccccctgacccaattgtcatcaaccatgtcatcagcgtggacccttcagaccagaagaagacggcgtgctatgacattgacgtggaggtggaggagccattaaaggggcagatgagcagcttcctcctatccacggccaaccagcaggagatcagtgctctggacagtaagatccatgagacgattgagtccataaaccagctcaagatccagagggacttcatgctaagcttctccagagaccccaaaggctatgtccaagacctgctccgctcccagagccgggacctcaaggtgatgacagatgtagccggcaaccctgaagaggagcgccgggctgagttctaccaccagccctggtcccaggaggccgtcagtcgctacttctactgcaagatccagcagcgcaggcaggagctggagcagtcgctggttgtgcgcaacacctaggagcccaaaaataagcagcacgacggaactttcagccgtgtcccgggccccagcattttgccccgggctccagcatcactcctctgccaccttggggtgtggggctggattaaaagtcattcatctgaca

SEQ ID NO: 350082 - DNA, 1688 bp, Homo sapiens
gagggaaggcagcagcaccctcatgtcacagatgaggacagagctccagggaggaaacggcattccccgggccacatggcccgacatgagcagatcccaagtcgaccagaagccacaaggctgccccccagatccctggcagccaacatctggatgcagccagcatctgtagagagatgggaagcgccccgggatgccgtctggagcccggatgccccaccagggggcgcccatgggccccccgggctccccgtacatgggcagccccgccgtgcgacccggcctggcccccgcgggcatggagcccgcccgcaagcgagcagcgcccccgcccgggcagagccaggcacagagccagggccagccggtgcccaccgcccccgcgcggagccgcagtgccaagaggaggaagatggctgacaaaatcctccctcaaaggattcgggagctggtccccgagtcccaggcttacatggacctcttggcatttgagaggaaactggatcaaaccatcatgcggaagcgggtggacatccaggaggctctgaagaggcccatgaagcaaaagcggaagctgcgactctatatctccaacacttttaaccctgcgaagcctgatgctgaggattccgacggcagcattgcctcctgggagctacgggtggaggggaagctcctggatgatcccagcaaacagaagcggaagttctcttctttcttcaagagtttggtcatcgagctggacaaagatctttatggccctgacaaccacctcgttgagtggcatcggacacccacgacccaggagacggacggcttccaggtgaaacggcctggggacctgagtgtgcgctgcacgctgctcctcatgctggactaccagcctccccagttcaaactggatccccgcctagcccggctgctggggctgcacacacagagccgctcagccattgtccaggccctgtggcagtatgtgaagaccaacaggctgcaggactcccatgacaaggaatacatcaatggggacaagtatttccagcagatttttgattgtccccggctgaagttttctgagattccccagcgcctcacagccctgctattgccccctgacccaattgtcatcaaccatgtcatcagcgtggacccttcagaccagaagaagacggcgtgctatgacattgacgtggaggtggaggagccattaaaggggcagatgagcagcttcctcctatccacggccaaccagcaggagatcagtgctctggacagtaagatccatgagacgattgagtccataaaccagctcaagatccagagggacttcatgctaagcttctccagagaccccaaaggctatgtccaagacctgctccgctcccagagccgggacctcaaggtgatgacagatgtagccggcaaccctgaagaggagcgccgggctgagttctaccaccagccctggtcccaggaggccgtcagtcgctacttctactgcaagatccagcagcgcaggcaggagctggagcagtcgctggttgtgcgcaacacctaggagcccaaaaataagcagcacgacggaactttcagccgtgtcccgggccccagcattttgccccgggctccagcatcactcctctgccaccttggggtgtggggctggattaaaagtcattcatctgaca

SEQ ID NO: 350083 - DNA, 1951 bp, Homo sapiens
  misc_feature (207)..(207): n is a, c, g, or t
ggcctcggcggcttcgggctgcagcactgctgcccagcgcccgcggccgggctggtcggcgcgcctcgccgcttatctgcgctgtttggacagcgggcttggaaaggcaggcggccccgtccccgccgagtcaacaggcagaccccgggccgccggactatttctgtcttatcagtgcaggaatgcggcagccgcggcggcggcggncggcggcgggcgggcggcggcggcgtgggccgtgggccgtcagggcagccctgaaggggccccctccccactccgctcgagtagaagtgtgagagagcccagcaggactcagaggggagagttggaggaaaaaaaaaggcagaaaagggaaagaaagaggaagagagagagagagtgagaggagccgctgagcccaccccgatggccgcggacgaagttgccggaggggcgcgcaaagccacgaaaagcaaactttttgagtttctggtccatggggtgcgccccgggatgccgtctggagcccggatgccccaccagggggcgcccatgggccccccgggctccccgtacatgggcagccccgccgtgcgacccggcctggcccccgcgggcatggagcccgcccgcaagcgagcagcgcccccgcccgggcagagccaggcacagagccagggccagccggtgcccaccgcccccgcgcggagccgcagtgccaagaggaggaagatggctgacaaaatcctccctcaaaggattcgggagctggtccccgagtcccaggcttacatggacctcttggcatttgagaggaaactggatcaaaccatcatgcggaagcaaaagcggaagctgcgactctatatctccaacacttttaaccctgcgaagcctgatgctgaggattccgacggcagcattgcctcctgggagctacgggtggaggggaagctcctggatgatcccagcaaacagaagcggaagttctcttctttcttcaagagtttggtcatcgagctggacaaagatctttatggccctgacaaccacctcgttgagtggcatcggacacccacgacccaggagacggacggcttccaggtgaaacggcctggggacctgagtgtgcgctgcacgctgctcctcatgctggactaccagcctccccagttcaaactggatccccgcctagcccggctgctggggctgcacacacagagccgctcagccattgtccaggccctgtggcagtatgtgaagaccaacaggctgcaggactcccatgacaaggaatacatcaatggggacaagtatttccagcagatttttgattgtccccggctgaagttttctgagattccccagcgcctcacagccctgctattgccccctgacccaattgtcatcaaccatgtcatcagcgtggacccttcagaccagaagaagacggcgtgctatgacattgacgtggaggtggaggagccattaaaggggcagatgagcagcttcctcctatccacggccaaccagcaggagatcagtgctctggacagtaagatccatgagacgattgagtccataaaccagctcaagatccagagggacttcatgctaagcttctccagagaccccaaaggctatgtccaagacctgctccgctcccagagccgggacctcaaggtgatgacagatgtagccggcaaccctgaagaggagcgccgggctgagttctaccaccagccctggtcccaggaggccgtcagtcgctacttctactgcaagatccagcagcgcaggcaggagctggagcagtcgctggttgtgcgcaacacctaggagcccaaaaataagcagcacgacggaactttcagccgtgtcccgggccccagcattttgccccgggctccagcatcactcctctgccaccttggggtgtggggctggattaaaagtcattcatctgaca

SEQ ID NO: 350084 - DNA, 3138 bp, Homo sapiens
  misc_feature (207)..(207): n is a, c, g, or t
ggcctcggcggcttcgggctgcagcactgctgcccagcgcccgcggccgggctggtcggcgcgcctcgccgcttatctgcgctgtttggacagcgggcttggaaaggcaggcggccccgtccccgccgagtcaacaggcagaccccgggccgccggactatttctgtcttatcagtgcaggaatgcggcagccgcggcggcggcggncggcggcgggcgggcggcggcggcgtgggccgtgggccgtcagggcagccctgaaggggccccctccccactccgctcgagtagaagtgtgagagagcccagcaggactcagaggggagagttggaggaaaaaaaaaggcagaaaagggaaagaaagaggaagagagagagagagtgagaggagccgctgagcccaccccgatggccgcggacgaagttgccggaggggcgcgcaaagccacgaaaagcaaactttttgagtttctggtccatggggtgcgccccgggatgccgtctggagcccggatgccccaccagggggcgcccatgggccccccgggctccccgtacatgggcagccccgccgtgcgacccggcctggcccccgcgggcatggagcccgcccgcaagcgagcagcgcccccgcccgggcagagccaggcacagagccagggccagccggtgcccaccgcccccgcgcggagccgcagtgccaagaggaggaagatggctgacaaaatcctccctcaaaggattcgggagctggtccccgagtcccaggcttacatggacctcttggcatttgagaggaaactggatcaaaccatcatgcggaagcgggtggacatccaggaggctctgaagaggcccatgaagcaaaagcggaagctgcgactctatatctccaacacttttaaccctgcgaagcctgatgctgaggattccgacggcagcattgcctcctgggagctacgggtggaggggaagctcctggatgatcccagcaaacagaagcggaagttctcttctttcttcaagagtttggtcatcgagctggacaaagatctttatggccctgacaaccacctcgttgagtggcatcggacacccacgacccaggagacggacggcttccaggtgaaacggcctggggacctgagtgtgcgctgcacgctgctcctcatgctggactaccagcctccccagttcaaactggatccccgcctagcccggctgctggggctgcacacacagagccgctcagccattgtccaggccctgtggcagtatgtgaagaccaacaggctgcaggactcccatgacaaggaatacatcaatggggacaagtatttccagcaggtaacctctctcctgaaccctgggatctggggagcaggcggagttctccagcaggggaagtacctctaccaaggtaactaccacccctcccttctagattcctgagtagcagaagcagtacacagtcatggtcttggagccaagagaccgaccaggattctagttcaggccctactgtggattagctctgtgctgcagccaatccatgttagcccccccaagttaggaagacctggaaaccctacaaagccaaccgctttctggaatgtaatattcttggcacttggagttaggatccccaggttctagtcctgagtctggactctgggtaagtgactcagcgattctgaaccttgtttccttatctttgaagtggagtgacaatacctgtcctatctactctcctgggcagttaggaaaatcaaattgctgcaaaagtgattgagcaaaattccaccaaaacagagaatattcttattaatgcatttaaaaataaatacagcagataaacctgaggagtaaaaatagcagttgatatttattgggcacttaccatgtgccaggcactgtcccaagcactttatgtgtattagttcactgacttctcacggcagccctgggagataggtattcttttcatccccactctagagatgaagacactgagccctgaggtgttaacttgctccaggttgcatagtaagtggcagaggcaggactgatacataagcaggctgacccagggcccgcactctcaacccctgccccacactgacccaccccctatcttgtcagccataccggtggctccaccaccagaccagcccaccccaatcccatccccatgcgcactgaggaatcagacttcctctcagcttcttgtggcctttctagaacaaaaggatctacaactgcatgatgatctcttcaagaagagtgatctctctctccccaattgtcctgcttcagaatttttgattgtccccggctgaagttttctgagattccccagcgcctcacagccctgctattgccccctgacccaattgtcatcaaccatgtcatcaggtgaggtggccccagcttgcttctcagaccagggaatgatctcgttcctgccttccctgcccctccctctcctcccactcccatctcttctccctccctgttggatctgccccagccccggggccctggggcccgtatgggggcatcgtggacacgaagggctggacttccctggcagcgtggacccttcagaccagaagaagacggcgtgctatgacattgacgtggaggtggaggagccattaaaggggcagatgagcagcttcctcctatccacggccaaccagcaggagatcagtgctctggacagtaagatccatgagacgattgagtccataaaccagctcaagatccagagggacttcatgctaagcttctccagagaccccaaaggctatgtccaagacctgctccgctcccagagccgggacctcaaggtgatgacagatgtagccggcaaccctgaagaggagcgccgggctgagttctaccaccagccctggtcccaggaggccgtcagtcgctacttctactgcaagatccagcagcgcaggcaggagctggagcagtcgctggttgtgcgcaacacctaggagcccaaaaataagcagcacgacggaactttcagccgtgtcccgggccccagcattttgccccgggctccagcatcactcctctgccaccttggggtgtggggctggattaaaagtcattcatctgaca

SEQ ID NO: 350085 - DNA, 1687 bp, Homo sapiens
  misc_feature (207)..(207): n is a, c, g, or t
ggcctcggcggcttcgggctgcagcactgctgcccagcgcccgcggccgggctggtcggcgcgcctcgccgcttatctgcgctgtttggacagcgggcttggaaaggcaggcggccccgtccccgccgagtcaacaggcagaccccgggccgccggactatttctgtcttatcagtgcaggaatgcggcagccgcggcggcggcggncggcggcgggcgggcggcggcggcgtgggccgtgggccgtcagggcagccctgaaggggccccctccccactccgctcgagtagaagtgtgagagagcccagcaggactcagaggggagagttggaggaaaaaaaaaggcagaaaagggaaagaaagaggaagagagagagagagtgagaggagccgctgagcccaccccgatggccgcggacgaagttgccggaggggcgcgcaaagccacgaaaagcaaactttttgagtttctggtccatggggtgcgccccgggatgccgtctggagcccggatgccccaccagggggcgcccatgggccccccgggctccccgtacatgggcagccccgccgtgcgacccggcctggcccccgcgggcatggagcccgcccgcaagcgagcagcgcccccgcccgggcagagccaggcacagagccagggccagccggtgcccaccgcccccgcgcggagccgcagtgccaagaggaggaagatggctgacaaaatcctccctcaaaggattcgggagctggtccccgagtcccaggcttacatggacctcttggcatttgagaggaaactggatcaaaccatcatgcggaagcgggtggacatccaggaggctctgaagaggcccatgaagcaaaagcggaagctgcgactctatatctccaacacttttaaccctgcgaagcctgatgctgaggattccgacggcagcattgcctcctgggagctacgggtggaggggaagctcctggatgatcccagcaaacagaagcggaagttctcttctttcttcaagagtttggtcatcgagctggacaaagatctttatggccctgacaaccacctcgttgagtggcatcggacacccacgacccaggagacggacggcttccaggtgaaacggcctggggacctgagtgtgcgctgcacgctgctcctcatgctggactaccagcctccccagttcaaactggatccccgcctagcccggctgctggggctgcacacacagagccgctcagccattgtccaggccctgtggcagtatgtgaagaccaacaggctgcaggactcccatgacaaggaatacatcaatggggacaagtatttccagcagatttttgattgtccccggctgaagttttctgagattccccagcgcctcacagccctgctattgccccctgacccaattgtcatcaaccatgtcatcagcgtggacccttcagaccagaagaagacggcgtgctatgacattgacgtggaggtggaggagccattaaaggggcagatgagcagcttcctcctatccacggccaaccagcaggagatcagtgctctggacagtaaggtggggcccaagcccagagctggagtgggacattaacccagagatgatagaggagacttttctgagaccagggtgtggttgcagatgagcagtctgggttaaatta

SEQ ID NO: 350086 - DNA, 746 bp, Homo sapiens
tacggaggggcgggggcgaacggccggggcgggcgtaggagccaggggcgcggaccccagacaaggaaaccacaaggggacaagcacccagcagatccgaccgatttttgattgtccccggctgaagttttctgagattccccagcgcctcacagccctgctattgccccctgacccaattgtcatcaaccatgtcatcagcgtggacccttcagaccagaagaagacggcgtgctatgacattgacgtggaggtggaggagccattaaaggggcagatgagcagcttcctcctatccacggccaaccagcaggagatcagtgctctggacagtaagatccatgagacgattgagtccataaaccagctcaagatccagagggacttcatgctaagcttctccagagaccccaaaggctatgtccaagacctgctccgctcccagagccgggacctcaaggtgatgacagatgtagccggcaaccctgaagaggagcgccgggctgagttctaccaccagccctggtcccaggaggccgtcagtcgctacttctactgcaagatccagcagcgcaggcaggagctggagcagtcgctggttgtgcgcaacacctaggagcccaaaaataagcagcacgacggaactttcagccgtgtcccgggccccagcattttgccccgggctccagcatcactcctctgccaccttggggtgtggggctggattaaaagtcattcatctgaca

SEQ ID NO: 350087 - DNA, 499 bp, Homo sapiens
gcattcgcccggttctgcactctatttctacagcaaaagcggaagctgcgactctatatctccaacacttttaaccctgcgaagcctgatgctgaggattccgacggcagcattgcctcctgggagctacgggtggaggggaagctcctggatgatgtacgtcccggcccaggtctctccaggtgtcctggggtgggcatgggctgcactgagaacagaacaaggtgtctgcactaagggctagggagtcagcccaggctgggtggaggggcaggcctagagacattccaagtgcagaggatttcatctaagcccactgccctgtctgctgccaacttggcctccttctgctcctcccacctcatccctgttctgcccccatggtccctgttgctctcccacagcccagcaaacagaagcggaagttctcttctttcttcaagagtttggtcatcgagctggacaaagatctttatggccctgacaaccacctcgttga

SEQ ID NO: 350088 - DNA, 581 bp, Homo sapiens
tgatctcagaggatccccgcggtcttgctaacatcagtcaccagaggtgtgaagtatgatgctctctctctcctgaagcttaggaaactagatgatgcaatagaagactgcacaaatgcagtgaagcttgatgacacttacataaaagcctacttgagaagagctcagtggtaagtgcctctgatgggtagggggaagagggagttgccgctggcctcaggggaattgccttgtggatgacgaagcagacccagagatgtggtgaggtcatttggtccttccccctgcctctaggtgggattgttccagccctagactatctttatagacctccagcggaggagattgcacaagctccctcagtctcccagtgcctgtgtctaacgcccctcacggtcagtaagtttcctctgatgggagaagactggccttcctgctcacctgtcagacctcagcatggcgatcacctcctcatgacaatgcctacctgtatttttttttcctttatggcatttataattacaatgaatatctggcttacagccatctctcctactagtctagtttaatatactgatggg

SEQ ID NO: 350089 - DNA, 375 bp, Homo sapiens
gcatggttaaagattcacaaacatcacagcaactggcactgtcacaatggctcctgctggagctacaaaacagtccccagagcctatctaagatgagcaacctcagtgactgacatcagacgctcagggtgtgcgagtgtgctcgtccactaaacgtggcagaggacagatcgatggtgccctctgacgaagggttccacaaataagcatgggatacactccctcctgctcctgagggagtcacacggcatatgaacacattaaacctctgtggttttaaaaaaatgtgtttaatttggtggaaaccagcatttctcaaacttacttgatcacacaacctttttttcctccaagtgcctattaacctctcaggaa

SEQ ID NO: 350090 - DNA, 720 bp, Homo sapiens
gaaatgaccggcatgtgatgagtttcctgggccccatccctgctgtgagcacatcctttcctggtctttgcaagctgccaccagagaaccctcttctccagttccaagatccccagtgtagtgggaagaagagtgttcccccagaattcatgcccactcagaaactcagaatgtgaccttatttggaaatagggacttggcaggtataatttgttaagatctctcaataaaattgttctggatttagggtgggccctaaatcctaagaccatgccttgaaaagagaaaggagaggggagcttaaatgcagagacacagggaaaatgccatgtgaagacagaggcagagattgctgcgatgctggcacaagccaaggagtgccagaagccatcagacatgggaagaagcaggaaaggattctcccctagagctgtcatacaggatgacccgctgacatcttggtgttgtatctttagcctccagaactgtgagagaataagtttttattgttttaaacccaccagtggtactttgttacggcagccgtgggaaacgacaccaaggcattaaggtgtcttcagtgtgttaccatgggccctgcctggagtttggagaagctgctctaggatcacccagataccaggagcaatcccaccatcctggtaactacttggagtttccagaattgccatcttcagcagaacatgccacggtttcaca

SEQ ID NO: 350091 - DNA, 528 bp, Homo sapiens
aaaaaaaaaaaagacacccaataccagaaccctgcagaagggaaaagatggcgctgaatacatgaatacacagaactaggcctgagattttcatgggaataagaaaattctttcttggtttcctcaactcttcttgtgatctcaactatcttacttctgaaaacaagcaaatagatatcacttagaacagtggttctcatattgtgattcttggatgagtagtattactatcacctggcaactaattagaaatccaaattttggggctccattcaagacctactcagtgagtagaactccattccagaaattctgagggttgggctagcaacctatttttgtttgtttgttttttgagactagacggagtctcgctctgtcactcacgctagagtgcagtggcccaatctcagctcactgcaacctcccctcctgggttcaagagattctcctgcctcagcctcccgagtagctgggactacaggcgcatgccaccatacctggctaatctttgtatttttagtagag

SEQ ID NO: 350092 - DNA, 1439 bp, Homo sapiens
gtgggacagtacttggcctataggaggcgctcgagagacactggcaccaagatactggatgtgaggactgtaaagggcacataacccacattggatagggtggtccgggaaggcccgaaggtgagggcaaaggcccttagcttggagacagaccagaaagaggacctgcatggctgcagcagattcagccaagaggagggcacaagatggggtgacgatgagtgccatattcacatatgaccttgctgggctcacaccagggctggtgtgatctctgctttgtagacgagaaaaccgaggcccagagtgaacaagtcactttgcagagttgtacagctagtaagcagcaaagcaaaattcaaatccaggtcggcctgtctccattatactctgcagcctctgaaagccatcacgagctattaatacacgggcatgcgagtgatgtccccaccctcaccttcctgagtcgtgcttgctctctctccacttggtgggggacagttctgggcaggcctaaaccctgaacctgagggtgtggccacccctacccacatcccagatggctcaacctcaggactccagtcatgccccgggtgtctccggttcccagcccttttctcctgccaccttcctaccctgccggagccacagcccagcacacctgcttagatctctgcaggggcaagtcaaggcagataacccacaggcaagtgcctggtggctacgctcctcgaggaaggacatgcaccctctcacacactcccacgggtgcacacgataagccagcttgcgcatcgcatgactctcaccccaaacatgcaggtagggacaaactgaaaggcaaagaaaagtctgcagttctccagctttggggagacagggccagggagagtgcaaccagacagaggagttcttctccctgcccttttcaggaggaagacattccctcctgttccctttataaggcagctgctgaaacaggatctcccgtttgcaggggtgggcgtgggtcaggacttgggtggtttttgttgttcttcaaatgcagaggtgtgtagctgacctcatttgcagagctgatgacccaggctctgggctttctccagcctgttgatgcaaccctggctcaaatgtctgttgtagtgagctctgaggcgagcagtgaggacgggatagaagtgccctcgctgccaccagccaggccgcatggcttgcacgctgaccccatgctctcagacaccgaggagaatgcatggggtcttcctcctacccccaggccacaaggctggagttttgtttgggtttttttgtttgtttgttttagttttgtttttcttcttttttcagacgaagtttcactctctgtgcctaggctggagtgcagtggtgtgagatcacgccactgcattccagcctgggcaagagagtgagactgtctc

SEQ ID NO: 350093 - DNA, 726 bp, Homo sapiens
gtcattttggatagagcgcaccctaatgaatgtaatttaacttgagtaccccagtaaaggtcctacctgcaagtaggagagagatgaggggtcaggagtctaatagttacattggagatagagggatcttagcttgcacactccttatgggaacctaatgaacgacgatctgtcactgtccccatcacccccatatgggaacatctagttgcaggaaaacaagttcagggctcccactgattctacattatggtgagtcgtaatattatttcattacacattacaatataataataataatagagataaagtgcacaataagtgtaatgcacttgagtcatcccaaaaccatcccctcaatgacgttctgtggaaaaattgtcttccctgaaaccggttattggtgccagaaaggttggggaccgctggtctagctatctcatgttggcaaactgcaatcccacgaatcatttcttatcttagcctatgtctgggaataggggcaatctttggaattacttcttctctgaagagggtatggcatccagtcgctattgaacttcagtacactattgagaagtctaattgtcaatggccaatagattgatcctctaaattaacccactaaattatgttaaaaggattttagagatttgtcattctaaccgattgataaaaatgttaaatatataaaaagatacatcatggtgtggcagctagccttaa

SEQ ID NO: 350094 - DNA, 1408 bp, Homo sapiens
tctgacgggctcattgtgattttcagccacttgctatttgccactcagaggcaaagcggctgcaagaggtaggagaaagcaagagactccctcacctggaatagagcatccaccgcgatcccagaaaagacaaatcccgttgcaggcacttcaatccacacagcagtcctgggatgagggtcctgttaccatccccatttcacagatgaggaaactgaggcacaaagcatgaagtaacttgaacgtgcccagagtcacactgctagcaaggagcagagctggagtttaggcccaggtggcctgacctcagagcttgtgcactacccgctgcctggtacagtccacagagagggggccagtgcccggcccagaaccacatgccctggggctggagacaggtcagggcagccgaaaggtggagcgccctctccagcacttcttcctcaccccctgcggctttctcctgtgctccgactgccaccacttgcttgggcagccaagcatgacaaactggccagccaccaagcaggacttttcagaggaggagtaaaaacccttgtatgaacgtacactcttcttgtcacacacaaacgcccttccttccaccttcaaaggtgattctgagactgcccgtttttatctttgcttcagttgtgcttgatttacagcctcctgaggtgttttgttttgttttgtgttttgtctctgtcacccaggctagactgcagtggcgcgatctcagctcactgcaacctctgcctcccgggttcaagtgattctcctgcctcagcctcagcctcccaagtagctgggattacaggcacccgccaccacacctggctaactttttttgtattttcagtagagacagagtttcaccatgttggccaggctggtctcgaactcttgacctcaagtgatctgcccgcctaggcctcccaaagtgctgggactacaggcatgagccacgcgcccggcctccctgatgtttttaactaacattgctagtggtttaagttgggcaccgacaagtattagaacgtaattgcagaggtcacgttgtttgaacaccggaacttcaaggcgtgcttgaaccacctgatcaaaggagaagggactgaggaccaacaggagtggggctaaaggcatccttctgctccagtttcctgtgaacccgctcctctgagcacgcctcatcccctctcccctcccctgtcttgctcgcaaggtgccctctgggcccttcctgtccccctcctgtgtctcgtctccccatctggtatggaacctgtttgcaagtgaagcaatatctccgtgttttgtatatccacccgctcttgtagcctttggtttttgttaatgtagagaagctcagattctttattcactttgtaagctttacgccaaa

SEQ ID NO: 350095 - DNA, 301 bp, Homo sapiens
tttaagttgggcaccgacaagtattagaacgtaattgcagaggtcacgttgtttgaacaccggaacttcaaggcgtgcttgaaccacctgatcaaaggagaagggactgaggaccaacaggagtggggctaaaggcatccttctgctccagtttcctgtgaacccgctcctctgaggaaaggagtagtccccacggaagacacaggatccttctgggggtcctccttggccacgtcacacttccagactgtgtggcgggacactgaccatcaagccgacagacgtgggttttaaagctacg

SEQ ID NO: 350096 - DNA, 1508 bp, Homo sapiens
tggcatgtaacctagtaacgtgtacctcaagtgttagacgaagtgccatgtgagtttgcgttgacaagttactgtgccactgacagtcctgttcggaaaggggctccctcagagcccctgggcccagtaacccgcttctgtctcctgactcctgctggataaattgccaggtttatcaaatacaagaaaacacctgctttggctaggaggtaagtcccaaaaagaacgtcttaagtagagcaaaggcatccaccgaggccatttggtggcccctgggaagtggggaagcagggcctgagcgtccccaggctgctagggcagcagctggctcagggcacactctctcgtgccagcttctgccaccagcccagtgtccacggagccgcggggccagaggagctcagggagacctggctgtctagggcatggtacccagtatcccggtgtgtgcccatcctcagccacttgtgtctttctttccatgtgggagttctcccggtgacacctgccctccgttgagggtggaatctgtcactcatgcctttgagggacccagatggaccatccctcttctgcttgctttctacattcctaaaaacctcaacgttaatccctcaccagtcgggccgagtgtggcctcatggttctgccgcggcccagtcttctcccactggcttcacgctagagggcgccatgcgctctgggtgaaatgagacgctggtgtggggtccccatgtagagaccctcaggtccctatccagagaccctccaggcagtgctgggaagacactggtggcggggaccatgaccaggcgggtggagccatgtgtgtctcacacctgccgcccctcactttccttcccgaggtctggtaggtcctctttgggatttgctgtttatttgtatctcccttttctttgatttaagaacaatgccaagtgaaaaagctgggaatgaatttctgagttgctgagtgttccctgctcctaggtaccacgctctgtgcttctcaggcagggaggagatggattcggtggagttgggccaggacgggggcttcaccctgccccctccagactgccgaagcccccaagaagttttgagcccagctgggcctcgcctccccggctcctgggtccattttctgtactggtttgagatcacaggcatcattcagcgaatgctcttgtgtcctctgcataaagagggccctccctggagcacccccggggagctgggactctccagaaagccccgggtgagggctccgtcttgagagagagagaaatcccttctttgggcgattcagtgagttcaggaggaggaggaagcttttccttggctttgaaatcagtgtttttatggagacaaagaacagacctcagtgggaaaaatgaaaacgtaatggaacacggggaggtgtcggagaagaaaggattttccccttcgctttcagagccggcgggagtgcaggtctgttttgcttcagaagcctcacattctgcttt

SEQ ID NO: 350097 - DNA, 1626 bp, Homo sapiens
gggtaaggcgacatttcctgcccccggggccagggtgagaggagagatgatgagttgctgagtgtgcacacctttccggaacacatacacacaccctgctctgggatcccttgtgaggctgccctcatggagttccccctggcccagatatgtccccaagggagtcacgaagcccccatcccaaccttcagcaccttccagatcacagacatgacccgcaggagctgccagaacctgggctacactgcggcatctccccaggccccggaggctgcctccagcacagggaatgctgagagggcagaggaggtgcctggagaaggaagcctgttcctgcaggccgagacccgggcttggttccagaagacccaggcccactggctcctgcagcacggggcagcccctgcctggttccatggcttcatcacccggagggaggcagagaggctgctggagcccaagcctcaggggtgctacttggtgcggttcagcgagagcgcggtgaccttcgtgctgacttacaggagccggacttgctgccgccacttcctgctggcccagctcagggacgggcgccacgtggtgctgggcgaggacagcgcccacgcgcggctgcaggacctgctgctgcactacaccgcgcacccgctcagcccctacggggagacgctcaccgagcccctcgcccgacagactcctgagcctgcaggactttccctgaggaccgaagaatcaaactttggaagcaaaagccaggacccaaacccccagtacagcccaatcatcaaacaggggcaagccccagtcccgatgcagaaagagggggccggggagaaggagccctcccagctgctcaggcccaagcctcccatccccgccaaacctcagctgcccccagaagtctacacaatccctgttccacgacaccgcccggccccacgccccaagccctccaatcctatctacaatgagcctgatgaacccatagctttctatgccatgggccggggcagccctggggaagcccccagcaacatctatgtggaagtggaagatgagggcctacccgccacccttgggcaccctgtcctacggaagagctggtccaggcctgtcccaggaggccagaatacaggtggctcccagctgcattctgagaactctgtgattgggcaaggccctcccctgccccaccagcccccacccgcctggagacacaccctcccccacaatctttctagacaggtgcttcaggacagaggacaggcatggcttccccttgggcctcctcagtaggcggtctggcctgacccccaacaaagaagcctggaggtcagagaagcaaatgcggagcctgctccctcctaagaagatcccaagaatccaatggctcagtccttggtgatctaagacagcaaagaagtgtgcaaggagggccctgttagctcccactgtcctggtttctcctcctggagtctaatttccttggccctctgagccttttgagtctgggccctggtccaatgctgctgttgtctgaggaatggtttggtgagaacagatgttagaacttgtttgttgattcttgtctggctaataaatcatcaccaactgccttctcctaca

SEQ ID NO: 350098 - DNA, 1595 bp, Homo sapiens
gggtaaggcgacatttcctgcccccggggccagggtgagaggagagatgatgagttgctgagtgtgcacacctttccggaacacatacacacaccctgctctgggatcccttgtgaggctgccctcatggagttccccctggcccagatatgtccccaagcaccttccagatcacagacatgacccgcaggagctgccagaacctgggctacactgcggcatctccccaggccccggaggctgcctccagcacagggaatgctgagagggcagaggaggtgcctggagaaggaagcctgttcctgcaggccgagacccgggcttggttccagaagacccaggcccactggctcctgcagcacggggcagcccctgcctggttccatggcttcatcacccggagggaggcagagaggctgctggagcccaagcctcaggggtgctacttggtgcggttcagcgagagcgcggtgaccttcgtgctgacttacaggagccggacttgctgccgccacttcctgctggcccagctcagggacgggcgccacgtggtgctgggcgaggacagcgcccacgcgcggctgcaggacctgctgctgcactacaccgcgcacccgctcagcccctacggggagacgctcaccgagcccctcgcccgacagactcctgagcctgcaggactttccctgaggaccgaagaatcaaactttggaagcaaaagccaggacccaaacccccagtacagcccaatcatcaaacaggggcaagccccagtcccgatgcagaaagagggggccggggagaaggagccctcccagctgctcaggcccaagcctcccatccccgccaaacctcagctgcccccagaagtctacacaatccctgttccacgacaccgcccggccccacgccccaagccctccaatcctatctacaatgagcctgatgaacccatagctttctatgccatgggccggggcagccctggggaagcccccagcaacatctatgtggaagtggaagatgagggcctacccgccacccttgggcaccctgtcctacggaagagctggtccaggcctgtcccaggaggccagaatacaggtggctcccagctgcattctgagaactctgtgattgggcaaggccctcccctgccccaccagcccccacccgcctggagacacaccctcccccacaatctttctagacaggtgcttcaggacagaggacaggcatggcttccccttgggcctcctcagtaggcggtctggcctgacccccaacaaagaagcctggaggtcagagaagcaaatgcggagcctgctccctcctaagaagatcccaagaatccaatggctcagtccttggtgatctaagacagcaaagaagtgtgcaaggagggccctgttagctcccactgtcctggtttctcctcctggagtctaatttccttggccctctgagccttttgagtctgggccctggtccaatgctgctgttgtctgaggaatggtttggtgagaacagatgttagaacttgtttgttgattcttgtctggctaataaatcatcaccaactgccttctcctaca

SEQ ID NO: 350099 - DNA, 1258 bp, Homo sapiens
ggggagacagaggcgaggctggaagtgtcagagcagggttcggccccctctctccgtcacccacagggaggcagagaggctgctggagcccaagcctcaggggtgctacttggtgcggttcagcgagagcgcggtgaccttcgtgctgacttacaggagccggacttgctgccgccacttcctgctggcccagctcagggacgggcgccacgtggtgctgggcgaggacagcgcccacgcgcggctgcaggacctgctgctgcactacaccgcgcacccgctcagcccctacggggagacgctcaccgagcccctcgcccgacagactcctgagcctgcaggactttccctgaggaccgaagaatcaaactttggaagcaaaagccaggacccaaacccccagtacagcccaatcatcaaacaggggcaagccccagtcccgatgcagaaagagggggccggggagaaggagccctcccagctgctcaggcccaagcctcccatccccgccaaacctcagctgcccccagaagtctacacaatccctgttccacgacaccgcccggccccacgccccaagccctccaatcctatctacaatgagcctgatgaacccatagctttctatgccatgggccggggcagccctggggaagcccccagcaacatctatgtggaagtggaagatgagggcctacccgccacccttgggcaccctgtcctacggaagagctggtccaggcctgtcccaggaggccagaatacaggtggctcccagctgcattctgagaactctgtgattgggcaaggccctcccctgccccaccagcccccacccgcctggagacacaccctcccccacaatctttctagacaggtgcttcaggacagaggacaggcatggcttccccttgggcctcctcagtaggcggtctggcctgacccccaacaaagaagcctggaggtcagagaagcaaatgcggagcctgctccctcctaagaagatcccaagaatccaatggctcagtccttggtgatctaagacagcaaagaagtgtgcaaggagggccctgttagctcccactgtcctggtttctcctcctggagtctaatttccttggccctctgagccttttgagtctgggccctggtccaatgctgctgttgtctgaggaatggtttggtgagaacagatgttagaacttgtttgttgattcttgtctggctaataaatcatcaccaactgccttctcctaca

SEQ ID NO: 350100 - DNA, 1307 bp, Homo sapiens
gggtaaggcgacatttcctgcccccggggccagggtgagaggagagatgatgagttgctgagtgtgcacacctttccggaacacatacacacaccctgctctgggatcccttgtgaggctgccctcatggagttccccctggcccagatatgtccccaagcaccttccagatcacagacatgacccgcaggagctgccagaacctgggctacactgcggcatctccccaggccccggaggctgcctccagcacagggaatgctgagagggcagaggaggtgcctggagaaggaagcctgttcctgcaggccgagacccgggcttggttccagaagacccaggcccactggctcctgcagcacggggcagcccctgcctggttccatggcttcatcacccggagggaggcagagaggctgctggagcccaagcctcaggggtgctacttggtgcggttcagcgagagcgcggtgaccttcgtgctgacttacaggagccggacttgctgccgccacttcctgctggcccagctcagggacgggcgccacgtggtgctgggcgaggacagcgcccacgcgcggctgcaggacctgctgctgcactacaccgcgcacccgctcagcccctacggggagacgctcaccgagcccctcgcccgacagactcctgagcctgcaggactttccctgaggaccgaagaatcaaactttggaagcaaaagccaggacccaaacccccagtacagcccaatcatcaaacaggggcaagccccagtcccgatgcagaaagagggggccggggagaaggagaatacaggtggctcccagctgcattctgagaactctgtgattgggcaaggccctcccctgccccaccagcccccacccgcctggagacacaccctcccccacaatctttctagacaggtgcttcaggacagaggacaggcatggcttccccttgggcctcctcagtaggcggtctggcctgacccccaacaaagaagcctggaggtcagagaagcaaatgcggagcctgctccctcctaagaagatcccaagaatccaatggctcagtccttggtgatctaagacagcaaagaagtgtgcaaggagggccctgttagctcccactgtcctggtttctcctcctggagtctaatttccttggccctctgagccttttgagtctgggccctggtccaatgctgctgttgtctgaggaatggtttggtgagaacagatgttagaacttgtttgttgattcttgtctggctaataaatcatcaccaactgccttctcctaca

SEQ ID NO: 350101 - DNA, 686 bp, Homo sapiens
tcagcagaaaaaaagcacatgattgattagtgatgtctgccacgggtaagagcgggaggatgagcagcattacatttgtccttagtgatcaaattcagctccctcactatgcggagaagaaaacatagcctgagagggacagtgacttggccaaggtcaaggactagaaccaggcttcctgattccctgtttagtgctttgttccttaccacacatccacaaactcaagtccataggaaacatcagagatttcctcaaacaggaagtctggccactttccagagttctactgcatggaggcctgggtgcttcattggtcccctcctgtggatcctggcttaactctgtccccctgacaggtctggcctgacccccaacaaagaagcctggaggtcagagaagcaaatgcggagcctgctccctcctaagaagatcccaagaatccaatggctcagtccttggtgatctaagacagcaaagaagtgtgcaaggagggccctgttagctcccactgtcctggtttctcctcctggagtctaatttccttggccctctgagccttttgagtctgggccctggtccaatgctgctgttgtctgaggaatggtttggtgagaacagatgttagaacttgtttgttgattcttgtctggctaataaatcatcaccaactgccttctcctaca

SEQ ID NO: 350102 - DNA, 976 bp, Homo sapiens
gggtaaggcgacatttcctgcccccggggccagggtgagaggagagatgatgagttgctgagtgtgcacacctttccggaacacatacacacaccctgctctgggatcccttgtgaggctgccctcatggagttccccctggcccagatatgtccccaagggagtcacgaagcccccatcccaaccttcagcaccttccagatcacagacatgacccgcaggagctgccagaacctgggctacactgcggcatctccccaggccccggaggctgcctccagcacagggaatgctgagagggcagaggaggtgcctggagaaggaagcctgttcctgcaggccgagacccgggcttggttccagaagacccaggcccactggctcctgcagcacggggcagcccctgcctggttccatggcttcatcacccggaggtgagtcatggaggaggaaattggcccagacaggggcagggcaagtcctgggtctgggtcctgccacctgccaggaatagatgaaggctcccacttctaccagtctggagtagatggaggcgcccactccaggctcccactcccagagttttcctagcctttcactgaggcatctctccaggggagatcattggagaggctccagtccagccctctgtgtacctcagcttcccctctctaggccccattatcctcctgtccctaaggcctcgaatgctggtattttccacctctctctccctccaggcttactccatctttatctcccagccctctcttcttccacccttgcagaatctccctcctccatttctcagcctcatttctccctaactctttgttcacctcctcagttcagctttgacttctgaaatctggaagtccaactactttcccatccctgtagctgcagtagcagcccctgcaggctgccctttcaggatgaggccaggggaggatgcgggggtctcctgaatgggacc

SEQ ID NO: 350103 - DNA, 328 bp, Homo sapiens
ctctggaagccaaagtctgttcagatcagatgtcttgagactgcaagtacacctaggaggcagagggtagagggtgtgacctagaactgtccttctctctgcagaatacaggtggctcccagctgcattctgagaactctgtgattgggcaaggccctcccctgccccaccagcccccacccgcctggagacacaccctcccccacaatctttctagacaggtgcttcaggacagaggacaggcatggcttccccttgggcctcctcagtaggcggtaagtctgagcttggtgaggataacttggagcatcaggtccagagaccttca

SEQ ID NO: 350104 - DNA, 1783 bp, Homo sapiens
gggtaaggcgacatttcctgcccccggggccagggtgagaggagagatgatgagttgctgagtgtgcacacctttccggaacacatacacacaccctgctctgggatcccttgtgaggctgccctcatggagttccccctggcccagatatgtccccaagcaccttccagatcacagacatgacccgcaggagctgccagaacctgggctacactgcggcatctccccaggccccggaggctgcctccagcacagggaatgctgagagggcagaggaggtgcctggagaaggaagcctgttcctgcaggccgagacccgggcttggttccagaagacccaggcccactggctcctgcagcacggggcagcccctgcctggttccatggcttcatcacccggagggaggcagagaggctgctggagcccaagcctcaggggtgctacttggtgcggttcagcgagagcgcggtgaccttcgtgctgacttacaggagccggacttgctgccgccacttcctgctggcccagctcagggacgggcgccacgtggtgctgggcgaggacagcgcccacgcgcggctgcaggacctgctgctgcactacaccgcgcacccgctcagcccctacggggagacgctcaccgagcccctcgcccgacagactcctgagcctgcaggactttccctgaggaccgaagaatcaaactttggaagcaaaagccaggacccaaacccccagtacagcccaatcatcaaacaggggcaagccccagtcccgatgcagaaagagggggccggggagaaggagccctcccagctgctcaggcccaagcctcccatccccgccaaacctcagctgcccccagaagtctacacaatccctgttccacgacaccgcccggccccacgccccaagccctccaatcctatctacaatgagcctgatgaacccatagctttctatgccatgggccggggcagccctggggaagcccccagcaacatctatgtggaagtggaagatgagggcctacccgccacccttgggcaccctgtcctacggaagagctggtccaggcctgtcccaggaggccagaatacaggtggctcccagctgcattctgagaactctgtgattgggcaaggccctcccctgccccaccagcccccacccgcctggagacacaccctcccccacaatctttctagacaggtgcttcaggacagaggacaggcatggcttccccttgggcctcctcagtaggcggtctggcctgacccccaacaaagaagcctggaggtcagagaagcaaatgcggagcctgctccctcctaagaagatcccaagaatccaatggctcagtccttggtgatctaagacagcaaagaagtgtgcaaggagggccctgttagctcccactgtcctggtttctcctcctggagtctaatttccttggccctctgagccttttgagtctgggccctggtccaatgctgctgttgtctgaggaatggtttggtgagaacagatgttagaacttgtttgttgattcttgtctggctaataaatcatcaccaactgccttctcctacaaaaaaaaaaaaaaaaaaaaaaaaacaaaaaaaaaaagaaaaaaaaaaccacagaaagaagatataaaagaaatccaagataaatcaagaaaaaaatataaaagagagtgataagatgaaaacaaagaaagaaaacagacaaagaaaaagaataggaagaaatagatagatagaaggagaagaagaagg

SEQ ID NO: 350105 - DNA, 1174 bp, Homo sapiens
gggatcacgcctctcgctggtgaccctggccgaggagcgggagatagtctgatccctaacggcgccctccaggagccggacttgctgccgccacttcctgctggcccagctcagggacgggcgccacgtggtgctgggcgaggacagcgcccacgcgcggctgcaggacctgctgctgcactacaccgcgcacccgctcagcccctacggggagacgctcaccgagcccctcgcccgacagactcctgagcctgcaggactttccctgaggaccgaagaatcaaactttggaagcaaaagccaggacccaaacccccagtacagcccaatcatcaaacaggggcaagccccagtcccgatgcagaaagagggggccggggagaaggagccctcccagctgctcaggcccaagcctcccatccccgccaaacctcagctgcccccagaagtctacacaatccctgttccacgacaccgcccggccccacgccccaagccctccaatcctatctacaatgagcctgatgaacccatagctttctatgccatgggccggggcagccctggggaagcccccagcaacatctatgtggaagtggaagatgagggcctacccgccacccttgggcaccctgtcctacggaagagctggtccaggcctgtcccaggaggccagaatacaggtggctcccagctgcattctgagaactctgtgattgggcaaggccctcccctgccccaccagcccccacccgcctggagacacaccctcccccacaatctttctagacaggtgcttcaggacagaggacaggcatggcttccccttgggcctcctcagtaggcggtctggcctgacccccaacaaagaagcctggaggtcagagaagcaaatgcggagcctgctccctcctaagaagatcccaagaatccaatggctcagtccttggtgatctaagacagcaaagaagtgtgcaaggagggccctgttagctcccactgtcctggtttctcctcctggagtctaatttccttggccctctgagccttttgagtctgggccctggtccaatgctgctgttgtctgaggaatggtttggtgagaacagatgttagaacttgtttgttgattcttgtctggctaataaatcatcaccaactgccttctcctaca

SEQ ID NO: 350106 - DNA, 1844 bp, Homo sapiens
gggtaaggcgacatttcctgcccccggggccagggtgagaggagagatgatgagttgctgagtgtgcacacctttccggaacacatacacacaccctgctctgggatcccttgtgaggctgccctcatggagttccccctggcccagatatgtccccaagcaccttccagatcacagacatgacccgcaggagctgccagaacctgggctacactgcggcatctccccaggccccggaggctgcctccagcacagggaatgctgagagggcagaggaggtgcctggagaaggaagcctgttcctgcaggccgagacccgggcttggttccagaagacccaggcccactggctcctgcagcacggggcagcccctgcctggttccatggcttcatcacccggagggaggcagagaggctgctggagcccaagcctcaggggtgctacttggtgcggttcagcgagagcgcggtgaccttcgtgctgacttacaggagccggacttgctgccgccacttcctgctggcccagctcagggacgggcgccacgtggtgctgggcgaggacagcgcccacgcgcggctgcaggacctgctgctgcactacaccgcgcacccgctcagcccctacggggagacgctcaccgagcccctcgcccgacagactcctgagcctgcaggactttccctgaggaccgaagaatcaaactttggaagcaaaagccaggacccaaacccccagtacagcccaatcatcaaacaggggcaagccccagtcccgatgcagaaagagggggccggggagaaggagccctcccagctgctcaggcccaagcctcccatccccgccaaacctcagctgcccccagaagtctacacaatccctgttccacgacaccgcccggccccacgccccaagccctccaatcctatctacaatgagcctgatgaacccatagctttctatgccatgggccggggcagccctggggaagcccccagcaacatctatgtggaagtggaagatgagggcctacccgccacccttgggcaccctgtcctacggaagagctggtccaggcctgtcccaggaggccagaatacaggtggctcccagctgcattctgagaactctgtgattgggcaaggccctcccctgccccaccagcccccacccgcctggagacacaccctcccccacaatctttctagacaggtgcttcaggacagaggacaggcatggcttccccttgggcctcctcagtaggcggtctggcctgacccccaacaaagaagcctggaggtcagagaagcaaatgcggagcctgctccctcctaagaagatcccaagaatccaatggctcagtccttggtgatctaagacagcaaagaagtgtgcaaggagggccctgttagctcccactgtcctggtttctcctcctggagtctaatttccttggccctctgagccttttgagtctgtatttaccgcctgcaagcagtttatacagactcaccaagccacagacttgtcttccacaagcacgttcttaccttagccacgaagtgaccaagccacacgtactaaaggttgaactcaaagatatgtacagggtattaaacacataacaagggggacagttaacttccatacaaggtcaaaatcagccacaagttctacaatccagtgctgatatcagataccagcttcaaggacaatttcttttcgaaggcttattccacgtttcgtgaggctagcatgaggtgtgtgcactatgccaggggcaaatttctattctctaattaacccatcagcaaaggctacgcgatctgctgagtctgtaac

SEQ ID NO: 350107 - DNA, 1897 bp, Homo sapiens
ttttttttttaaataatggtagtttacttgaatttgtaacacagtaacacaaaactattttgatctgaacgcaagtatctaatggaacagaataatatacttccttttagtgtgctgcatttggttactgggtaatttaaaattcttcctcagcacaggtgttcaaaaaccagtcttcagagattgttttcatatcagtgtgccaactttggcacattctgctaagtaagaggcttaagtgtagcatgtttctgctgttttgtgtttgttttgttttgttttttgagacagagtctctctgtcgcccaggctggagtgcattggtgcgatcttggctcattgcaacctctgcctcccaggttcaagtgattctcctgcctcagcctcctgcgtagctgggattacaggcatatgccacgtgtattaggcactgctaatttctgtatttttagtagagacgaggtttcaccatgttggtcaggctggtcctgaactgctgacctcgtgaactctgcccgcctaggcctcctgaagtgctgggattacaggcgtgagccaccgtgcctggcctctgctctatcttttagctttcccttggcacttctatggtccagatgttagagggtaagtattttgatgggggagatcgttggactgtaattgaaagttatctcttataatgaaatgtgttatataaagaagacctataaaacacttaggctgataaaacccccaaacgatgaagcctcacttttaccctctcttttaacagatgttttactgtgcctggctaactatagtcgagggggtgatggtcctatgtgtcgcccagtaattctgttgccggaagataccccccccttcttagagcttaaaggatcacgccatccttgcattacgaagactttttttggagatgattttattcctaatgacattctaataggctgtgaggaagaggagcaggaaaatggcaaagcctattgtgtgcttgttactggaccaaatatggggggcaagtctacgcttatgagacaggtaactgattcttaaagttttgttatcagaaagtcatttgtgacattaggaataacatacttaggtgatcattttccaaacacagttacataaaagtcagccagtgacttaataggaagcaaagggaaattactccctgtgttataaaattgagaattatatttagctgaaacatcgatgcttaatgttaaggggaatatatgttaaaaaggggaaggaggtcagtcattcaggtcatgaggccctttgacttgaattcatttcctcagaaggtaggtatattcatagtgaacaaaaatacaaaggctgtatgaaaagatgaaaatgttacaggtttatccttaaattagactcatttgcagaaatgcaaatgaggtaagaaagcaaatatagttcatgacctctagcaactgttgaaaactgctctttagggatgacatgctggcccttttttttttgttgttgccaaggctgaagtgcagtggcaccatcacagctcactgcagcctcgaactcccaggttcaacccttcctcctgcctcagccttcccagtagctgggactacagatgtacaccatcatgcctagctcatttttaaaaaaattttttatggcattgtatttatcttctctttataaccaggggttgaccagccacagaacttgtaaagttttttatatttttaaaaggttgtaagaaatagtagtagttggctggtccccgctgctctcctgcattatagtatacttctgttcacctagtttgctagagagaggcagtatagtgtgtatagtgatttccaaactttttctttaaatcagaatcacctgaaagaatgtgacaacgtgtaaaaaaaaa

SEQ ID NO: 350108 - DNA, 3508 bp, Homo sapiens
cgcgcacggcgaggcgcctgttgattggccactggggcccgggttcctccggcggagcgcgcctccccccagatttcccgccagcaggagccgcgcggtagatgcggtgcttttaggagctccgtccgacagaacggttgggccttgccggctgtcggtatgtcgcgacagagcaccctgtacagcttcttccccaagtctccggcgctgagtgatgccaacaaggcctcggccagggcctcacgcgaaggcggccgtgccgccgctgcccccggggcctctccttccccaggcggggatgcggcctggagcgaggctgggcctgggcccaggcccttggcgcgctccgcgtcaccgcccaaggcgaagaacctcaacggagggctgcggagatcggtagcgcctgctgcccccaccagttgtgacttctcaccaggagatttggtttgggccaagatggagggttacccctggtggccttgtctggtttacaaccacccctttgatggaacattcatccgcgagaaagggaaatcagtccgtgttcatgtacagttttttgatgacagcccaacaaggggctgggttagcaaaaggcttttaaagccatatacaggttcaaaatcaaaggaagcccagaagggaggtcatttttacagtgcaaagcctgaaatactgagagcaatgcaacgtgcagatgaagccttaaataaagacaagattaagaggcttgaattggcagtttgtgatgagccctcagagccagaagaggaagaagagatggaggtaggcacaacttacgtaacagataagagtgaagaagataatgaaattgagagtgaagaggaagtacagcctaagacacaaggatctaggcgaagtagccgccaaataaaaaaacgaagggtcatatcagattctgagagtgacattggtggctctgatgtggaatttaagccagacactaaggaggaaggaagcagtgatgaaataagcagtggagtgggggatagtgagagtgaaggcctgaacagccctgtcaaagttgctcgaaagcggaagagaatggtgactggaaatggctctcttaaaaggaaaagctctaggaaggaaacgccctcagccaccaaacaagcaactagcatttcatcagaaaccaagaatactttgagagctttctctgcccctcaaaattctgaatcccaagcccacgttagtggaggtggtgatgacagtagtcgccctactgtttggtatcatgaaactttagaatggcttaaggaggaaaagagaagagatgagcacaggaggaggcctgatcaccccgattttgatgcatctacactctatgtgcctgaggatttcctcaattcttgtactcctgggatgaggaagtggtggcagattaagtctcagaactttgatcttgtcatctgttacaaggtggggaaattttatgagctgtaccacatggatgctcttattggagtcagtgaactggggctggtattcatgaaaggcaactgggcccattctggctttcctgaaattgcatttggccgttattcagattccctggtgcagaagggctataaagtagcacgagtggaacagactgagactccagaaatgatggaggcacgatgtagaaagatggcacatatatccaagtatgatagagtggtgaggagggagatctgtaggatcattaccaagggtacacagacttacagtgtgctggaaggtgatccctctgagaactacagtaagtatcttcttagcctcaaagaaaaagaggaagattcttctggccatactcgtgcatatggtgtgtgctttgttgatacttcactgggaaagtttttcataggtcagttttcagatgatcgccattgttcgagatttaggactctagtggcacactatcccccagtacaagttttatttgaaaaaggaaatctctcaaaggaaactaaaacaattctaaagagttcattgtcctgttctcttcaggaaggtctgatacccggctcccagttttgggatgcatccaaaactttgagaactctccttgaggaagaatattttagggaaaagctaagtgatggcattggggtgatgttaccccaggtgcttaaaggtatgacttcagagtctgattccattgggttgacaccaggagagaaaagtgaattggccctctctgctctaggtggttgtgtcttctacctcaaaaaatgccttattgatcaggagcttttatcaatggctaattttgaagaatatattcccttggattctgacacagtcagcactacaagatctggtgctatcttcaccaaagcctatcaacgaatggtgctagatgcagtgacattaaacaacttggagatttttctgaatggaacaaatggttctactgaaggaaccctactagagagggttgatacttgccatactccttttggtaagcggctcctaaagcaatggctttgtgccccactctgtaaccattatgctattaatgatcgtctagatgccatagaagacctcatggttgtgcctgacaaaatctccgaagttgtagagcttctaaagaagcttccagatcttgagaggctactcagtaaaattcataatgttgggtctcccctgaagagtcagaaccacccagacagcagggctataatgtatgaagaaactacatacagcaagaagaagattattgattttctttctgctctggaaggattcaaagtaatgtgtaaaattatagggatcatggaagaagttgctgatggttttaagtctaaaatccttaagcaggtcatctctctgcagacaaaaaatcctgaaggtcgttttcctgatttgactgtagaattgaaccgatgggatacagcctttgaccatgaaaaggctcgaaagactggacttattactcccaaagcaggctttgactctgattatgaccaagctcttgctgacataagagaaaatgaacagagcctcctggaatacctagagaaacagcgcaacagaattggctgtaggaccatagtctattgggggattggtaggaaccgttaccagctggaaattcctgagaatttcaccactcgcaatttgccagaagaatacgagttgaaatctaccaagaagggctgtaaacgatactggaccaaaactattgaaaagaagttggctaatctcataaatgctgaagaacggagggatgtatcattgaaggactgcatgcggcgactgttctataactttgataaaaattacaaggactggcagtctgctgtagagtgtatcgcagtgttgggtaagactttgaacaagcttgttctcaggctttgataagtagtgctgtttgccagctgtatattatccctaaaaataagtaataaggtatatatggtacatattttgacatgcatatacatatttgcatcctgactaggctgcccacagcaatttaagttacttgaaactcgctttt

SEQ ID NO: 350109 - DNA, 503 bp, Homo sapiens
  misc_feature (495)..(495): n is a, c, g, or t
  misc_feature (503)..(503): n is a, c, g, or t
ttgaatatctgactttaaaaattattctagaatttctgtgcttcaatattaatgccagaagacttggaattgtttatttgtaggtaactgcctttaaggaaacttgaccaaatattaactaagttatgtatttccttttggcaacagttgtgacttctcaccaggagatttggtttgggccaagatggagggttacccctggtggccttgtctggtttacaaccacccctttgatggaacattcatccgcgagaaagggaaatcagtccgtgttcatgtacagttttttgatgacagcccaacaaggggctgggttagcaaaaggcttttaaagccatatacaggttcaactcccttcccccttcccccaccaaaaaaataaagcagggcacgccggtgctttacctgttaaatcctagctacctaagaggctgacacgagaggtctgtcctgggtaacagagcaagacactgtctaaaaacaaaaacccttttngttcgatn

SEQ ID NO: 350110 - DNA, 1173 bp, Homo sapiens
tagtagagatggggtttcgccatgttagccaggatggtctggatctcctgacctcgtgatccgcccgcctgtgcctcccaaagtgttgggattacaggcgtgagccactgtgcccagcctccagcatgatttttttaggccgttcttttgtttgaaagaattcaactaaggatccactctgcctgcctgaccggtttcttcctttcttctctctcatcgggtcccgagttcccatgactgcagcttccagaagagcagagctttggtatcctactcacagcgccaaaactgcaggggccaaggaaagatacaaaattcttgtgtgcagcctcttttggactccagctcttgttctctcgctgaatcccaccgccaccccttcaagtcatcggctgtgattcacctgtgggtttctgaaggctagaagcttccacaatgagccaggaaacaagttctgattggctgggaacagacctctgctccaagattcagggctggcagtattccttctgttctggtggctcgatcttcattgctttcctctggacttgtaagttattccaacaaaccccagctgctctgcagtgaaatgttccaaataattaatatttctgcaggaattaccttgtaaaagatatgtgcttttaagtatttggttattgtgcaaatgtttttgactaccttttgtggccaattttctccttcagcgggctcatgtataattttagataaaagtacaaggaaattatgattccataatcataagtctactttcagcaatacacgtatcttcagagaatctcagcctccctgcagcatcctcctggtgcacagaaaaactgctgaattctggcaagatactcaaaggattctgacgggtgaccatctcaggccggagatatgcccaaccaactggaaaagcagagacagccatggacagatctgctgacgctaaagtttatagacagctgaggtgcaacccatataatcacccagatgttattaggccatgatcattctgtagtaagctacctcccttctgtgtttcctctcacctgacagcctattgtgggcactttcaaggccccactgtgtccaaatcacaccaccaccaaagctcacagaagcacgctggtagatttctcctctttggtggtttcccatgaccagcca

SEQ ID NO: 350111 - DNA, 941 bp, Homo sapiens
cgcgcacggcgaggcgcctgttgattggccactggggcccgggttcctccggcggagcgcgcctccccccagatttcccgccagcaggagccgcgcggtagatgcggtgcttttaggagctccgtccgacagaacggttgggccttgccggctgtcggtatgtcgcgacagagcaccctgtacagcttcttccccaagtctccggcgctgagtgatgccaacaaggcctcggccagggcctcacgcgaaggcggccgtgccgccgctgcccccggggcctctccttccccaggcggggatgcggcctggagcgaggctgggcctgggcccaggcccttggcgcgctccgcgtcaccgcccaaggcgaagaacctcaacggagggctgcggagatcggtagcgcctgctgcccccaccagagagtttcgctcaagtccaggctggagtgcaatggcgcgatctcagctcaccgcaatctccgcgtcccggcttcaagcgattccccagcttcagcctcccgagtagtcgggattacaggaatgcgccccacaccccgccaattttgtatttttagtagagacggggtttctccatgttggtcaggctagtctcggaattcccgacctcaggtgatccacccgcctcggcctcaaagtgctgggattacaggcgctagccaccgcgcccggtctgtttagggctttttatccgggcagctggcgacattttgaaaagcttgcttttgctgtttgccagatacatatatatgtattttgagacagagtcttgctcttttgtccaggctagagtgcagtggcgcgttcttggctcaccacaacctctgtctctggatcaagagattatcctgcctcagcctcccaagtagctgggactacaggtgcgccccaccacgcctggctaatttttgtatttttagtaga

SEQ ID NO: 350112 - DNA, 960 bp, Homo sapiens
ttgtcgcgccttgtgcttgttggcctgtggctcttggtcgttttgcgtttggtttccggggctgtccacctctctgtagctttgtaattttcgtttttgttgttgttctagggcttgggtcggaattgttttctttggtggcttgggtccgcgctcttcgtcttccgtgcatttttttgtagtatgttcttgtgtcatcctaggttgttcttagatttgatggcgtgtattgactggttgagttggtggtttgttcctggctgttgttcgtgttggttgtccagggtatgctgctctgtttagggatgtggcaactgttgttatagtattaaaagtgcagagattccatcctgacatggattcacttgattggaattgattctaggcatctcagtagttttaaagagctcctaggtgattctattctggccagcgttgagaatcactagggtagtgggttggtaagcaggctctgatgttttaaaggccaggtgaggccctatgcctcttgtctctcttagcctcaactttctccatgttagcaaatggatttcagaacagaaccaacgtacatgtgattgtgaaagttgttttagagtgcctagctcttacgtaagggttcataagaaagacaaaagtttatgaaactgttactaccagtcataaaagaccttttcctccctcattcacaggctggcttattagctgtaatggcccagatgggttgttacgtccctgctgaagtgtgcaggctcacaccaattgatagagtgtttactagacttggtgcctcagacagaataatgtcaggtgagttttttgtttcccacttaagttctcattcagtcatttagatgtgataaaagatatttgcttcttgtatatgagccttttaaatctaatatttgatttttctggtgttactttaaaaacatcactttttaagaactgcatagtctc

SEQ ID NO: 350113 - DNA, 4582 bp, Homo sapiens
tagtagagatggggtttcgccatgttagccaggatggtctggatctcctgacctcgtgatccgcccgcctgtgcctcccaaagtgttgggattacaggcgtgagccactgtgcccagcctccagcatgatttttttaggccgttcttttgtttgaaagaattcaactaaggatccactctgcctgcctgaccggtttcttcctttcttctctctcatcgggtcccgagttcccatgactgcagcttccagaagagcagagctttggtatcctactcacagcgccaaaactgcaggggccaaggaaagatacaaaattcttgtgtgcagcctcttttggactccagctcttgttctctcgctgaatcccaccgccaccccttcaagtcatcggctgtgattcacctgtgggtttctgaaggctagaagcttccacaatgagccaggaaacaagttctgattggctgggaacagacctctgctccaagattcagggctggcagtattccttctgttctggtggctcgatcttcattgctttcctctggacttaaacaccctgttgcccaggctggagtgcagtgatgcaatcatagctcacaatggcctcgaactcctgggctcaagccatcctcccgtgtcagactcccaagtagctgggattacagttgtgacttctcaccaggagatttggtttgggccaagatggagggttacccctggtggccttgtctggtttacaaccacccctttgatggaacattcatccgcgagaaagggaaatcagtccgtgttcatgtacagttttttgatgacagcccaacaaggggctgggttagcaaaaggcttttaaagccatatacaggttcaaaatcaaaggaagcccagaagggaggtcatttttacagtgcaaagcctgaaatactgagagcaatgcaacgtgcagatgaagccttaaataaagacaagattaagaggcttgaattggcagtttgtgatgagccctcagagccagaagaggaagaagagatggaggtaggcacaacttacgtaacagataagagtgaagaagataatgaaattgagagtgaagaggaagtacagcctaagacacaaggatctaggcgaagtagccgccaaataaaaaaacgaagggtcatatcagattctgagagtgacattggtggctctgatgtggaatttaagccagacactaaggaggaaggaagcagtgatgaaataagcagtggagtgggggatagtgagagtgaaggcctgaacagccctgtcaaagttgctcgaaagcggaagagaatggtgactggaaatggctctcttaaaaggaaaagctctaggaaggaaacgccctcagccaccaaacaagcaactagcatttcatcagaaaccaagaatactttgagagctttctctgcccctcaaaattctgaatcccaagcccacgttagtggaggtggtgatgacagtagtcgccctactgtttggtatcatgaaactttagaatggcttaaggaggaaaagagaagagatgagcacaggaggaggcctgatcaccccgattttgatgcatctacactctatgtgcctgaggatttcctcaattcttgtactcctgggatgaggaagtggtggcagattaagtctcagaactttgatcttgtcatctgttacaaggtggggaaattttatgagctgtaccacatggatgctcttattggagtcagtgaactggggctggtattcatgaaaggcaactgggcccattctggctttcctgaaattgcatttggccgttattcagattccctggtgcagaagggctataaagtagcacgagtggaacagactgagactccagaaatgatggaggcacgatgtagaaagatggcacatatatccaagtatgatagagtggtgaggagggagatctgtaggatcattaccaagggtacacagacttacagtgtgctggaaggtgatccctctgagaactacagtaagtatcttcttagcctcaaagaaaaagaggaagattcttctggccatactcgtgcatatggtgtgtgctttgttgatacttcactgggaaagtttttcataggtcagttttcagatgatcgccattgttcgagatttaggactctagtggcacactatcccccagtacaagttttatttgaaaaaggaaatctctcaaaggaaactaaaacaattctaaagagttcattgtcctgttctcttcaggaaggtctgatacccggctcccagttttgggatgcatccaaaactttgagaactctccttgaggaagaatattttagggaaaagctaagtgatggcattggggtgatgttaccccaggtgcttaaaggtatgacttcagagtctgattccattgggttgacaccaggagagaaaagtgaattggccctctctgctctaggtggttgtgtcttctacctcaaaaaatgccttattgatcaggagcttttatcaatggctaattttgaagaatatattcccttggattctgacacagtcagcactacaagatctggtgctatcttcaccaaagcctatcaacgaatggtgctagatgcagtgacattaaacaacttggagatttttctgaatggaacaaatggttctactgaaggaaccctactagagagggttgatacttgccatactccttttggtaagcggctcctaaagcaatggctttgtgccccactctgtaaccattatgctattaatgatcgtctagatgccatagaagacctcatggttgtgcctgacaaaatctccgaagttgtagagcttctaaagaagcttccagatcttgagaggctactcagtaaaattcataatgttgggtctcccctgaagagtcagaaccacccagacagcagggctataatgtatgaagaaactacatacagcaagaagaagattattgattttctttctgctctggaaggattcaaagtaatgtgtaaaattatagggatcatggaagaagttgctgatggttttaagtctaaaatccttaagcaggtcatctctctgcagacaaaaaatcctgaaggtcgttttcctgatttgactgtagaattgaaccgatgggatacagcctttgaccatgaaaaggctcgaaagactggacttattactcccaaagcaggctttgactctgattatgaccaagctcttgctgacataagagaaaatgaacagagcctcctggaatacctagagaaacagcgcaacagaattggctgtaggaccatagtctattgggggattggtaggaaccgttaccagctggaaattcctgagaatttcaccactcgcaatttgccagaagaatacgagttgaaatctaccaagaagggctgtaaacgatactggaccaaaactattgaaaagaagttggctaatctcataaatgctgaagaacggagggatgtatcattgaaggactgcatgcggcgactgttctataactttgataaaaattacaaggactggcagtctgctgtagagtgtatcgcagtgttggatgttttactgtgcctggctaactatagtcgagggggtgatggtcctatgtgtcgcccagtaattctgttgccggaagataccccccccttcttagagcttaaaggatcacgccatccttgcattacgaagactttttttggagatgattttattcctaatgacattctaataggctgtgaggaagaggagcaggaaaatggcaaagcctattgtgtgcttgttactggaccaaatatggggggcaagtctacgcttatgagacaggctggcttattagctgtaatggcccagatgggttgttacgtccctgctgaagtgtgcaggctcacaccaattgatagagtgtttactagacttggtgcctcagacagaataatgtcaggtgaaagtacattttttgttgaattaagtgaaactgccagcatactcatgcatgcaacagcacattctctggtgcttgtggatgaattaggaagaggtactgcaacatttgatgggacggcaatagcaaatgcagttgttaaagaacttgctgagactataaaatgtcgtacattattttcaactcactaccattcattagtagaagattattctcaaaatgttgctgtgcgcctaggacatatggcatgcatggtagaaaatgaatgtgaagaccccagccaggagactattacgttcctctataaattcattaagggagcttgtcctaaaagctatggctttaatgcagcaaggcttgctaatctcccagaggaagttattcaaaagggacatagaaaagcaagagaatttgagaagatgaatcagtcactacgattatttcgggaagtttgcctggctagtgaaaggtcaactgtagatgctgaagctgtccataaattgctgactttgattaaggaattatagactgactacattggaagctttgagttgacttctgacaaaggtggtaaattcagacaacattatgatctaataaactttattttttaaaaatga

SEQ ID NO: 350114 - DNA, 4136 bp, Homo sapiens
tttcatcgagacagggtcttgcactgtcgcccaggctggagtgaagtggtgcaatctcggctcactgcaacctctgcctcccaggtttaagtgatcttcccacctcagcctcccaagtagctgggactacaggcgcacaccaccacccttggctaatttttgtattttttttttggtagagatggggtttcaccacattgcccaggctggtcttgaattcctgacctcaagtagtccgcccacctaagcctcccaaaatgctgggattacaggcgtgagccaccacacctggcatatatatattttaagatagagatggggtttgctatgttgcccaggctggtcttgaactgctgggattacaggcgtgagcctctgcacccggcccttattgtttataaatacatttctttctaggttcaaaatcaaaggaagcccagaagggaggtcatttttacagtgcaaagcctgaaatactgagagcaatgcaacgtgcagatgaagccttaaataaagacaagattaagaggcttgaattggcagtttgtgatgagccctcagagccagaagaggaagaagagatggaggtaggcacaacttacgtaacagataagagtgaagaagataatgaaattgagagtgaagaggaagtacagcctaagacacaaggatctaggcgaagtagccgccaaataaaaaaacgaagggtcatatcagattctgagagtgacattggtggctctgatgtggaatttaagccagacactaaggaggaaggaagcagtgatgaaataagcagtggagtgggggatagtgagagtgaaggcctgaacagccctgtcaaagttgctcgaaagcggaagagaatggtgactggaaatggctctcttaaaaggaaaagctctaggaaggaaacgccctcagccaccaaacaagcaactagcatttcatcagaaaccaagaatactttgagagctttctctgcccctcaaaattctgaatcccaagcccacgttagtggaggtggtgatgacagtagtcgccctactgtttggtatcatgaaactttagaatggcttaaggaggaaaagagaagagatgagcacaggaggaggcctgatcaccccgattttgatgcatctacactctatgtgcctgaggatttcctcaattcttgtactcctgggatgaggaagtggtggcagattaagtctcagaactttgatcttgtcatctgttacaaggtggggaaattttatgagctgtaccacatggatgctcttattggagtcagtgaactggggctggtattcatgaaaggcaactgggcccattctggctttcctgaaattgcatttggccgttattcagattccctggtgcagaagggctataaagtagcacgagtggaacagactgagactccagaaatgatggaggcacgatgtagaaagatggcacatatatccaagtatgatagagtggtgaggagggagatctgtaggatcattaccaagggtacacagacttacagtgtgctggaaggtgatccctctgagaactacagtaagtatcttcttagcctcaaagaaaaagaggaagattcttctggccatactcgtgcatatggtgtgtgctttgttgatacttcactgggaaagtttttcataggtcagttttcagatgatcgccattgttcgagatttaggactctagtggcacactatcccccagtacaagttttatttgaaaaaggaaatctctcaaaggaaactaaaacaattctaaagagttcattgtcctgttctcttcaggaaggtctgatacccggctcccagttttgggatgcatccaaaactttgagaactctccttgaggaagaatattttagggaaaagctaagtgatggcattggggtgatgttaccccaggtgcttaaaggtatgacttcagagtctgattccattgggttgacaccaggagagaaaagtgaattggccctctctgctctaggtggttgtgtcttctacctcaaaaaatgccttattgatcaggagcttttatcaatggctaattttgaagaatatattcccttggattctgacacagtcagcactacaagatctggtgctatcttcaccaaagcctatcaacgaatggtgctagatgcagtgacattaaacaacttggagatttttctgaatggaacaaatggttctactgaaggaaccctactagagagggttgatacttgccatactccttttggtaagcggctcctaaagcaatggctttgtgccccactctgtaaccattatgctattaatgatcgtctagatgccatagaagacctcatggttgtgcctgacaaaatctccgaagttgtagagcttctaaagaagcttccagatcttgagaggctactcagtaaaattcataatgttgggtctcccctgaagagtcagaaccacccagacagcagggctataatgtatgaagaaactacatacagcaagaagaagattattgattttctttctgctctggaaggattcaaagtaatgtgtaaaattatagggatcatggaagaagttgctgatggttttaagtctaaaatccttaagcaggtcatctctctgcagacaaaaaatcctgaaggtcgttttcctgatttgactgtagaattgaaccgatgggatacagcctttgaccatgaaaaggctcgaaagactggacttattactcccaaagcaggctttgactctgattatgaccaagctcttgctgacataagagaaaatgaacagagcctcctggaatacctagagaaacagcgcaacagaattggctgtaggaccatagtctattgggggattggtaggaaccgttaccagctggaaattcctgagaatttcaccactcgcaatttgccagaagaatacgagttgaaatctaccaagaagggctgtaaacgatactggaccaaaactattgaaaagaagttggctaatctcataaatgctgaagaacggagggatgtatcattgaaggactgcatgcggcgactgttctataactttgataaaaattacaaggactggcagtctgctgtagagtgtatcgcagtgttggatgttttactgtgcctggctaactatagtcgagggggtgatggtcctatgtgtcgcccagtaattctgttgccggaagataccccccccttcttagagcttaaaggatcacgccatccttgcattacgaagactttttttggagatgattttattcctaatgacattctaataggctgtgaggaagaggagcaggaaaatggcaaagcctattgtgtgcttgttactggaccaaatatggggggcaagtctacgcttatgagacaggctggcttattagctgtaatggcccagatgggttgttacgtccctgctgaagtgtgcaggctcacaccaattgatagagtgtttactagacttggtgcctcagacagaataatgtcaggtgaaagtacattttttgttgaattaagtgaaactgccagcatactcatgcatgcaacagcacattctctggtgcttgtggatgaattaggaagaggtactgcaacatttgatgggacggcaatagcaaatgcagttgttaaagaacttgctgagactataaaatgtcgtacattattttcaactcactaccattcattagtagaagattattctcaaaatgttgctgtgcgcctaggacatatggcatgcatggtagaaaatgaatgtgaagaccccagccaggagactattacgttcctctataaattcattaagggagcttgtcctaaaagctatggctttaatgcagcaaggcttgctaatctcccagaggaagttattcaaaagggacatagaaaagcaagagaatttgagaagatgaatcagtcactacgattatttcgggaagtttgcctggctagtgaaaggtcaactgtagatgctgaagctgtccataaattgctgactttgattaaggaattatagactgactacattggaagctttgagttgacttctgacaaaggtggtaaattcagacaacattatgatctaataaactttattttttaaaaatga

SEQ ID NO: 350115 - DNA, 2096 bp, Homo sapiens
aatgtcactgcatctagcaccattcgttgataggctttggtgaagatagcaccagatcttgtagtgctgactgtgtcagaatccaagggaatatattcttcaaagcctatcaacgaatggtgctagatgcagtgacattaaacaacttggagatttttctgaatggaacaaatggttctactgaaggaaccctactagagagggttgatacttgccatactccttttggtaagcggctcctaaagcaatggctttgtgccccactctgtaaccattatgctattaatgatcgtctagatgccatagaagacctcatggttgtgcctgacaaaatctccgaagttgtagagcttctaaagaagcttccagatcttgagaggctactcagtaaaattcataatgttgggtctcccctgaagagtcagaaccacccagacagcagggctataatgtatgaagaaactacatacagcaagaagaagattattgattttctttctgctctggaaggattcaaagtaatgtgtaaaattatagggatcatggaagaagttgctgatggttttaagtctaaaatccttaagcaggtcatctctctgcagacaaaaaatcctgaaggtcgttttcctgatttgactgtagaattgaaccgatgggatacagcctttgaccatgaaaaggctcgaaagactggacttattactcccaaagcaggctttgactctgattatgaccaagctcttgctgacataagagaaaatgaacagagcctcctggaatacctagagaaacagcgcaacagaattggctgtaggaccatagtctattgggggattggtaggaaccgttaccagctggaaattcctgagaatttcaccactcgcaatttgccagaagaatacgagttgaaatctaccaagaagggctgtaaacgatactggaccaaaactattgaaaagaagttggctaatctcataaatgctgaagaacggagggatgtatcattgaaggactgcatgcggcgactgttctataactttgataaaaattacaaggactggcagtctgctgtagagtgtatcgcagtgttggatgttttactgtgcctggctaactatagtcgagggggtgatggtcctatgtgtcgcccagtaattctgttgccggaagataccccccccttcttagagcttaaaggatcacgccatccttgcattacgaagactttttttggagatgattttattcctaatgacattctaataggctgtgaggaagaggagcaggaaaatggcaaagcctattgtgtgcttgttactggaccaaatatggggggcaagtctacgcttatgagacaggctggcttattagctgtaatggcccagatgggttgttacgtccctgctgaagtgtgcaggctcacaccaattgatagagtgtttactagacttggtgcctcagacagaataatgtcaggtgaaagtacattttttgttgaattaagtgaaactgccagcatactcatgcatgcaacagcacattctctggtgcttgtggatgaattaggaagaggtactgcaacatttgatgggacggcaatagcaaatgcagttgttaaagaacttgctgagactataaaatgtcgtacattattttcaactcactaccattcattagtagaagattattctcaaaatgttgctgtgcgcctaggacatatggcatgcatggtagaaaatgaatgtgaagaccccagccaggagactattacgttcctctataaattcattaagggagcttgtcctaaaagctatggctttaatgcagcaaggcttgctaatctcccagaggaagttattcaaaagggacatagaaaagcaagagaatttgagaagatgaatcagtcactacgattatttcgggaagtttgcctggctagtgaaaggtcaactgtagatgctgaagctgtccataaattgctgactttgattaaggaattatagactgactacattggaagctttgagttgacttctgacaaaggtggtaaattcagacaacattatgatctaataaactttattttttaaaaatga

SEQ ID NO: 350116 - DNA, 4456 bp, Homo sapiens
cgcgcacggcgaggcgcctgttgattggccactggggcccgggttcctccggcggagcgcgcctccccccagatttcccgccagcaggagccgcgcggtagatgcggtgcttttaggagctccgtccgacagaacggttgggccttgccggctgtcggtatgtcgcgacagagcaccctgtacagcttcttccccaagtctccggcgctgagtgatgccaacaaggcctcggccagggcctcacgcgaaggcggccgtgccgccgctgcccccggggcctctccttccccaggcggggatgcggcctggagcgaggctgggcctgggcccaggcccttggcgcgctccgcgtcaccgcccaaggcgaagaacctcaacggagggctgcggagatcggtagcgcctgctgcccccaccagttgtgacttctcaccaggagatttggtttgggccaagatggagggttacccctggtggccttgtctggtttacaaccacccctttgatggaacattcatccgcgagaaagggaaatcagtccgtgttcatgtacagttttttgatgacagcccaacaaggggctgggttagcaaaaggcttttaaagccatatacaggttcaaaatcaaaggaagcccagaagggaggtcatttttacagtgcaaagcctgaaatactgagagcaatgcaacgtgcagatgaagccttaaataaagacaagattaagaggcttgaattggcagtttgtgatgagccctcagagccagaagaggaagaagagatggaggtaggcacaacttacgtaacagataagagtgaagaagataatgaaattgagagtgaagaggaagtacagcctaagacacaaggatctaggcgaagtagccgccaaataaaaaaacgaagggtcatatcagattctgagagtgacattggtggctctgatgtggaatttaagccagacactaaggaggaaggaagcagtgatgaaataagcagtggagtgggggatagtgagagtgaaggcctgaacagccctgtcaaagttgctcgaaagcggaagagaatggtgactggaaatggctctcttaaaaggaaaagctctaggaaggaaacgccctcagccaccaaacaagcaactagcatttcatcagaaaccaagaatactttgagagctttctctgcccctcaaaattctgaatcccaagcccacgttagtggaggtggtgatgacagtagtcgccctactgtttggtatcatgaaactttagaatggcttaaggaggaaaagagaagagatgagcacaggaggaggcctgatcaccccgattttgatgcatctacactctatgtgcctgaggatttcctcaattcttgtactcctgggatgaggaagtggtggcagattaagtctcagaactttgatcttgtcatctgttacaaggtggggaaattttatgagctgtaccacatggatgctcttattggagtcagtgaactggggctggtattcatgaaaggcaactgggcccattctggctttcctgaaattgcatttggccgttattcagattccctggtgcagaagggctataaagtagcacgagtggaacagactgagactccagaaatgatggaggcacgatgtagaaagatggcacatatatccaagtatgatagagtggtgaggagggagatctgtaggatcattaccaagggtacacagacttacagtgtgctggaaggtgatccctctgagaactacagtaagtatcttcttagcctcaaagaaaaagaggaagattcttctggccatactcgtgcatatggtgtgtgctttgttgatacttcactgggaaagtttttcataggtcagttttcagatgatcgccattgttcgagatttaggactctagtggcacactatcccccagtacaagttttatttgaaaaaggaaatctctcaaaggaaactaaaacaattctaaagagttcattgtcctgttctcttcaggaaggtctgatacccggctcccagttttgggatgcatccaaaactttgagaactctccttgaggaagaatattttagggaaaagctaagtgatggcattggggtgatgttaccccaggtgcttaaaggtatgacttcagagtctgattccattgggttgacaccaggagagaaaagtgaattggccctctctgctctaggtggttgtgtcttctacctcaaaaaatgccttattgatcaggagcttttatcaatggctaattttgaagaatatattcccttggattctgacacagtcagcactacaagatctggtgctatcttcaccaaagcctatcaacgaatggtgctagatgcagtgacattaaacaacttggagatttttctgaatggaacaaatggttctactgaaggaaccctactagagagggttgatacttgccatactccttttggtaagcggctcctaaagcaatggctttgtgccccactctgtaaccattatgctattaatgatcgtctagatgccatagaagacctcatggttgtgcctgacaaaatctccgaagttgtagagcttctaaagaagcttccagatcttgagaggctactcagtaaaattcataatgttgggtctcccctgaagagtcagaaccacccagacagcagggctataatgtatgaagaaactacatacagcaagaagaagattattgattttctttctgctctggaaggattcaaagtaatgtgtaaaattatagggatcatggaagaagttgctgatggttttaagtctaaaatccttaagcaggtcatctctctgcagacaaaaaatcctgaaggtcgttttcctgatttgactgtagaattgaaccgatgggatacagcctttgaccatgaaaaggctcgaaagactggacttattactcccaaagcaggctttgactctgattatgaccaagctcttgctgacataagagaaaatgaacagagcctcctggaatacctagagaaacagcgcaacagaattggctgtaggaccatagtctattgggggattggtaggaaccgttaccagctggaaattcctgagaatttcaccactcgcaatttgccagaagaatacgagttgaaatctaccaagaagggctgtaaacgatactggaccaaaactattgaaaagaagttggctaatctcataaatgctgaagaacggagggatgtatcattgaaggactgcatgcggcgactgttctataactttgataaaaattacaaggactggcagtctgctgtagagtgtatcgcagtgttggatgttttactgtgcctggctaactatagtcgagggggtgatggtcctatgtgtcgcccagtaattctgttgccggaagataccccccccttcttagagcttaaaggatcacgccatccttgcattacgaagactttttttggagatgattttattcctaatgacattctaataggctgtgaggaagaggagcaggaaaatggcaaagcctattgtgtgcttgttactggaccaaatatggggggcaagtctacgcttatgagacaggtaactgattcttaaagttttgttatcagaaagtcatttgtgacattaggaataacatacttaggtgatcattttccaaacacagttacataaaagtcagccagtgacttaataggaagcaaagggaaattactccctgtgttataaaattgagaattatatttagctgaaacatcgatgcttaatgttaaggggaatatatgttaaaaaggggaaggaggtcagtcattcaggtcatgaggccctttgacttgaattcatttcctcagaaggtaggtatattcatagtgaacaaaaatacaaaggctgtatgaaaagatgaaaatgttacaggtttatccttaaattagactcatttgcagaaatgcaaatgaggtaagaaagcaaatatagttcatgacctctagcaactgttgaaaactgctctttagggatgacatgctggcccttttttttttgttgttgccaaggctgaagtgcagtggcaccatcacagctcactgcagcctcgaactcccaggttcaacccttcctcctgcctcagccttcccagtagctgggactacagatgtacaccatcatgcctagctcatttttaaaaaaattttttatggcattgtatttatcttctctttataaccaggggttgaccagccacagaacttgtaaagttttttatatttttaaaaggttgtaagaaatagtagtagttggctggtccccgctgctctcctgcattatagtatacttctgttcacctagtttgctagagagaggcagtatagtgtgtatagtgatttccaaactttttctttaaatcagaatcacctgaaagaatgtgacaacgtgtaaaaaaaaa

SEQ ID NO: 350117 - DNA, 1776 bp, Homo sapiens
ttttttttttaaataatggtagtttacttgaatttgtaacacagtaacacaaaactattttgatctgaacgcaagtatctaatggaacagaataatatacttccttttagtgtgctgcatttggttactgggtaatttaaaattcttcctcagcacaggtgttcaaaaaccagtcttcagagattgttttcatatcagtgtgccaactttggcacattctgctaagtaagaggcttaagtgtagcatgtttctgctgttttgtgtttgttttgttttgttttttgagacagagtctctctgtcgcccaggctggagtgcattggtgcgatcttggctcattgcaacctctgcctcccaggttcaagtgattctcctgcctcagcctcctgcgtagctgggattacaggcatatgccacgtgtattaggcactgctaatttctgtatttttagtagagacgaggtttcaccatgttggtcaggctggtcctgaactgctgacctcgtgaactctgcccgcctaggcctcctgaagtgctgggattacaggcgtgagccaccgtgcctggcctctgctctatcttttagctttcccttggcacttctatggtccagatgttagagggtaagtattttgatgggggagatcgttggactgtaattgaaagttatctcttataatgaaatgtgttatataaagaagacctataaaacacttaggctgataaaacccccaaacgatgaagcctcacttttaccctctcttttaacagatgttttactgtgcctggctaactatagtcgagggggtgatggtcctatgtgtcgcccagtaattctgttgccggaagataccccccccttcttagagcttaaaggatcacgccatccttgcattacgaagactttttttggagatgattttattcctaatgacattctaataggctgtgaggaagaggagcaggaaaatggcaaagcctattgtgtgcttgttactggaccaaatatggggggcaagtctacgcttatgagacaggctggcttattagctgtaatggcccagatgggttgttacgtccctgctgaagtgtgcaggctcacaccaattgatagagtgtttactagacttggtgcctcagacagaataatgtcaggtgaaagtacattttttgttgaattaagtgaaactgccagcatactcatgcatgcaacagcacattctctggtgcttgtggatgaattaggaagaggtactgcaacatttgatgggacggcaatagcaaatgcagttgttaaagaacttgctgagactataaaatgtcgtacattattttcaactcactaccattcattagtagaagattattctcaaaatgttgctgtgcgcctaggacatatggcatgcatggtagaaaatgaatgtgaagaccccagccaggagactattacgttcctctataaattcattaagggagcttgtcctaaaagctatggctttaatgcagcaaggcttgctaatctcccagaggaagttattcaaaagggacatagaaaagcaagagaatttgagaagatgaatcagtcactacgattatttcgggaagtttgcctggctagtgaaaggtcaactgtagatgctgaagctgtccataaattgctgactttgattaaggaattatagactgactacattggaagctttgagttgacttctgacaaaggtggtaaattcagacaacattatgatctaataaactttattttttaaaaatga

SEQ ID NO: 350118 - DNA, 3819 bp, Homo sapiens
  misc_feature (3728)..(3728): n is a, c, g, or t
cgcgcacggcgaggcgcctgttgattggccactggggcccgggttcctccggcggagcgcgcctccccccagatttcccgccagcaggagccgcgcggtagatgcggtgcttttaggagctccgtccgacagaacggttgggccttgccggctgtcggtatgtcgcgacagagcaccctgtacagcttcttccccaagtctccggcgctgagtgatgccaacaaggcctcggccagggcctcacgcgaaggcggccgtgccgccgctgcccccggggcctctccttccccaggcggggatgcggcctggagcgaggctgggcctgggcccaggcccttggcgcgctccgcgtcaccgcccaaggcgaagaacctcaacggagggctgcggagatcggtagcgcctgctgcccccaccagttgtgacttctcaccaggagatttggtttgggccaagatggagggttacccctggtggccttgtctggtttacaaccacccctttgatggaacattcatccgcgagaaagggaaatcagtccgtgttcatgtacagttttttgatgacagcccaacaaggggctgggttagcaaaaggcttttaaagccatatacaggttcaaaatcaaaggaagcccagaagggaggtcatttttacagtgcaaagcctgaaatactgagagcaatgcaacgtgcagatgaagccttaaataaagacaagattaagaggcttgaattggcagtttgtgatgagccctcagagccagaagaggaagaagagatggaggtaggcacaacttacgtaacagataagagtgaagaagataatgaaattgagagtgaagaggaagtacagcctaagacacaaggatctaggcgaagtagccgccaaataaaaaaacgaagggtcatatcagattctgagagtgacattggtggctctgatgtggaatttaagccagacactaaggaggaaggaagcagtgatgaaataagcagtggagtgggggatagtgagagtgaaggcctgaacagccctgtcaaagttgctcgaaagcggaagagaatggtgactggaaatggctctcttaaaaggaaaagctctaggaaggaaacgccctcagccaccaaacaagcaactagcatttcatcagaaaccaagaatactttgagagctttctctgcccctcaaaattctgaatcccaagcccacgttagtggaggtggtgatgacagtagtcgccctactgtttggtatcatgaaactttagaatggcttaaggaggaaaagagaagagatgagcacaggaggaggcctgatcaccccgattttgatgcatctacactctatgtgcctgaggatttcctcaattcttgtactcctgggatgaggaagtggtggcagattaagtctcagaactttgatcttgtcatctgttacaaggtggggaaattttatgagctgtaccacatggatgctcttattggagtcagtgaactggggctggtattcatgaaaggcaactgggcccattctggctttcctgaaattgcatttggccgttattcagattccctggtgcagaagggctataaagtagcacgagtggaacagactgagactccagaaatgatggaggcacgatgtagaaagatggcacatatatccaagtatgatagagtggtgaggagggagatctgtaggatcattaccaagggtacacagacttacagtgtgctggaaggtgatccctctgagaactacagtaagtatcttcttagcctcaaagaaaaagaggaagattcttctggccatactcgtgcatatggtgtgtgctttgttgatacttcactgggaaagtttttcataggtcagttttcagatgatcgccattgttcgagatttaggactctagtggcacactatcccccagtacaagttttatttgaaaaaggaaatctctcaaaggaaactaaaacaattctaaagagttcattgtcctgttctcttcaggaaggtctgatacccggctcccagttttgggatgcatccaaaactttgagaactctccttgaggaagaatattttagggaaaagctaagtgatggcattggggtgatgttaccccaggtgcttaaaggtatgacttcagagtctgattccattgggttgacaccaggagagaaaagtgaattggccctctctgctctaggtggttgtgtcttctacctcaaaaaatgccttattgatcaggagcttttatcaatggctaattttgaagaatatattcccttggattctgacacagtcagcactacaagatctggtgctatcttcaccaaagcctatcaacgaatggtgctagatgcagtgacattaaacaacttggagatttttctgaatggaacaaatggttctactgaaggaaccctactagagagggttgatacttgccatactccttttggtaagcggctcctaaagcaatggctttgtgccccactctgtaaccattatgctattaatgatcgtctagatgccatagaagacctcatggttgtgcctgacaaaatctccgaagttgtagagcttctaaagaagcttccagatcttgagaggctactcagtaaaattcataatgttgggtctcccctgaagagtcagaaccacccagacagcagggctataatgtatgaagaaactacatacagcaagaagaagattattgattttctttctgctctggaaggattcaaagtaatgtgtaaaattatagggatcatggaagaagttgctgatggttttaagtctaaaatccttaagcaggtcatctctctgcagacaaaaaatcctgaaggtcgttttcctgatttgactgtagaattgaaccgatgggatacagcctttgaccatgaaaaggctcgaaagactggacttattactcccaaagcaggctttgactctgattatgaccaagctcttgctgacataagagaaaatgaacagagcctcctggaatacctagagaaacagcgcaacagaattggctgtaggaccatagtctattgggggattggtaggaaccgttaccagctggaaattcctgagaatttcaccactcgcaatttgccagaagaatacgagttgaaatctaccaagaagggctgtaaacgatactggaccaaaactattgaaaagaagttggctaatctcataaatgctgaagaacggagggatgtatcattgaaggactgcatgcggcgactgttctataactttgataaaaattacaaggactggcagtctgctgtagagtgtatcgcagtgttggatgttttactgtgcctggctaactatagtcgagggggtgatggtcctatgtgtcgcccagtaattctgttgacttcaagaaaagctttttccaattttaaacctgtcttacggcaagaaacatctaatacgttcttgcaatctcttaatgcccctgtccctttcacaggctcagagcagggtatgaagttctccttggagctcctctgagaacgtctgggactgaaagagttttgctgggtgacactgactttctaaatattccagaactatttccctgaacgtgaaggtcagatgtctgctgcgggcgagttgcgctgtgtgtggggttggtctttggaagtgatgaagatgaatcgctcttgggcaggcacctacctgctccagagatcttttgntaggttttcaaagcctcacttaaactttgaatttgctttgctggaaggtaactcagcctagggtttcttagcgatagtgggtccaaagatc

SEQ ID NO: 350119 - DNA, 1430 bp, Homo sapiens
ttgtcgcgccttgtgcttgttggcctgtggctcttggtcgttttgcgtttggtttccggggctgtccacctctctgtagctttgtaattttcgtttttgttgttgttctagggcttgggtcggaattgttttctttggtggcttgggtccgcgctcttcgtcttccgtgcatttttttgtagtatgttcttgtgtcatcctaggttgttcttagatttgatggcgtgtattgactggttgagttggtggtttgttcctggctgttgttcgtgttggttgtccagggtatgctgctctgtttagggatgtggcaactgttgttatagtattaaaagtgcagagattccatcctgacatggattcacttgattggaattgattctaggcatctcagtagttttaaagagctcctaggtgattctattctggccagcgttgagaatcactagggtagtgggttggtaagcaggctctgatgttttaaaggccaggtgaggccctatgcctcttgtctctcttagcctcaactttctccatgttagcaaatggatttcagaacagaaccaacgtacatgtgattgtgaaagttgttttagagtgcctagctcttacgtaagggttcataagaaagacaaaagtttatgaaactgttactaccagtcataaaagaccttttcctccctcattcacaggctggcttattagctgtaatggcccagatgggttgttacgtccctgctgaagtgtgcaggctcacaccaattgatagagtgtttactagacttggtgcctcagacagaataatgtcaggtgaaagtacattttttgttgaattaagtgaaactgccagcatactcatgcatgcaacagcacattctctggtgcttgtggatgaattaggaagaggtactgcaacatttgatgggacggcaatagcaaatgcagttgttaaagaacttgctgagactataaaatgtcgtacattattttcaactcactaccattcattagtagaagattattctcaaaatgttgctgtgcgcctaggacatatggcatgcatggtagaaaatgaatgtgaagaccccagccaggagactattacgttcctctataaattcattaagggagcttgtcctaaaagctatggctttaatgcagcaaggcttgctaatctcccagaggaagttattcaaaagggacatagaaaagcaagagaatttgagaagatgaatcagtcactacgattatttcgggaagtttgcctggctagtgaaaggtcaactgtagatgctgaagctgtccataaattgctgactttgattaaggaattatagactgactacattggaagctttgagttgacttctgacaaaggtggtaaattcagacaacattatgatctaataaactttattttttaaaaatga

SEQ ID NO: 350120 - DNA, 802 bp, Homo sapiens
aaagtgctgggattacaggcgtgagccaccgtgcccggccaataattgcatagtctcttaatgagatttaatcttttatacccatatgtgtagctcatgatagctatataacctagaagatgaatttatgtaatatgatttgccaaatgagtattcatttgtgatttttttttttttttaaggtgaaagtacattttttgttgaattaagtgaaactgccagcatactcatgcatgcaacagcacattctctggtgcttgtggatgaattaggaagaggtactgcaacatttgatgggacggcaatagcaaatgcagttgttaaagaacttgctgagactataaaatgtcgtacattattttcaactcactaccattcattagtagaagattattctcaaaatgttgctgtgcgcctaggacatatggcatgcatggtagaaaatgaatgtgaagaccccagccaggagactattacgttcctctataaattcattaagggagcttgtcctaaaagctatggctttaatgcagcaaggcttgctaatctcccagaggaagttattcaaaagggacatagaaaagcaagagaatttgagaagatgaatcagtcactacgattatttcgggaagtttgcctggctagtgaaaggtcaactgtagatgctgaagctgtccataaattgctgactttgattaaggaattatagactgactacattggaagctttgagttgacttctgacaaaggtggtaaattcagacaacattatgatctaataaactttattttttaaaaatga

SEQ ID NO: 350121 - DNA, 1243 bp, Homo sapiens
tagtagagatggggtttcgccatgttagccaggatggtctggatctcctgacctcgtgatccgcccgcctgtgcctcccaaagtgttgggattacaggcgtgagccactgtgcccagcctccagcatgatttttttaggccgttcttttgtttgaaagaattcaactaaggatccactctgcctgcctgaccggtttcttcctttcttctctctcatcgggtcccgagttcccatgactgcagcttccagaagagcagagctttggtatcctactcacagcgccaaaactgcaggggccaaggaaagatacaaaattcttgtgtgcagcctcttttggactccagctcttgttctctcgctgaatcccaccgccaccccttcaagtcatcggctgtgattcacctgtgggtttctgaaggctagaagcttccacaatgagccaggaaacaagttctgattggctgggaacagacctctgctccaagattcagggctggcagtattccttctgttctggtggctcgatcttcattgctttcctctggacttaaacaccctgttgcccaggctggagtgcagtgatgcaatcatagctcacaatggcctcgaactcctgggctcaagccatcctcccgtgtcagactcccaagtagctgggattacagagacggagtcttgctctgtcacccaggctggagtgcagtggtgcgatcgcagctctctgtaacctctgtctccctggttcaagtgattcttctgcctcagcctcccaagtagctgggattacaggttttctactttcctaccttccagaaactcctcctacccatggaatctgccagcagttggattcttgactatctttaggacttttcctaatctcaccttctccatctgtgaaatggaaataatcaaaggtaaacacaaggagggcagagagttctcctgcatctgctactttcttgccttcagctcaacaatccttctgtgaaagaggcatattttgtggtgctatgtgctgatcttccacacagccaaatggaggcagaggtcacagaggaactagaaggatggaaaactgcaggagagtctcgttgccatcactcagtcaatcaaccagttttggatacctgccatgtgccaagccctgactgcagtaccccccataccaaagttatttgcttgcggaatacagaagcgcgaaagagagaaaaatagtagaattggcggccgccagcttgt

SEQ ID NO: 350122 - DNA, 989 bp, Homo sapiens
tagtagagatggggtttcgccatgttagccaggatggtctggatctcctgacctcgtgatccgcccgcctgtgcctcccaaagtgttgggattacaggcgtgagccactgtgcccagcctccagcatgatttttttaggccgttcttttgtttgaaagaattcaactaaggatccactctgcctgcctgaccggtttcttcctttcttctctctcatcgggtcccgagttcccatgactgcagcttccagaagagcagagctttggtatcctactcacagcgccaaaactgcaggggccaagaaacaccctgttgcccaggctggagtgcagtgatgcaatcatagctcacaatggcctcgaactcctgggctcaagccatcctcccgtgtcagactcccaagtagctgggattacagagacggagtcttgctctgtcacccaggctggagtgcagtggtgcgatcgcagctctctgtaacctctgtctccctggttcaagtgattcttctgcctcagcctcccaagtagctgggattacagaaactcctcctacccatggaatctgccagcagttggattcttgactatctttaggacttttcctaatctcaccttctccatctgtgaaatggaaataatcaaaggctcaacaatccttctgtgaaagaggcatattttgtggtgctatgtgctgatcttccacacagccaaatggaggcagaggtcacagaggaactagaaggatggaaaactgcaggagagtctcgttgccatcactcagtcaatcaaccagttttggatacctgccatgtgccaagccctgactgcagtaaaaaggataccaaaataaattacttactgctctcaaaaagcaaaccgtttgctggcagacttgatcatataccaatgactggaggaaggggaaagtgagctttatggtcaaagacgttcaatggcaatattttatttacttatttatttattttt

SEQ ID NO: 350123 - DNA, 1069 bp, Homo sapiens
tagtagagatggggtttcgccatgttagccaggatggtctggatctcctgacctcgtgatccgcccgcctgtgcctcccaaagtgttgggattacaggcgtgagccactgtgcccagcctccagcatgatttttttaggccgttcttttgtttgaaagaattcaactaaggatccactctgcctgcctgaccggtttcttcctttcttctctctcatcgggtcccgagttcccatgactgcagcttccagaagagcagagctttggtatcctactcacagcgccaaaactgcaggggccaagcctcttttggactccagctcttgttctctcgctgaatcccaccgccaccccttcaagtcatcggctgtgattcacctgtgggtttctgaaggctagaagcttccacaatgagccaggaaacaagttctgattggctgggaacagacctctgctccaagattcagggctggcagtattccttctgttctggtggctcgatcttcattgctttcctctggacttaaacaccctgttgcccaggctggagtgcagtgatgcaatcatagctcacaatggcctcgaactcctgggctcaagccatcctcccgtgtcagactcccaagtagctgggattacagaaactcctcctacccatggaatctgccagcagttggattcttgactatctttaggacttttcctaatctcaccttctccatctgtgaaatggaaataatcaaaggtaaacacaaggagggcagagagttctcctgcatctgctactttcttgccttcagctcaacaatccttctgtgaaagaggcatattttgtggtgctatgtgctgatcttccacacagccaaatggaggcagaggtcacagaggaactagaaggatggaaaactgcaggagagtctcgttgccatcactcagtcaatcaaccagttttggatacctgccatgtgccaagccctgactgcagtaccccccataccaaagttatttgcttgcggaatacagaagcgcgaaagagagaaaaatagtagaattggcggccgccagcttgt

SEQ ID NO: 350124 - DNA, 4335 bp, Homo sapiens
cgcgcacggcgaggcgcctgttgattggccactggggcccgggttcctccggcggagcgcgcctccccccagatttcccgccagcaggagccgcgcggtagatgcggtgcttttaggagctccgtccgacagaacggttgggccttgccggctgtcggtatgtcgcgacagagcaccctgtacagcttcttccccaagtctccggcgctgagtgatgccaacaaggcctcggccagggcctcacgcgaaggcggccgtgccgccgctgcccccggggcctctccttccccaggcggggatgcggcctggagcgaggctgggcctgggcccaggcccttggcgcgctccgcgtcaccgcccaaggcgaagaacctcaacggagggctgcggagatcggtagcgcctgctgcccccaccagttgtgacttctcaccaggagatttggtttgggccaagatggagggttacccctggtggccttgtctggtttacaaccacccctttgatggaacattcatccgcgagaaagggaaatcagtccgtgttcatgtacagttttttgatgacagcccaacaaggggctgggttagcaaaaggcttttaaagccatatacaggttcaaaatcaaaggaagcccagaagggaggtcatttttacagtgcaaagcctgaaatactgagagcaatgcaacgtgcagatgaagccttaaataaagacaagattaagaggcttgaattggcagtttgtgatgagccctcagagccagaagaggaagaagagatggaggtaggcacaacttacgtaacagataagagtgaagaagataatgaaattgagagtgaagaggaagtacagcctaagacacaaggatctaggcgaagtagccgccaaataaaaaaacgaagggtcatatcagattctgagagtgacattggtggctctgatgtggaatttaagccagacactaaggaggaaggaagcagtgatgaaataagcagtggagtgggggatagtgagagtgaaggcctgaacagccctgtcaaagttgctcgaaagcggaagagaatggtgactggaaatggctctcttaaaaggaaaagctctaggaaggaaacgccctcagccaccaaacaagcaactagcatttcatcagaaaccaagaatactttgagagctttctctgcccctcaaaattctgaatcccaagcccacgttagtggaggtggtgatgacagtagtcgccctactgtttggtatcatgaaactttagaatggcttaaggaggaaaagagaagagatgagcacaggaggaggcctgatcaccccgattttgatgcatctacactctatgtgcctgaggatttcctcaattcttgtactcctgggatgaggaagtggtggcagattaagtctcagaactttgatcttgtcatctgttacaaggtggggaaattttatgagctgtaccacatggatgctcttattggagtcagtgaactggggctggtattcatgaaaggcaactgggcccattctggctttcctgaaattgcatttggccgttattcagattccctggtgcagaagggctataaagtagcacgagtggaacagactgagactccagaaatgatggaggcacgatgtagaaagatggcacatatatccaagtatgatagagtggtgaggagggagatctgtaggatcattaccaagggtacacagacttacagtgtgctggaaggtgatccctctgagaactacagtaagtatcttcttagcctcaaagaaaaagaggaagattcttctggccatactcgtgcatatggtgtgtgctttgttgatacttcactgggaaagtttttcataggtcagttttcagatgatcgccattgttcgagatttaggactctagtggcacactatcccccagtacaagttttatttgaaaaaggaaatctctcaaaggaaactaaaacaattctaaagagttcattgtcctgttctcttcaggaaggtctgatacccggctcccagttttgggatgcatccaaaactttgagaactctccttgaggaagaatattttagggaaaagctaagtgatggcattggggtgatgttaccccaggtgcttaaaggtatgacttcagagtctgattccattgggttgacaccaggagagaaaagtgaattggccctctctgctctaggtggttgtgtcttctacctcaaaaaatgccttattgatcaggagcttttatcaatggctaattttgaagaatatattcccttggattctgacacagtcagcactacaagatctggtgctatcttcaccaaagcctatcaacgaatggtgctagatgcagtgacattaaacaacttggagatttttctgaatggaacaaatggttctactgaaggaaccctactagagagggttgatacttgccatactccttttggtaagcggctcctaaagcaatggctttgtgccccactctgtaaccattatgctattaatgatcgtctagatgccatagaagacctcatggttgtgcctgacaaaatctccgaagttgtagagcttctaaagaagcttccagatcttgagaggctactcagtaaaattcataatgttgggtctcccctgaagagtcagaaccacccagacagcagggctataatgtatgaagaaactacatacagcaagaagaagattattgattttctttctgctctggaaggattcaaagtaatgtgtaaaattatagggatcatggaagaagttgctgatggttttaagtctaaaatccttaagcaggtcatctctctgcagacaaaaaatcctgaaggtcgttttcctgatttgactgtagaattgaaccgatgggatacagcctttgaccatgaaaaggctcgaaagactggacttattactcccaaagcaggctttgactctgattatgaccaagctcttgctgacataagagaaaatgaacagagcctcctggaatacctagagaaacagcgcaacagaattggctgtaggaccatagtctattgggggattggtaggaaccgttaccagctggaaattcctgagaatttcaccactcgcaatttgccagaagaatacgagttgaaatctaccaagaagggctgtaaacgatactggaccaaaactattgaaaagaagttggctaatctcataaatgctgaagaacggagggatgtatcattgaaggactgcatgcggcgactgttctataactttgataaaaattacaaggactggcagtctgctgtagagtgtatcgcagtgttggatgttttactgtgcctggctaactatagtcgagggggtgatggtcctatgtgtcgcccagtaattctgttgccggaagataccccccccttcttagagcttaaaggatcacgccatccttgcattacgaagactttttttggagatgattttattcctaatgacattctaataggctgtgaggaagaggagcaggaaaatggcaaagcctattgtgtgcttgttactggaccaaatatggggggcaagtctacgcttatgagacaggctggcttattagctgtaatggcccagatgggttgttacgtccctgctgaagtgtgcaggctcacaccaattgatagagtgtttactagacttggtgcctcagacagaataatgtcaggtgaaagtacattttttgttgaattaagtgaaactgccagcatactcatgcatgcaacagcacattctctggtgcttgtggatgaattaggaagaggtactgcaacatttgatgggacggcaatagcaaatgcagttgttaaagaacttgctgagactataaaatgtcgtacattattttcaactcactaccattcattagtagaagattattctcaaaatgttgctgtgcgcctaggacatatggcatgcatggtagaaaatgaatgtgaagaccccagccaggagactattacgttcctctataaattcattaagggagcttgtcctaaaagctatggctttaatgcagcaaggcttgctaatctcccagaggaagttattcaaaagggacatagaaaagcaagagaatttgagaagatgaatcagtcactacgattatttcgggaagtttgcctggctagtgaaaggtcaactgtagatgctgaagctgtccataaattgctgactttgattaaggaattatagactgactacattggaagctttgagttgacttctgacaaaggtggtaaattcagacaacattatgatctaataaactttattttttaaaaatga

SEQ ID NO: 350125 - DNA, 1141 bp, Homo sapiens
cgcgcacggcgaggcgcctgttgattggccactggggcccgggttcctccggcggagcgcgcctccccccagatttcccgccagcaggagccgcgcggtagatgcggtgcttttaggagctccgtccgacagaacggttgggccttgccggctgtcggtatgtcgcgacagagcaccctgtacagcttcttccccaagtctccggcgctgagtgatgccaacaaggcctcggccagggcctcacgcgaaggcggccgtgccgccgctgcccccggggcctctccttccccaggcggggatgcggcctggagcgaggctgggcctgggcccaggcccttggcgcgctccgcgtcaccgcccaaggcgaagaacctcaacggagggctgcggagatcggtagcgcctgctgcccccaccagttgtgacttctcaccaggagatttggtttgggccaagatggagggttacccctggtggccttgtctggtttacaaccacccctttgatggaacattcatccgcgagaaagggaaatcagtccgtgttcatgtacagttttttgatgacagcccaacaaggggctgggttagcaaaaggcttttaaagccatatacaggtaagagtcactactgccatgtgtgtgtgtttgtgtgtgtgtgtgtgtgtgtgagagaaacagacagacaggcagacttttttctatatgatgaaattaagtgtattttaccccagtaaattgcaaggggtggcagttgtgaaagcttctggcatgggaaagggatgtaacatggtctttagctggtttgttttgtggaatggaatttttatttctgtcctttgagtgacttacagcaatattatacccttaataagggtaaactaaactgtccccccatcttgaagggtccaagagaaagttaatgtcatcaggatacatagcctatagatagcgacattctctagggaaagatggagatgcgcactacctggccttcaaactactcactaatgaacacatctgagttgagtttcacaccaaactcctggaaccataactttcttttcccagatctagtcttgtttatcacagacatcaacagcctggcatgtttagcctcacttgggctaggtgcaccccatc

SEQ ID NO: 350126 - DNA, 4063 bp, Homo sapiens
ttgaatatctgactttaaaaattattctagaatttctgtgcttcaatattaatgccagaagacttggaattgtttatttgtaggtaactgcctttaaggaaacttgaccaaatattaactaagttatgtatttccttttggcaacagttgtgacttctcaccaggagatttggtttgggccaagatggagggttacccctggtggccttgtctggtttacaaccacccctttgatggaacattcatccgcgagaaagggaaatcagtccgtgttcatgtacagttttttgatgacagcccaacaaggggctgggttagcaaaaggcttttaaagccatatacaggttcaaaatcaaaggaagcccagaagggaggtcatttttacagtgcaaagcctgaaatactgagagcaatgcaacgtgcagatgaagccttaaataaagacaagattaagaggcttgaattggcagtttgtgatgagccctcagagccagaagaggaagaagagatggaggtaggcacaacttacgtaacagataagagtgaagaagataatgaaattgagagtgaagaggaagtacagcctaagacacaaggatctaggcgaagtagccgccaaataaaaaaacgaagggtcatatcagattctgagagtgacattggtggctctgatgtggaatttaagccagacactaaggaggaaggaagcagtgatgaaataagcagtggagtgggggatagtgagagtgaaggcctgaacagccctgtcaaagttgctcgaaagcggaagagaatggtgactggaaatggctctcttaaaaggaaaagctctaggaaggaaacgccctcagccaccaaacaagcaactagcatttcatcagaaaccaagaatactttgagagctttctctgcccctcaaaattctgaatcccaagcccacgttagtggaggtggtgatgacagtagtcgccctactgtttggtatcatgaaactttagaatggcttaaggaggaaaagagaagagatgagcacaggaggaggcctgatcaccccgattttgatgcatctacactctatgtgcctgaggatttcctcaattcttgtactcctgggatgaggaagtggtggcagattaagtctcagaactttgatcttgtcatctgttacaaggtggggaaattttatgagctgtaccacatggatgctcttattggagtcagtgaactggggctggtattcatgaaaggcaactgggcccattctggctttcctgaaattgcatttggccgttattcagattccctggtgcagaagggctataaagtagcacgagtggaacagactgagactccagaaatgatggaggcacgatgtagaaagatggcacatatatccaagtatgatagagtggtgaggagggagatctgtaggatcattaccaagggtacacagacttacagtgtgctggaaggtgatccctctgagaactacagtaagtatcttcttagcctcaaagaaaaagaggaagattcttctggccatactcgtgcatatggtgtgtgctttgttgatacttcactgggaaagtttttcataggtcagttttcagatgatcgccattgttcgagatttaggactctagtggcacactatcccccagtacaagttttatttgaaaaaggaaatctctcaaaggaaactaaaacaattctaaagagttcattgtcctgttctcttcaggaaggtctgatacccggctcccagttttgggatgcatccaaaactttgagaactctccttgaggaagaatattttagggaaaagctaagtgatggcattggggtgatgttaccccaggtgcttaaaggtatgacttcagagtctgattccattgggttgacaccaggagagaaaagtgaattggccctctctgctctaggtggttgtgtcttctacctcaaaaaatgccttattgatcaggagcttttatcaatggctaattttgaagaatatattcccttggattctgacacagtcagcactacaagatctggtgctatcttcaccaaagcctatcaacgaatggtgctagatgcagtgacattaaacaacttggagatttttctgaatggaacaaatggttctactgaaggaaccctactagagagggttgatacttgccatactccttttggtaagcggctcctaaagcaatggctttgtgccccactctgtaaccattatgctattaatgatcgtctagatgccatagaagacctcatggttgtgcctgacaaaatctccgaagttgtagagcttctaaagaagcttccagatcttgagaggctactcagtaaaattcataatgttgggtctcccctgaagagtcagaaccacccagacagcagggctataatgtatgaagaaactacatacagcaagaagaagattattgattttctttctgctctggaaggattcaaagtaatgtgtaaaattatagggatcatggaagaagttgctgatggttttaagtctaaaatccttaagcaggtcatctctctgcagacaaaaaatcctgaaggtcgttttcctgatttgactgtagaattgaaccgatgggatacagcctttgaccatgaaaaggctcgaaagactggacttattactcccaaagcaggctttgactctgattatgaccaagctcttgctgacataagagaaaatgaacagagcctcctggaatacctagagaaacagcgcaacagaattggctgtaggaccatagtctattgggggattggtaggaaccgttaccagctggaaattcctgagaatttcaccactcgcaatttgccagaagaatacgagttgaaatctaccaagaagggctgtaaacgatactggaccaaaactattgaaaagaagttggctaatctcataaatgctgaagaacggagggatgtatcattgaaggactgcatgcggcgactgttctataactttgataaaaattacaaggactggcagtctgctgtagagtgtatcgcagtgttggatgttttactgtgcctggctaactatagtcgagggggtgatggtcctatgtgtcgcccagtaattctgttgccggaagataccccccccttcttagagcttaaaggatcacgccatccttgcattacgaagactttttttggagatgattttattcctaatgacattctaataggctgtgaggaagaggagcaggaaaatggcaaagcctattgtgtgcttgttactggaccaaatatggggggcaagtctacgcttatgagacaggctggcttattagctgtaatggcccagatgggttgttacgtccctgctgaagtgtgcaggctcacaccaattgatagagtgtttactagacttggtgcctcagacagaataatgtcaggtgaaagtacattttttgttgaattaagtgaaactgccagcatactcatgcatgcaacagcacattctctggtgcttgtggatgaattaggaagaggtactgcaacatttgatgggacggcaatagcaaatgcagttgttaaagaacttgctgagactataaaatgtcgtacattattttcaactcactaccattcattagtagaagattattctcaaaatgttgctgtgcgcctaggacatatggcatgcatggtagaaaatgaatgtgaagaccccagccaggagactattacgttcctctataaattcattaagggagcttgtcctaaaagctatggctttaatgcagcaaggcttgctaatctcccagaggaagttattcaaaagggacatagaaaagcaagagaatttgagaagatgaatcagtcactacgattatttcgggaagtttgcctggctagtgaaaggtcaactgtagatgctgaagctgtccataaattgctgactttgattaaggaattatagactgactacattggaagctttgagttgacttctgacaaaggtggtaaattcagacaacattatgatctaataaactttattttttaaaaatga

SEQ ID NO: 350127 - DNA, 4492 bp, Homo sapiens
  misc_feature (4355)..(4355): n is a, c, g, or t
  misc_feature (4358)..(4358): n is a, c, g, or t
  misc_feature (4368)..(4370): n is a, c, g, or t
  misc_feature (4378)..(4379): n is a, c, g, or t
  misc_feature (4388)..(4388): n is a, c, g, or t
  misc_feature (4392)..(4393): n is a, c, g, or t
  misc_feature (4395)..(4395): n is a, c, g, or t
  misc_feature (4406)..(4406): n is a, c, g, or t
  misc_feature (4415)..(4415): n is a, c, g, or t
  misc_feature (4426)..(4426): n is a, c, g, or t
  misc_feature (4436)..(4436): n is a, c, g, or t
cgcgcacggcgaggcgcctgttgattggccactggggcccgggttcctccggcggagcgcgcctccccccagatttcccgccagcaggagccgcgcggtagatgcggtgcttttaggagctccgtccgacagaacggttgggccttgccggctgtcggtatgtcgcgacagagcaccctgtacagcttcttccccaagtctccggcgctgagtgatgccaacaaggcctcggccagggcctcacgcgaaggcggccgtgccgccgctgcccccggggcctctccttccccaggcggggatgcggcctggagcgaggctgggcctgggcccaggcccttggcgcgctccgcgtcaccgcccaaggcgaagaacctcaacggagggctgcggagatcggtagcgcctgctgcccccaccagttgtgacttctcaccaggagatttggtttgggccaagatggagggttacccctggtggccttgtctggtttacaaccacccctttgatggaacattcatccgcgagaaagggaaatcagtccgtgttcatgtacagttttttgatgacagcccaacaaggggctgggttagcaaaaggcttttaaagccatatacaggttcaaaatcaaaggaagcccagaagggaggtcatttttacagtgcaaagcctgaaatactgagagcaatgcaacgtgcagatgaagccttaaataaagacaagattaagaggcttgaattggcagtttgtgatgagccctcagagccagaagaggaagaagagatggaggtaggcacaacttacgtaacagataagagtgaagaagataatgaaattgagagtgaagaggaagtacagcctaagacacaaggatctaggcgaagtagccgccaaataaaaaaacgaagggtcatatcagattctgagagtgacattggtggctctgatgtggaatttaagccagacactaaggaggaaggaagcagtgatgaaataagcagtggagtgggggatagtgagagtgaaggcctgaacagccctgtcaaagttgctcgaaagcggaagagaatggtgactggaaatggctctcttaaaaggaaaagctctaggaaggaaacgccctcagccaccaaacaagcaactagcatttcatcagaaaccaagaatactttgagagctttctctgcccctcaaaattctgaatcccaagcccacgttagtggaggtggtgatgacagtagtcgccctactgtttggtatcatgaaactttagaatggcttaaggaggaaaagagaagagatgagcacaggaggaggcctgatcaccccgattttgatgcatctacactctatgtgcctgaggatttcctcaattcttgtactcctgggatgaggaagtggtggcagattaagtctcagaactttgatcttgtcatctgttacaaggtggggaaattttatgagctgtaccacatggatgctcttattggagtcagtgaactggggctggtattcatgaaaggcaactgggcccattctggctttcctgaaattgcatttggccgttattcagattccctggtgcagaagggctataaagtagcacgagtggaacagactgagactccagaaatgatggaggcacgatgtagaaagatggcacatatatccaagtatgatagagtggtgaggagggagatctgtaggatcattaccaagggtacacagacttacagtgtgctggaaggtgatccctctgagaactacagtaagtatcttcttagcctcaaagaaaaagaggaagattcttctggccatactcgtgcatatggtgtgtgctttgttgatacttcactgggaaagtttttcataggtcagttttcagatgatcgccattgttcgagatttaggactctagtggcacactatcccccagtacaagttttatttgaaaaaggaaatctctcaaaggaaactaaaacaattctaaagagttcattgtcctgttctcttcaggaaggtctgatacccggctcccagttttgggatgcatccaaaactttgagaactctccttgaggaagaatattttagggaaaagctaagtgatggcattggggtgatgttaccccaggtgcttaaaggtatgacttcagagtctgattccattgggttgacaccaggagagaaaagtgaattggccctctctgctctaggtggttgtgtcttctacctcaaaaaatgccttattgatcaggagcttttatcaatggctaattttgaagaatatattcccttggattctgacacagtcagcactacaagatctggtgctatcttcaccaaagcctatcaacgaatggtgctagatgcagtgacattaaacaacttggagatttttctgaatggaacaaatggttctactgaaggaaccctactagagagggttgatacttgccatactccttttggtaagcggctcctaaagcaatggctttgtgccccactctgtaaccattatgctattaatgatcgtctagatgccatagaagacctcatggttgtgcctgacaaaatctccgaagttgtagagcttctaaagaagcttccagatcttgagaggctactcagtaaaattcataatgttgggtctcccctgaagagtcagaaccacccagacagcagggctataatgtatgaagaaactacatacagcaagaagaagattattgattttctttctgctctggaaggattcaaagtaatgtgtaaaattatagggatcatggaagaagttgctgatggttttaagtctaaaatccttaagcaggtcatctctctgcagacaaaaaatcctgaaggtcgttttcctgatttgactgtagaattgaaccgatgggatacagcctttgaccatgaaaaggctcgaaagactggacttattactcccaaagcaggctttgactctgattatgaccaagctcttgctgacataagagaaaatgaacagagcctcctggaatacctagagaaacagcgcaacagaattggctgtaggaccatagtctattgggggattggtaggaaccgttaccagctggaaattcctgagaatttcaccactcgcaatttgccagaagaatacgagttgaaatctaccaagaagggctgtaaacgatactggaccaaaactattgaaaagaagttggctaatctcataaatgctgaagaacggagggatgtatcattgaaggactgcatgcggcgactgttctataactttgataaaaattacaaggactggcagtctgctgtagagtgtatcgcagtgttggatgttttactgtgcctggctaactatagtcgagggggtgatggtcctatgtgtcgcccagtaattctgttgccggaagataccccccccttcttagagcttaaaggatcacgccatccttgcattacgaagactttttttggagatgattttattcctaatgacattctaataggctgtgaggaagaggagcaggaaaatggcaaagcctattgtgtgcttgttactggaccaaatatggggggcaagtctacgcttatgagacaggctggcttattagctgtaatggcccagatgggttgttacgtccctgctgaagtgtgcaggctcacaccaattgatagagtgtttactagacttggtgcctcagacagaataatgtcaggtgaaagtacattttttgttgaattaagtgaaactgccagcatactcatgcatgcaacagcacattctctggtgcttgtggatgaattaggaagaggtactgcaacatttgatgggacggcaatagcaaatgcagttgttaaagaacttgctgagactataaaatgtcgtacattattttcaactcactaccattcattagtagaagattattctcaaaatgttgctgtgcgcctaggacatatggcatgcatggtagaaaatgaatgtgaagaccccagccaggagactattacgttcctctataaattcattaagggagcttgtcctaaaagctatggctttaatgcagcaaggcttgctaatctcccagaggaagttattcaaaagggacatagaaaagcaagagaatttgagaagatgaatcagtcactacgattatttcgggaagtttgcctggctagtgaaaggtcaactgtagatgctgaagctgtccataaattgctgactttgattaaggaattatagactgactacattggaagctttgagttgacttctgacaaaggtggtaaattcagacaacattatgatctaataaactttattttttaaaaatgaaaaaaaaaaaaaaaaaaaanaanaaatatttgnnnaaatttgnnagaaaaatnaaannanaaatgtagatnatgaagatnaaaaaaaaaangtaaaatttnataaaaggaaaataatagacatgactacattggaagctttgagttgacttctgaca

SEQ ID NO: 350128 - DNA, 4273 bp, Homo sapiens
  misc_feature (4136)..(4136): n is a, c, g, or t
  misc_feature (4139)..(4139): n is a, c, g, or t
  misc_feature (4149)..(4151): n is a, c, g, or t
  misc_feature (4159)..(4160): n is a, c, g, or t
  misc_feature (4169)..(4169): n is a, c, g, or t
  misc_feature (4173)..(4174): n is a, c, g, or t
  misc_feature (4176)..(4176): n is a, c, g, or t
  misc_feature (4187)..(4187): n is a, c, g, or t
  misc_feature (4196)..(4196): n is a, c, g, or t
  misc_feature (4207)..(4207): n is a, c, g, or t
  misc_feature (4217)..(4217): n is a, c, g, or t
cgcgcacggcgaggcgcctgttgattggccactggggcccgggttcctccggcggagcgcgcctccccccagatttcccgccagcaggagccgcgcggtagatgcggtgcttttaggagctccgtccgacagaacggttgggccttgccggctgtcggtatgtcgcgacagagcaccctgtacagcttcttccccaagtctccggcgctgagtgatgccaacaaggcctcggccagggcctcacgcgaaggcggccgtgccgccgctgcccccggggcctctccttccccaggcggggatgcggcctggagcgaggctgggcctgggcccaggcccttggcgcgctccgcgtcaccgcccaaggcgaagaacctcaacggagggctgcggagatcggtagcgcctgctgcccccaccagttgtgacttctcaccaggagatttggtttgggccaagatggagggttacccctggtggccttgtctggtttacaaccacccctttgatggaacattcatccgcgagaaagggaaatcagtccgtgttcatgtacagttttttgatgacagcccaacaaggggctgggttagcaaaaggcttttaaagccatatacaggttcaaaatcaaaggaagcccagaagggaggtcatttttacagtgcaaagcctgaaatactgagagcaatgcaacgtgcagatgaagccttaaataaagacaagattaagaggcttgaattggcagtttgtgatgagccctcagagccagaagaggaagaagagatggaggtaggcacaacttacgtaacagataagagtgaagaagataatgaaattgagagtgaagaggaagtacagcctaagacacaaggatctaggcgaagtagccgccaaataaaaaaacgaagggtcatatcagattctgagagtgacattggtggctctgatgtggaatttaagccagacactaaggaggaaggaagcagtgatgaaataagcagtggagtgggggatagtgagagtgaaggcctgaacagccctgtcaaagttgctcgaaagcggaagagaatggtgactggaaatggctctcttaaaaggaaaagctctaggaaggaaacgccctcagccaccaaacaagcaactagcatttcatcagaaaccaagaatactttgagagctttctctgcccctcaaaattctgaatcccaagcccacgttagtggaggtggtgatgacagtagtcgccctactgtttggtatcatgaaactttagaatggcttaaggaggaaaagagaagagatgagcacaggaggaggcctgatcaccccgattttgatgcatctacactctatgtgcctgaggatttcctcaattcttgtactcctgggatgaggaagtggtggcagattaagtctcagaactttgatcttgtcatctgttacaaggtggggaaattttatgagctgtaccacatggatgctcttattggagtcagtgaactggggctggtattcatgaaaggcaactgggcccattctggctttcctgaaattgcatttggccgttattcagattccctggtgcagaagggctataaagtagcacgagtggaacagactgagactccagaaatgatggaggcacgatgtagaaagatggcacatatatccaagtatgatagagtggtgaggagggagatctgtaggatcattaccaagggtacacagacttacagtgtgctggaaggtgatccctctgagaactacagtaagtatcttcttagcctcaaagaaaaagaggaagattcttctggccatactcgtgcatatggtgtgtgctttgttgatacttcactgggaaagtttttcataggtcagttttcagatgatcgccattgttcgagatttaggactctagtggcacactatcccccagtacaagttttatttgaaaaaggaaatctctcaaaggaaactaaaacaattctaaagagttcattgtcctgttctcttcaggaaggtctgatacccggctcccagttttgggatgcatccaaaactttgagaactctccttgaggaagaatattttagggaaaagctaagtgatggcattggggtgatgttaccccaggtgcttaaaggtatgacttcagagtctgattccattgggttgacaccaggagagaaaagtgaattggccctctctgctctaggtggttgtgtcttctacctcaaaaaatgccttattgatcaggagcttttatcaatggctaattttgaagaatatattcccttggattctgacacagtcagcactacaagatctggtgctatcttcaccaaagcctatcaacgaatggtgctagatgcagtgacattaaacaacttggagatttttctgaatggaacaaatggttctactgaaggaaccctactagagagggttgatacttgccatactccttttggtaagcggctcctaaagcaatggctttgtgccccactctgtaaccattatgctattaatgatcgtctagatgccatagaagacctcatggttgtgcctgacaaaatctccgaagttgtagagcttctaaagaagcttccagatcttgagaggctactcagtaaaattcataatgttgggtctcccctgaagagtcagaaccacccagacagcagggctataatgtatgaagaaactacatacagcaagaagaagattattgattttctttctgctctggaaggattcaaagtaatgtgtaaaattatagggatcatggaagaagttgctgatggttttaagtctaaaatccttaagcaggtcatctctctgcagacaaaaaatcctgaaggtcgttttcctgatttgactgtagaattgaaccgatgggatacagcctttgaccatgaaaaggctcgaaagactggacttattactcccaaagcaggctttgactctgattatgaccaagctcttgctgacataagagaaaatgaacagagcctcctggaatacctagagaaacagcgcaacagaattggctgtaggaccatagtctattgggggattggtaggaaccgttaccagctggaaattcctgagaatttcaccactcgcaatttgccagaagaatacgagttgaaatctaccaagaagggctgtaaacgatactggaccaaaactattgaaaagaagttggctaatctcataaatgctgaagaacggagggatgtatcattgaaggactgcatgcggcgactgttctataactttgataaaaattacaaggactggcagtctgctgtagagtgtatcgcagtgttggatgttttactgtgcctggctaactatagtcgagggggtgatggtcctatgtgtcgcccagtaattctgttgccggaagataccccccccttcttagagcttaaaggatcacgccatccttgcattacgaagactttttttggagatgattttattcctaatgacattctaataggctgtgaggaagaggagcaggaaaatggcaaagcctattgtgtgcttgttactggaccaaatatggggggcaagtctacgcttatgagacaggctggcttattagctgtaatggcccagatgggttgttacgtccctgctgaagtgtgcaggctcacaccaattgatagagtgtttactagacttggtgcctcagacagaataatgtcaggtgaaagtacattttttgttgaattaagtgaaactgccagcatactcatgcatgcaacagcacattctctggtgcttgtggatgaattaggaagaggtactgcaacatttgatgggacggcaatagcaaatgcagttgttaaagaacttgctgagactataaaatgtcgtacattattttcaactcactaccattcattagtagaagattattctcaaaatgttgctgtgcgcctaggacatatggcatgcatggtagaaaatgaatgtgaagaccccagccaggagactattacgttcctctataaattcattaagggagcttgtcctaaaagctatggctttaatgcagcaaggcttgctaatctcccagaggaagttattcaaaagggacatagaaaaaaaaaaaaaaaaaaaaaaanaanaaatatttgnnnaaatttgnnagaaaaatnaaannanaaatgtagatnatgaagatnaaaaaaaaaangtaaaatttnataaaaggaaaataatagacatgactacattggaagctttgagttgacttctgaca

SEQ ID NO: 350129 - DNA, 1258 bp, Homo sapiens
ccagtccagttcgtttacagcccttcttggtagatttcaactcgtattcttctggcaaattgcgagtggtgaaattctcaagaagggctgtaaacgatactggaccaaaactattgaaaagaagttggctaatctcataaatgctgaagaacggagggatgtatcattgaaggactgcatgcggcgactgttctataactttgataaaaattacaaggactggcagtctgctgtagagtgtatcgcagtgttggatgttttactgtgcctggctaactatagtcgagggggtgatggtcctatgtgtcgcccagtaattctgttgccggaagataccccccccttcttagagcttaaaggatcacgccatccttgcattacgaagactttttttggagatgattttattcctaatgacattctaataggctgtgaggaagaggagcaggaaaatggcaaagcctattgtgtgcttgttactggaccaaatatggggggcaagtctacgcttatgagacaggctggcttattagctgtaatggcccagatgggttgttacgtccctgctgaagtgtgcaggctcacaccaattgatagagtgtttactagacttggtgcctcagacagaataatgtcaggtgaaagtacattttttgttgaattaagtgaaactgccagcatactcatgcatgcaacagcacattctctggtgcttgtggatgaattaggaagaggtactgcaacatttgatgggacggcaatagcaaatgcagttgttaaagaacttgctgagactataaaatgtcgtacattattttcaactcactaccattcattagtagaagattattctcaaaatgttgctgtgcgcctaggacatatggcatgcatggtagaaaatgaatgtgaagaccccagccaggagactattacgttcctctataaattcattaagggagcttgtcctaaaagctatggctttaatgcagcaaggcttgctaatctcccagaggaagttattcaaaagggacatagaaaagcaagagaatttgagaagatgaatcagtcactacgattatttcgggaagtttgcctggctagtgaaaggtcaactgtagatgctgaagctgtccataaattgctgactttgattaaggaattatagactgactacattggaagctttgagttgacttctgacaaaggtggtaaattcagacaacattatgatctaataaactttattttttaaaaatga

SEQ ID NO: 350130 - DNA, 1171 bp, Homo sapiens
  misc_feature (1)..(1): n is a, c, g, or t
  misc_feature (26)..(27): n is a, c, g, or t
nctaagcgtgactgactctcttaacnnccaccgctacacgattggatgtggtcttgatcgtctgcaatgggaaaatgtatctgcgatgatcgaggaggtatttgaggcaacagacatcaaaattactgtgtacacactctgaaccagtgaacattttggatgtttccgtgttctcctgtgtcatctctactgggccataggaccgggcaaacctaccttaaaataggcagaggaaagtttcatgagaagtagtgtgtttaacaagacagactttggttgctgtattcaagtatttggattatgactgtggaggagggcttgcttaagatatgtggttgtgtttttttgtggaaaagtaaggagttaggtggcttgataataggcagggaaaccagattgtcgggactatgacctttttctccagtatgctacctgatttgtttggctggccactaggtggcagcattggttctacttctctgctttttaagagaaatttcaggaaggatgatcattccagttagtttggcattttttgtcgtttgtgcacataacttggtgttatccttatgtcatcagattcctcctaggggagagtttttgttttaattacaaaattaaattctacattgttaccaagaaatttgtggtgataaaaatggaaaaataaaaatttggggagttagtgaggttctgtgcttatgtctatttgttctggacatgggtaatggagggttcacctgcaacttaatttcaaacagtcagacaaagggtccaagcgggaggagaagcaaagtgagaaataagagataaaaatagacaagtcaaaaggcaggtttttagaatctcctcatggtgaactttttctctcttttgtccactgcatggtttctgtgattgaacctgcctgaatttaatcatgaaaacaagtgaaataatgtatgttaaatgcctggcagagtacttagcacagactagtgacccaataaatcagtgattgtcaaaaatccttatgagtcttctttaaaaaaataaaggccacttcctctcaaaaaattctcatacctgtcatctcagcactttgagaggctgagactggaggatgacttgagcccaggagtttgagacaaacctggttaacatagcgagaccctgtctctacaaaaaaaaa

SEQ ID NO: 350131 - DNA, 446 bp, Homo sapiens
gcggcggcgggaaaccacggaatttactgccggaagttcggcggccttcgccaaagagtgtgggctcggctagcaagctagaggggctcgtttccgccccgctaccgggcgggggcggccatcttagatgcgtgcaattaagggctttggcgggattggctccgcgtttgggctggtccgctgctccccacctaccagggtcggatccggagcccttccccgcggggcggggacctccaaacaaccgactcctttccaggtgaagggtgacttggctgaagaaacacttaaattctggaaatagcgactcagtatcatggccagcagccttaatgaagatccagaaggaagcagagtgcgtaacaactattgacttattggtgaactgaaattcgtaataatggaggtcaaaagcataaacactttttaattaaattaatgattgc

SEQ ID NO: 350132 - DNA, 445 bp, Homo sapiens
ccagattataatgccttttagaaagatgccaagcaaaagtatttagtgattttgaagtgaccagaacatacctatttttaaatactaaggttaaaacatctatttcaggtcaggacgcagtggctcatgcctgtaatcccaacgttttgggagaacaagaagggaggatggcttgagcccaggagttccaggttagtgagctacgattgcgccactgtactccagcctggatgacagaggaaagccctgtatccaaaaacaaacaaaaaaacgttccaaaggcaaatatacatgttttttagactacttaagctctatcatctcatctgctaatgcggataacgtgacaatcaaatgaattaagaaaatcacttaagcaacaatgaaaaactcaccctaaaaagtgaaaataaaacctgtccccgaagttttagtaatgaaagag

SEQ ID NO: 350133 - DNA, 1804 bp, Homo sapiens
gcggcggcgggaaaccacggaatttactgccggaagttcggcggccttcgccaaagagtgtgggctcggctagcaagctagaggggctcgtttccgccccgctaccgggcgggggcggccatcttagatgcgtgcaattaagggctttggcgggattggctccgcgtttgggctggtccgctgctccccacctaccagggtcggatccggagcccttccccgcggggcggggacctccaaacaaccgactcctttccaggtgaagggtgacttggctgaagaaacacttaaattctggaaatagcgactcagtatcatggccagcagccttaatgaagatccagaaggaagcagaatcacttatgtgaaaggagacctttttgcatgcccgaaaacagactctttagcccactgtatcagtgaggattgtcgcatgggcgctgggatagctgtcctctttaagaagaaatttggaggggtgcaagaacttttaaatcaacaaaagaaatctggagaagtggctgttctgaagagagatgggcgatatatatattacttgattacaaagaaaagggcttcgcacaagccaacttatgaaaacttacagaagagtttagaggcaatgaagtctcattgtctgaagaatggagtcactgacctctccatgcccaggattggatgtggtcttgatcgtctgcaatgggaaaatgtatctgcgatgatcgaggaggtatttgaggcaacagacatcaaaattactgtgtacacactctgaaccagtgaacattttggatgtttccgtgttctcctgtgtcatctctactgggccataggaccgggcaaacctaccttaaaataggcagaggaaagtttcatgagaagtagtgtgtttaacaagacagactttggttgctgtattcaagtatttggattatgactgtggaggagggcttgcttaagatatgtggttgtgtttttttgtggaaaagtaaggagttaggtggcttgataataggcagggaaaccagattgtcgggactatgacctttttctccagtatgctacctgatttgtttggctggccactaggtggcagcattggttctacttctctgctttttaagagaaatttcaggaaggatgatcattccagttagtttggcattttttgtcgtttgtgcacataacttggtgttatccttatgtcatcagattcctcctaggggagagtttttgttttaattacaaaattaaattctacattgttaccaagaaatttgtggtgataaaaatggaaaaataaaaatttggggagttagtgaggttctgtgcttatgtctatttgttctggacatgggtaatggagggttcacctgcaacttaatttcaaacagtcagacaaagggtccaagcgggaggagaagcaaagtgagaaataagagataaaaatagacaagtcaaaaggcaggtttttagaatctcctcatggtgaactttttctctcttttgtccactgcatggtttctgtgattgaacctgcctgaatttaatcatgaaaacaagtgaaataatgtatgttaaatgcctggcagagtacttagcacagactagtgacccaataaatcagtgattgtcaaaaatccttatgagtcttctttaaaaaaataaaggccacttcctctcaaaaaattctcatacctgtcatctcagcactttgagaggctgagactggaggatgacttgagcccaggagtttgagacaaacctggttaacatagcgagaccctgtctctacaaaaaaaaa

SEQ ID NO: 350134 - DNA, 1893 bp, Homo sapiens
gcggcggcgggaaaccacggaatttactgccggaagttcggcggccttcgccaaagagtgtgggctcggctagcaagctagaggggctcgtttccgccccgctaccgggcgggggcggccatcttagatgcgtgcaattaagggctttggcgggattggctccgcgtttgggctggtccgctgctccccacctaccagggtcggatccggagcccttccccgcggggcggggacctccaaacaaccgactcctttccaggtgaagggtgacttggacttgggtacgttggggctttgagcgagcctccccgcaccctcccataggaccccaggacagactgcgtcctcgctgacccgccctaggctgaagaaacacttaaattctggaaatagcgactcagtatcatggccagcagccttaatgaagatccagaaggaagcagaatcacttatgtgaaaggagacctttttgcatgcccgaaaacagactctttagcccactgtatcagtgaggattgtcgcatgggcgctgggatagctgtcctctttaagaagaaatttggaggggtgcaagaacttttaaatcaacaaaagaaatctggagaagtggctgttctgaagagagatgggcgatatatatattacttgattacaaagaaaagggcttcgcacaagccaacttatgaaaacttacagaagagtttagaggcaatgaagtctcattgtctgaagaatggagtcactgacctctccatgcccaggattggatgtggtcttgatcgtctgcaatgggaaaatgtatctgcgatgatcgaggaggtatttgaggcaacagacatcaaaattactgtgtacacactctgaaccagtgaacattttggatgtttccgtgttctcctgtgtcatctctactgggccataggaccgggcaaacctaccttaaaataggcagaggaaagtttcatgagaagtagtgtgtttaacaagacagactttggttgctgtattcaagtatttggattatgactgtggaggagggcttgcttaagatatgtggttgtgtttttttgtggaaaagtaaggagttaggtggcttgataataggcagggaaaccagattgtcgggactatgacctttttctccagtatgctacctgatttgtttggctggccactaggtggcagcattggttctacttctctgctttttaagagaaatttcaggaaggatgatcattccagttagtttggcattttttgtcgtttgtgcacataacttggtgttatccttatgtcatcagattcctcctaggggagagtttttgttttaattacaaaattaaattctacattgttaccaagaaatttgtggtgataaaaatggaaaaataaaaatttggggagttagtgaggttctgtgcttatgtctatttgttctggacatgggtaatggagggttcacctgcaacttaatttcaaacagtcagacaaagggtccaagcgggaggagaagcaaagtgagaaataagagataaaaatagacaagtcaaaaggcaggtttttagaatctcctcatggtgaactttttctctcttttgtccactgcatggtttctgtgattgaacctgcctgaatttaatcatgaaaacaagtgaaataatgtatgttaaatgcctggcagagtacttagcacagactagtgacccaataaatcagtgattgtcaaaaatccttatgagtcttctttaaaaaaataaaggccacttcctctcaaaaaattctcatacctgtcatctcagcactttgagaggctgagactggaggatgacttgagcccaggagtttgagacaaacctggttaacatagcgagaccctgtctctacaaaaaaaaa

SEQ ID NO: 350135 - DNA, 1603 bp, Homo sapiens
gcggcggcgggaaaccacggaatttactgccggaagttcggcggccttcgccaaagagtgtgggctcggctagcaagctagaggggctcgtttccgccccgctaccgggcgggggcggccatcttagatgcgtgcaattaagggctttggcgggattggctccgcgtttgggctggtccgctgctccccacctaccagggtcggatccggagcccttccccgcggggcggggacctccaaacaaccgactcctttccaggtgaagggtgacttggctgaagaaacacttaaattctggaaatagcgactcagtatcatggccagcagccttaatgaagatccagaaggaagcagaatcacttatgtgaaaggagacctttttgcatgcccgaaaacagactctttagcccactgtatcagtgaggattgtcgcatgggcgctgggatagctgtcctctttaagaagaaatttggaggggtgcaagaacttttaaatcaacaaaagaaatctggagaagtggctgttctgaagagagatgggcgatatatatattacttgattacaaagaaaagggcttcgcacaagccaacttatgaaaacttacagaagagtttagaggcaatgaagtctcattgtctgaagaatggagtcactgacctctccatgcccaggattggatgtggtcttgatcgtctgcaatgggaaaatgtatctgcgatgatcgaggaggtatttgaggcaacagacatcaaaattactgtgtacacactctgaaccagtgaacattttggatgtttccgtgttctcctgtgtcatctctactgggccataggaccgggcaaacctaccttaaaataggcagaggaaagtttcatgagaagtagtgtgtttaacaagacagactttggttgctgtattcaagtatttggattatgactgtggaggagggcttgcttaagatatgtggttgtgtttttttgtggaaaagtaaggagttaggtggcttgataataggcagggaaaccagattgtcgggactatgacctttttctccagtatgctacctgatttgtttggctggccactaggtggcagcattggttctacttctctgctttttaagagaaatttcaggaaggatgatcattccagttagtttggcattttttgtcgtttgtgcacataacttggtgttatccttatgtcatcagattcctcctaggggagagtttttgttttaattacaaaattaaattctacattgttaccaagaaatttgtggtgataaaaatggaaaaataaaaatttggggagttagtgaaaaacaaaaaccaaacaacaaaaacaggagaccgagcagcgaacactcacgaccaacacacccccagacacgtcactaagccgatacacaaccacacacacaccatggtgagccctcccacgccagcaagaacaggatcaaacaagtgggggggcgccggcccacagaagtagcagcgcgtgtcgctgaagaagaccggccagtaggggggggctcacccaaaaaagccggggacgcggctgacaaccgagggcgcgtgtgacaaagggcgggagtaccgg

SEQ ID NO: 350136 - DNA, 2890 bp, Homo sapiens
gcggcggcgggaaaccacggaatttactgccggaagttcggcggccttcgccaaagagtgtgggctcggctagcaagctagaggggctcgtttccgccccgctaccgggcgggggcggccatcttagatgcgtgcaattaagggctttggcgggattggctccgcgtttgggctggtccgctgctccccacctaccagggtcggatccggagcccttccccgcggggcggggacctccaaacaaccgactcctttccaggtgaagggtgacttggacttgggtacgttggggctttgagcgagcctccccgcaccctcccataggaccccaggacagactgcgtcctcgctgacccgccctaggctgaagaaacacttaaattctggaaatagcgactcagtatcatggccagcagccttaatgaagatccagaaggaagcagaatcacttatgtgaaaggagacctttttgcatgcccgaaaacagactctttagcccactgtatcagtgaggattgtcgcatgggcgctgggatagctgtcctctttaagaagaaatttggaggggtgcaagaacttttaaatcaacgtgagttttggaaaccacttacctggtttgccctggctagagcaccttttaatctgttacactttaataaaatatgcgtgtaaagaggggattcctaagaaccaaatgtttttaagattttcctccccaagaatggcctctagtttagacgtttaccatatcaaaacccaactcctgtgaaggtttttaatctcttcctcttgtatcatgaaactttcttgacgatattactgtacttctctgaaacttgaaataactctgagatgcttagtctataggttggcattcaagatcctttacttaccaatattctgctttctcttcaaagaggaatttagaaacctcttcttccttacagacccctcccatcactttctacgggccactttaaaccagaaatgtgcactagaatcctatgtaaagcttctgcaacagtttctccgaccacattccaggcttaacagcatcagtgtccacagtgattcttagccttagacaaaagcaattcttactgctttgtattatagttatttggaatgatgatatcttctctggattgaaaactctgtaataattaattccttttttatatatctgtattcctcataatgccttatacagctctttgtatgtaaaaagataattattgagtaaatacacatttggcaagtaaaaaactacacactataaaacaatttcaaggcaatagagaaagtttgtggacaaatgaggatatatttaaaagtagtagtggtacaaaagatgggttgtgaggaaacatgactgtaagaaagctgttaagttaaggaatatagtatttgggaatgctgataaaaagcaaagtgtttgtgggagacaataggtcttccctattcccttcttcagtgttgaaaattctagttctgaggtaaactcagatctgtaaacattttaaaatctttagagatcagtgtttggttttctttttcatttctactattaaataactttttcttagaaaagaaatctggagaagtggctgttctgaagagagatgggcgatatatatattacttgattacaaagaaaagggcttcgcacaagccaacttatgaaaacttacagaagagtttagaggcaatgaagtctcattgtctgaagaatggagtcactgacctctccatgcccaggattggatgtggtcttgatcgtctgcaatgggaaaatgtatctgcgatgatcgaggaggtatttgaggcaacagacatcaaaattactgtgtacacactctgaaccagtgaacattttggatgtttccgtgttctcctgtgtcatctctactgggccataggaccgggcaaacctaccttaaaataggcagaggaaagtttcatgagaagtagtgtgtttaacaagacagactttggttgctgtattcaagtatttggattatgactgtggaggagggcttgcttaagatatgtggttgtgtttttttgtggaaaagtaaggagttaggtggcttgataataggcagggaaaccagattgtcgggactatgacctttttctccagtatgctacctgatttgtttggctggccactaggtggcagcattggttctacttctctgctttttaagagaaatttcaggaaggatgatcattccagttagtttggcattttttgtcgtttgtgcacataacttggtgttatccttatgtcatcagattcctcctaggggagagtttttgttttaattacaaaattaaattctacattgttaccaagaaatttgtggtgataaaaatggaaaaataaaaatttggggagttagtgaggttctgtgcttatgtctatttgttctggacatgggtaatggagggttcacctgcaacttaatttcaaacagtcagacaaagggtccaagcgggaggagaagcaaagtgagaaataagagataaaaatagacaagtcaaaaggcaggtttttagaatctcctcatggtgaactttttctctcttttgtccactgcatggtttctgtgattgaacctgcctgaatttaatcatgaaaacaagtgaaataatgtatgttaaatgcctggcagagtacttagcacagactagtgacccaataaatcagtgattgtcaaaaatccttatgagtcttctttaaaaaaataaaggccacttcctctcaaaaaattctcatacctgtcatctcagcactttgagaggctgagactggaggatgacttgagcccaggagtttgagacaaacctggttaacatagcgagaccctgtctctacaaaaaaaaa

SEQ ID NO: 350137 - DNA, 2801 bp, Homo sapiens
gcggcggcgggaaaccacggaatttactgccggaagttcggcggccttcgccaaagagtgtgggctcggctagcaagctagaggggctcgtttccgccccgctaccgggcgggggcggccatcttagatgcgtgcaattaagggctttggcgggattggctccgcgtttgggctggtccgctgctccccacctaccagggtcggatccggagcccttccccgcggggcggggacctccaaacaaccgactcctttccaggtgaagggtgacttggctgaagaaacacttaaattctggaaatagcgactcagtatcatggccagcagccttaatgaagatccagaaggaagcagaatcacttatgtgaaaggagacctttttgcatgcccgaaaacagactctttagcccactgtatcagtgaggattgtcgcatgggcgctgggatagctgtcctctttaagaagaaatttggaggggtgcaagaacttttaaatcaacgtgagttttggaaaccacttacctggtttgccctggctagagcaccttttaatctgttacactttaataaaatatgcgtgtaaagaggggattcctaagaaccaaatgtttttaagattttcctccccaagaatggcctctagtttagacgtttaccatatcaaaacccaactcctgtgaaggtttttaatctcttcctcttgtatcatgaaactttcttgacgatattactgtacttctctgaaacttgaaataactctgagatgcttagtctataggttggcattcaagatcctttacttaccaatattctgctttctcttcaaagaggaatttagaaacctcttcttccttacagacccctcccatcactttctacgggccactttaaaccagaaatgtgcactagaatcctatgtaaagcttctgcaacagtttctccgaccacattccaggcttaacagcatcagtgtccacagtgattcttagccttagacaaaagcaattcttactgctttgtattatagttatttggaatgatgatatcttctctggattgaaaactctgtaataattaattccttttttatatatctgtattcctcataatgccttatacagctctttgtatgtaaaaagataattattgagtaaatacacatttggcaagtaaaaaactacacactataaaacaatttcaaggcaatagagaaagtttgtggacaaatgaggatatatttaaaagtagtagtggtacaaaagatgggttgtgaggaaacatgactgtaagaaagctgttaagttaaggaatatagtatttgggaatgctgataaaaagcaaagtgtttgtgggagacaataggtcttccctattcccttcttcagtgttgaaaattctagttctgaggtaaactcagatctgtaaacattttaaaatctttagagatcagtgtttggttttctttttcatttctactattaaataactttttcttagaaaagaaatctggagaagtggctgttctgaagagagatgggcgatatatatattacttgattacaaagaaaagggcttcgcacaagccaacttatgaaaacttacagaagagtttagaggcaatgaagtctcattgtctgaagaatggagtcactgacctctccatgcccaggattggatgtggtcttgatcgtctgcaatgggaaaatgtatctgcgatgatcgaggaggtatttgaggcaacagacatcaaaattactgtgtacacactctgaaccagtgaacattttggatgtttccgtgttctcctgtgtcatctctactgggccataggaccgggcaaacctaccttaaaataggcagaggaaagtttcatgagaagtagtgtgtttaacaagacagactttggttgctgtattcaagtatttggattatgactgtggaggagggcttgcttaagatatgtggttgtgtttttttgtggaaaagtaaggagttaggtggcttgataataggcagggaaaccagattgtcgggactatgacctttttctccagtatgctacctgatttgtttggctggccactaggtggcagcattggttctacttctctgctttttaagagaaatttcaggaaggatgatcattccagttagtttggcattttttgtcgtttgtgcacataacttggtgttatccttatgtcatcagattcctcctaggggagagtttttgttttaattacaaaattaaattctacattgttaccaagaaatttgtggtgataaaaatggaaaaataaaaatttggggagttagtgaggttctgtgcttatgtctatttgttctggacatgggtaatggagggttcacctgcaacttaatttcaaacagtcagacaaagggtccaagcgggaggagaagcaaagtgagaaataagagataaaaatagacaagtcaaaaggcaggtttttagaatctcctcatggtgaactttttctctcttttgtccactgcatggtttctgtgattgaacctgcctgaatttaatcatgaaaacaagtgaaataatgtatgttaaatgcctggcagagtacttagcacagactagtgacccaataaatcagtgattgtcaaaaatccttatgagtcttctttaaaaaaataaaggccacttcctctcaaaaaattctcatacctgtcatctcagcactttgagaggctgagactggaggatgacttgagcccaggagtttgagacaaacctggttaacatagcgagaccctgtctctacaaaaaaaaa

SEQ ID NO: 350138 - DNA, 1745 bp, Homo sapiens
gcggcggcgggaaaccacggaatttactgccggaagttcggcggccttcgccaaagagtgtgggctcggctagcaagctagaggggctcgtttccgccccgctaccgggcgggggcggccatcttagatgcgtgcaattaagggctttggcgggattggctccgcgtttgggctggtccgctgctccccacctaccagggtcggatccggagcccttccccgcggggcggggacctccaaacaaccgactcctttccaggtgaagggtgacttggctgaagaaacacttaaattctggaaatagcgactcagtatcatggccagcagccttaatgaagatccagaaggaagcagaatcacttatgtgaaaggagacctttttgcatgcccgaaaacagactctttagcccactgtatcagtgaggattgtcgcatgggcgctgggatagctgtcctctttaagaagaaatttggaggggtgcaagaacttttaaatcaacattacaaagaaaagggcttcgcacaagccaacttatgaaaacttacagaagagtttagaggcaatgaagtctcattgtctgaagaatggagtcactgacctctccatgcccaggattggatgtggtcttgatcgtctgcaatgggaaaatgtatctgcgatgatcgaggaggtatttgaggcaacagacatcaaaattactgtgtacacactctgaaccagtgaacattttggatgtttccgtgttctcctgtgtcatctctactgggccataggaccgggcaaacctaccttaaaataggcagaggaaagtttcatgagaagtagtgtgtttaacaagacagactttggttgctgtattcaagtatttggattatgactgtggaggagggcttgcttaagatatgtggttgtgtttttttgtggaaaagtaaggagttaggtggcttgataataggcagggaaaccagattgtcgggactatgacctttttctccagtatgctacctgatttgtttggctggccactaggtggcagcattggttctacttctctgctttttaagagaaatttcaggaaggatgatcattccagttagtttggcattttttgtcgtttgtgcacataacttggtgttatccttatgtcatcagattcctcctaggggagagtttttgttttaattacaaaattaaattctacattgttaccaagaaatttgtggtgataaaaatggaaaaataaaaatttggggagttagtgaggttctgtgcttatgtctatttgttctggacatgggtaatggagggttcacctgcaacttaatttcaaacagtcagacaaagggtccaagcgggaggagaagcaaagtgagaaataagagataaaaatagacaagtcaaaaggcaggtttttagaatctcctcatggtgaactttttctctcttttgtccactgcatggtttctgtgattgaacctgcctgaatttaatcatgaaaacaagtgaaataatgtatgttaaatgcctggcagagtacttagcacagactagtgacccaataaatcagtgattgtcaaaaatccttatgagtcttctttaaaaaaataaaggccacttcctctcaaaaaattctcatacctgtcatctcagcactttgagaggctgagactggaggatgacttgagcccaggagtttgagacaaacctggttaacatagcgagaccctgtctctacaaaaaaaaa

SEQ ID NO: 350139 - DNA, 1691 bp, Homo sapiens
gcggcggcgggaaaccacggaatttactgccggaagttcggcggccttcgccaaagagtgtgggctcggctagcaagctagaggggctcgtttccgccccgctaccgggcgggggcggccatcttagatgcgtgcaattaagggctttggcgggattggctccgcgtttgggctggtccgctgctccccacctaccagggtcggatccggagcccttccccgcggggcggggacctccaaacaaccgactcctttccaggtgaagggtgacttggctgaagaaacacttaaattctggaaatagcgactcagtatcatggccagcagccttaatgaagatccagaaggaagcagaatcacttatgtgaaaggagacctttttgcatgcccgaaaacagactctttagcccactgtatcagtgaggattgtcgcatgggcgctgggatagctgtcctctttaagaagaaatttggaggggtgcaagaacttttaaatcaacaaaagaaatctggagaagtggctgttctgaagagagatgggcgatatatatattacttggattggatgtggtcttgatcgtctgcaatgggaaaatgtatctgcgatgatcgaggaggtatttgaggcaacagacatcaaaattactgtgtacacactctgaaccagtgaacattttggatgtttccgtgttctcctgtgtcatctctactgggccataggaccgggcaaacctaccttaaaataggcagaggaaagtttcatgagaagtagtgtgtttaacaagacagactttggttgctgtattcaagtatttggattatgactgtggaggagggcttgcttaagatatgtggttgtgtttttttgtggaaaagtaaggagttaggtggcttgataataggcagggaaaccagattgtcgggactatgacctttttctccagtatgctacctgatttgtttggctggccactaggtggcagcattggttctacttctctgctttttaagagaaatttcaggaaggatgatcattccagttagtttggcattttttgtcgtttgtgcacataacttggtgttatccttatgtcatcagattcctcctaggggagagtttttgttttaattacaaaattaaattctacattgttaccaagaaatttgtggtgataaaaatggaaaaataaaaatttggggagttagtgaggttctgtgcttatgtctatttgttctggacatgggtaatggagggttcacctgcaacttaatttcaaacagtcagacaaagggtccaagcgggaggagaagcaaagtgagaaataagagataaaaatagacaagtcaaaaggcaggtttttagaatctcctcatggtgaactttttctctcttttgtccactgcatggtttctgtgattgaacctgcctgaatttaatcatgaaaacaagtgaaataatgtatgttaaatgcctggcagagtacttagcacagactagtgacccaataaatcagtgattgtcaaaaatccttatgagtcttctttaaaaaaataaaggccacttcctctcaaaaaattctcatacctgtcatctcagcactttgagaggctgagactggaggatgacttgagcccaggagtttgagacaaacctggttaacatagcgagaccctgtctctacaaaaaaaaa

SEQ ID NO: 350140 - DNA, 1240 bp, Homo sapiens
  misc_feature (88)..(88): n is a, c, g, or t
  misc_feature (98)..(98): n is a, c, g, or t
  misc_feature (106)..(106): n is a, c, g, or t
cgcccaaaagcgcccatcccagttaattgttacgccagccagtgcgtctgacccaccaagtttggaccttaaggcccaagtgactttnttaattaccncccgctcnaggattggatgtggtcttgatcgtctgcaatgggaaaatgtatctgcgatgatcgaggaggtatttgaggcaacagacatcaaaattactgtgtacacactctgaaccagtgaacattttggatgtttccgtgttctcctgtgtcatctctactgggccataggaccgggcaaacctaccttaaaataggcagaggaaagtttcatgagaagtagtgtgtttaacaagacagactttggttgctgtattcaagtatttggattatgactgtggaggagggcttgcttaagatatgtggttgtgtttttttgtggaaaagtaaggagttaggtggcttgataataggcagggaaaccagattgtcgggactatgacctttttctccagtatgctacctgatttgtttggctggccactaggtggcagcattggttctacttctctgctttttaagagaaatttcaggaaggatgatcattccagttagtttggcattttttgtcgtttgtgcacataacttggtgttatccttatgtcatcagattcctcctaggggagagtttttgttttaattacaaaattaaattctacattgttaccaagaaatttgtggtgataaaaatggaaaaataaaaatttggggagttagtgaggttctgtgcttatgtctatttgttctggacatgggtaatggagggttcacctgcaacttaatttcaaacagtcagacaaagggtccaagcgggaggagaagcaaagtgagaaataagagataaaaatagacaagtcaaaaggcaggtttttagaatctcctcatggtgaactttttctctcttttgtccactgcatggtttctgtgattgaacctgcctgaatttaatcatgaaaacaagtgaaataatgtatgttaaatgcctggcagagtacttagcacagactagtgacccaataaatcagtgattgtcaaaaatccttatgagtcttctttaaaaaaataaaggccacttcctctcaaaaaattctcatacctgtcatctcagcactttgagaggctgagactggaggatgacttgagcccaggagtttgagacaaacctggttaacatagcgagaccctgtctctacaaaaaaaaa

SEQ ID NO: 350141 - DNA, 1072 bp, Homo sapiens
gcggcggcgggaaaccacggaatttactgccggaagttcggcggccttcgccaaagagtgtgggctcggctagcaagctagaggggctcgtttccgccccgctaccgggcgggggcggccatcttagatgcgtgcaattaagggctttggcgggattggctccgcgtttgggctggtccgctgctccccacctaccagggtcggatccggagcccttccccgcggggcggggacctccaaacaaccgactcctttccaggtgaagggtgacttggctgaagaaacacttaaattctggaaatagcgactcagtatcatggccagcagccttaatgaagatccagaaggaagcagaatcacttatgtgaaaggagacctttttgcatgcccgaaaacagactctttagcccactgtatcagtgaggattgtcgcatgggcgctgggatagctgtcctctttaagaagaaatttggaggggtgcaagaacttttaaatcaacaaaagaaatctggagaagtggctgttctgaagagagatgggcgatatatatattacttgattacaaagaaaagggcttcgcacaagccaacttatgaaaacttacagaagagtttagaggcaatgaagtctcattgtctgaagaatggagtcactgacctctccatgcccaggattggatgtggtcttgatcgtctgcaatgggaaaatgtatctgcgatgatcgaggaggtatttgaggcaacagacatcaaaattactgtgtacacactctgaaccagtgaacattttggatgtttccgtgttctcctgtgtcatctctactgggccataggaccgggcaaacctaccttaaaataggcagaggaaagtttcatgagaagtagtgtgtttaacaagacagactttggttgctgtattcaagtatttggattatgactgtggaggagggcttgcttaagatatgtggttgtgttttcgtggaaagtagagtagtggtgatatagcgggaacgatgcggatatactttctcattgtctgatgtggtgccaggggctggtcacccgggacggc

SEQ ID NO: 350142 - DNA, 1623 bp, Homo sapiens
gcggcggcgggaaaccacggaatttactgccggaagttcggcggccttcgccaaagagtgtgggctcggctagcaagctagaggggctcgtttccgccccgctaccgggcgggggcggccatcttagatgcgtgcaattaagggctttggcgggattggctccgcgtttgggctggtccgctgctccccacctaccagggtcggatccggagcccttccccgcggggcggggacctccaaacaaccgactcctttccaggtgaagggtgacttggctgaagaaacacttaaattctggaaatagcgactcagtatcatggccagcagccttaatgaagatccagaaggaagcagaatcacttatgtgaaaggagacctttttgcatgcccgaaaacagactctttagcccactgtatcagtgaggattgtcgcatgggcgctgggatagctgtcctctttaagaagaaatttggaggggtgcaagaacttttaaatcaacaaaagaaatctggagaagtggctgttctgaagagagatgggcgatatatatattacttggattggatgtggtcttgatcgtctgcaatgggaaaatgtatctgcgatgatcgaggaggtatttgaggcaacagacatcaaaattactgtgtacacactctgaaccagtgaacattttggatgtttccgtgttctcctgtgtcatctctactgggccataggaccgggcaaacctaccttaaaataggcagaggaaagtttcatgagaagtagtgtgtttaacaagacagactttggttgctgtattcaagtatttggattatgactgtggaggagggcttgcttaagatatgtggttgtgtttttttgtggaaaagtaaggagttaggtggcttgataataggcagggaaaccagattgtcgggactatgacctttttctccagtatgctacctgatttgtttggctggccactaggtggcagcattggttctacttctctgctttttaagagaaatttcaggaaggatgatcattccagttagtttggcattttttgtcgtttgtgcacataacttggtgttatccttatgtcatcagattcctcctaggggagagtataaaaatttggggagttagtgaggttctgtgcttatgtctatttgttctggacatgggtaatggagggttcacctgcaacttaatttcaaacagtcagacaaagggtccaagcgggaggagaagcaaagtgagaaataagagataaaaatagacaagtcaaaaggcaggtttttagaatctcctcatggtgaactttttctctcttttgtccactgcatggtttctgtgattgaacctgcctgaatttaatcatgaaaacaagtgaaataatgtatgttaaatgcctggcagagtacttagcacagactagtgacccaataaatcagtgattgtcaaaaatccttatgagtcttctttaaaaaaataaaggccacttcctctcaaaaaattctcatacctgtcatctcagcactttgagaggctgagactggaggatgacttgagcccaggagtttgagacaaacctggttaacatagcgagaccctgtctctacaaaaaaaaa

SEQ ID NO: 350143 - DNA, 535 bp, Homo sapiens
gcggcggcgggaaaccacggaatttactgccggaagttcggcggccttcgccaaagagtgtgggctcggctagcaagctagaggggctcgtttccgccccgctaccgggcgggggcggccatcttagatgcgtgcaattaagggctttggcgggattggctccgcgtttgggctggtccgctgctccccacctaccagggtcggatccggagcccttccccgcggggcggggacctccaaacaaccgactcctttccaggtgaagggtgacttggacttgggtacgttggggctttgagcgagcctccccgcaccctcccataggaccccaggacagactgcgtcctcgctgacccgccctaggctgaagaaacacttaaattctggaaatagcgactcagtatcatggccagcagccttaatgaagatccagaaggaagcagagtgcgtaacaactattgacttattggtgaactgaaattcgtaataatggaggtcaaaagcataaacactttttaattaaattaatgattgc

SEQ ID NO: 350144 - DNA, 268 bp, Homo sapiens
gggtacgttggggctttgagcgagcctccccgcaccctcccataggaccccaggacagactgcgtcctcgctgacccgccctagggtaggagacagagaatgggaggcttcaatagactctttccttctcccacgcaccccccaaaaaagtggggggtgaacgttccttgagaggccgccttcctttccccacgcctggggctcagcacgccagtaccctgtacactctgtggttgcggcttaacgggactgtggccaagtcccttct

SEQ ID NO: 350145 - DNA, 454 bp, Homo sapiens
cagctggggataaatcaacaaggcttaaaaaaaaaaaggtactacttgaactttttttttctttgctatcagaggcctgcaggatgaactggtcttaagtgtgagaaagatttagctatgtgatgatgtggaggaaggtgaagtactacaaatcaagagagcataaaaacaagaacagaaatatttcagcatgtgaacagtggactaaacaggaaaaaaagcttggggccacactactttctctcaaaatgtcagacaaagaaattcttctgcagactggtggaagcttgtaaggtatttagcaaaaaagttaccagattataatgccttttagaaagatgccaagcaaaagtatttagtgattttgaagtgaccagaacatacctatttttaaatactaaggttaaaacatctatttcaggtcaggacgcagtggctcatgcctgtaatccca

SEQ ID NO: 350146 - DNA, 1632 bp, Homo sapiens
gcggcggcgggaaaccacggaatttactgccggaagttcggcggccttcgccaaagagtgtgggctcggctagcaagctagaggggctcgtttccgccccgctaccgggcgggggcggccatcttagatgcgtgcaattaagggctttggcgggattggctccgcgtttgggctggtccgctgctccccacctaccagggtcggatccggagcccttccccgcggggcggggacctccaaacaaccgactcctttccaggtgaagggtgacttggctgaagaaacacttaaattctggaaatagcgactcagtatcatggccagcagccttaatgaagatccagaaggaagcagaatcacttatgtgaaaggagacctttttgcatgcccgaaaacagactctttagcccactgtatcagtgaggattgtcgcatgggcgctgggatagctgtcctctttaagaagaaatttggaggggtgcaagaacttttaaatcaacgattggatgtggtcttgatcgtctgcaatgggaaaatgtatctgcgatgatcgaggaggtatttgaggcaacagacatcaaaattactgtgtacacactctgaaccagtgaacattttggatgtttccgtgttctcctgtgtcatctctactgggccataggaccgggcaaacctaccttaaaataggcagaggaaagtttcatgagaagtagtgtgtttaacaagacagactttggttgctgtattcaagtatttggattatgactgtggaggagggcttgcttaagatatgtggttgtgtttttttgtggaaaagtaaggagttaggtggcttgataataggcagggaaaccagattgtcgggactatgacctttttctccagtatgctacctgatttgtttggctggccactaggtggcagcattggttctacttctctgctttttaagagaaatttcaggaaggatgatcattccagttagtttggcattttttgtcgtttgtgcacataacttggtgttatccttatgtcatcagattcctcctaggggagagtttttgttttaattacaaaattaaattctacattgttaccaagaaatttgtggtgataaaaatggaaaaataaaaatttggggagttagtgaggttctgtgcttatgtctatttgttctggacatgggtaatggagggttcacctgcaacttaatttcaaacagtcagacaaagggtccaagcgggaggagaagcaaagtgagaaataagagataaaaatagacaagtcaaaaggcaggtttttagaatctcctcatggtgaactttttctctcttttgtccactgcatggtttctgtgattgaacctgcctgaatttaatcatgaaaacaagtgaaataatgtatgttaaatgcctggcagagtacttagcacagactagtgacccaataaatcagtgattgtcaaaaatccttatgagtcttctttaaaaaaataaaggccacttcctctcaaaaaattctcatacctgtcatctcagcactttgagaggctgagactggaggatgacttgagcccaggagtttgagacaaacctggttaacatagcgagaccctgtctctacaaaaaaaaa

SEQ ID NO: 350147 - DNA, 437 bp, Homo sapiens
cccaagggagggagatttcacaaaatgagcagtggataagattagtaatatgaacagcaagttgtgcagcctccggaaagaatgcgcaagggtatcaatcttctaagagtgaggttccaggcaccgaatggactggtcttacagcccggacaagaaacggagaccgcttggttgggctccaagacggaggtgtgcggtcctgccactgcgaacggggcggggaagagaggaaatgacgagccaaaaggggtggtaacggcgccgggccggagacccgggcggagcgggctgggaggaggggcgcggcggagcagggggagtgggcgaactaacggccccctctccccaccagggagacagcgggggcgggcccatagggctccgaggcgtgggcgggccagccccgttgccagccgcacacgggaccccgcggccgc

SEQ ID NO: 350148 - DNA, 1497 bp, Homo sapiens
gcggcggcgggaaaccacggaatttactgccggaagttcggcggccttcgccaaagagtgtgggctcggctagcaagctagaggggctcgtttccgccccgctaccgggcgggggcggccatcttagatgcgtgcaattaagggctttggcgggattggctccgcgtttgggctggtccgctgctccccacctaccagggtcggatccggagcccttccccgcggggcggggacctccaaacaaccgactcctttccaggtgaagggtgacttggctgaagaaacacttaaattctggaaatagcgactcagtatcatggccagcagccttaatgaagatccagaaggaagcagaatcacttatgtgaaaggagacctttttgcatgcccgaaaacagactctttagcccactgtatcagtgaggattgtcgcatgggcgctgggatagctgtcctctttaagaagaaatttggaggggtgcaagaacttttaaatcaacaaaagaaatctggagaagtggctgttctgaagagagatgggcgatatatatattacttgattacaaagaaaagggcttcgcacaagccaacttatgaaaacttacagaagagtttagaggcaatgaagtctcattgtctgaagaatggagtcactgacctctccatgcccaggattggatgtggtcttgatcgtctgcaatgggaaaatgtatctgcgatgatcgaggaggtatttgaggcaacagacatcaaaattactgtgtacacactctgaaccagtgaacattttggatgtttccgtgttctcctgtgtcatctctactgggccataggaccgggcaaacctaccttaaaataggcagaggaaagtttcatgagaagtagtgtgtttaacaagacagactttggttgctgtattcaagtatttggattatgactgtggaggagggcttgcttaagatatgtggttgtgtttttttgtggaaaagtaaggagttaggtggcttgataataggcagggaaaccagattgtcgggactatgacctttttctccagtatgctacctgatttgtttggctggccactaggtggcagcattggttctacttctctgctttttaagagaaatttcaggaaggatgatcattccagttagtttggcattttttgtcgtttgtgcacataacttggtgttatccttatgtcatcagattcctcctaggggagagtttttgttttaattacaaaattaaattctacattgttaccaagaaatttgtggtgataaaaatggaaaaataaaaatttggggagttagtgaaaaaaaaaaacaaacgcagacgaccgcacacgagacgaaacccccccccgcgcgcagagcaggcacaccacaaccacaccacgacgccgatatcaacacacaacccgaccagccaaaacacacccgtggcgggcgcaccccgcgccgccgaacaaaagactgccgccaacaacga

SEQ ID NO: 350149 - DNA, 1909 bp, Homo sapiens
gctttcctgattgcagttttggttgagaaggttgttcttccctgctgagatggctggctgacttcaccagtcaagaggcctgcaggatgaactggtcttaagtgtgagaaagatttagctatgtgatgatgtggaggaaggtgaagtactacaaatcaagagagcataaaaacaagaacagaaatatttcagcatgtgaacagtggactaaacaggaaaaaaagcttggggccacactactttctctcaaaatgtcagacaaagaaattcttctgcagactggtggaagcttgtaaggtcaggacgcagtggctcatgcctgtaatcccaacgttttgggagaacaagaagggaggatggcttgagcccaggagttccagctgaagaaacacttaaattctggaaatagcgactcagtatcatggccagcagccttaatgaagatccagaaggaagcagaatcacttatgtgaaaggagacctttttgcatgcccgaaaacagactctttagcccactgtatcagtgaggattgtcgcatgggcgctgggatagctgtcctctttaagaagaaatttggaggggtgcaagaacttttaaatcaacaaaagaaatctggagaagtggctgttctgaagagagatgggcgatatatatattacttgattacaaagaaaagggcttcgcacaagccaacttatgaaaacttacagaagagtttagaggcaatgaagtctcattgtctgaagaatggagtcactgacctctccatgcccaggattggatgtggtcttgatcgtctgcaatgggaaaatgtatctgcgatgatcgaggaggtatttgaggcaacagacatcaaaattactgtgtacacactctgaaccagtgaacattttggatgtttccgtgttctcctgtgtcatctctactgggccataggaccgggcaaacctaccttaaaataggcagaggaaagtttcatgagaagtagtgtgtttaacaagacagactttggttgctgtattcaagtatttggattatgactgtggaggagggcttgcttaagatatgtggttgtgtttttttgtggaaaagtaaggagttaggtggcttgataataggcagggaaaccagattgtcgggactatgacctttttctccagtatgctacctgatttgtttggctggccactaggtggcagcattggttctacttctctgctttttaagagaaatttcaggaaggatgatcattccagttagtttggcattttttgtcgtttgtgcacataacttggtgttatccttatgtcatcagattcctcctaggggagagtttttgttttaattacaaaattaaattctacattgttaccaagaaatttgtggtgataaaaatggaaaaataaaaatttggggagttagtgaggttctgtgcttatgtctatttgttctggacatgggtaatggagggttcacctgcaacttaatttcaaacagtcagacaaagggtccaagcgggaggagaagcaaagtgagaaataagagataaaaatagacaagtcaaaaggcaggtttttagaatctcctcatggtgaactttttctctcttttgtccactgcatggtttctgtgattgaacctgcctgaatttaatcatgaaaacaagtgaaataatgtatgttaaatgcctggcagagtacttagcacagactagtgacccaataaatcagtgattgtcaaaaatccttatgagtcttctttaaaaaaataaaggccacttcctctcaaaaaattctcatacctgtcatctcagcactttgagaggctgagactggaggatgacttgagcccaggagtttgagacaaacctggttaacatagcgagaccctgtctctacaaaaaaaaa

SEQ ID NO: 350150 - DNA, 1578 bp, Homo sapiens
gattgcccattacggccggggactcctttccaggtgaagggtgacttggctgaagaaacacttaaattctggaaatagcgactcagtatcatggccagcagccttaatgaagatccagaaggaagcagaatcacttatgtgaaaggagacctttttgcatgcccgaaaacagactctttagcccactgtatcagtgaggattgtcgcatgggcgctgggatagctgtcctctttaagaagaaatttggaggggtgcaagaacttttaaatcaacaaaagaaatctggagaagtggctgttctgaagagagatgggcgatatatatattacttgattacaaagaaaagggcttcgcacaagccaacttatgaaaacttacagaagagtttagaggcaatgaagtctcattgtctgaagaatggagtcactgacctctccatgcccaggattggatgtggtcttgatcgtctgcaatgggaaaatgtatctgcgatgatcgaggaggtatttgaggcaacagacatcaaaattactgtgtacacactctgaaccagtgaacattttggatgtttccgtgttctcctgtgtcatctctactgggccataggaccgggcaaacctaccttaaaataggcagaggaaagtttcatgagaagtagtgtgtttaacaagacagactttggttgctgtattcaagtatttggattatgactgtggaggagggcttgcttaagatatgtggttgtgtttttttgtggaaaagtaaggagttaggtggcttgataataggcagggaaaccagattgtcgggactatgacctttttctccagtatgctacctgatttgtttggctggccactaggtggcagcattggttctacttctctgctttttaagagaaatttcaggaaggatgatcattccagttagtttggcattttttgtcgtttgtgcacataacttggtgttatccttatgtcatcagattcctcctaggggagagtttttgttttaattacaaaattaaattctacattgttaccaagaaatttgtggtgataaaaatggaaaaataaaaatttggggagttagtgaggttctgtgcttatgtctatttgttctggacatgggtaatggagggttcacctgcaacttaatttcaaacagtcagacaaagggtccaagcgggaggagaagcaaagtgagaaataagagataaaaatagacaagtcaaaaggcaggtttttagaatctcctcatggtgaactttttctctcttttgtccactgcatggtttctgtgattgaacctgcctgaatttaatcatgaaaacaagtgaaataatgtatgttaaatgcctggcagagtacttagcacagactagtgacccaataaatcagtgattgtcaaaaatccttatgagtcttctttaaaaaaataaaggccacttcctctcaaaaaattctcatacctgtcatctcagcactttgagaggctgagactggaggatgacttgagcccaggagtttgagacaaacctggttaacatagcgagaccctgtctctacaaaaaaaaa

SEQ ID NO: 350151 - DNA, 2777 bp, Homo sapiens
gcggcggcgggaaaccacggaatttactgccggaagttcggcggccttcgccaaagagtgtgggctcggctagcaagctagaggggctcgtttccgccccgctaccgggcgggggcggccatcttagatgcgtgcaattaagggctttggcgggattggctccgcgtttgggctggtccgctgctccccacctaccagggtcggatccggagcccttccccgcggggcggggacctccaaacaaccgactcctttccaggtgaagggtgacttggacttgggtacgttggggctttgagcgagcctccccgcaccctcccataggaccccaggacagactgcgtcctcgctgacccgccctaggctgaagaaacacttaaattctggaaatagcgactcagtatcatggccagcagccttaatgaagatccagaaggaagcagaatcacttatgtgaaaggagacctttttgcatgcccgaaaacagactctttagcccactgtatcagtgaggattgtcgcatgggcgctgggatagctgtcctctttaagaagaaatttggaggggtgcaagaacttttaaatcaacgtgagttttggaaaccacttacctggtttgccctggctagagcaccttttaatctgttacactttaataaaatatgcgtgtaaagaggggattcctaagaaccaaatgtttttaagattttcctccccaagaatggcctctagtttagacgtttaccatatcaaaacccaactcctgtgaaggtttttaatctcttcctcttgtatcatgaaactttcttgacgatattactgtacttctctgaaacttgaaataactctgagatgcttagtctataggttggcattcaagatcctttacttaccaatattctgctttctcttcaaagaggaatttagaaacctcttcttccttacagacccctcccatcactttctacgggccactttaaaccagaaatgtgcactagaatcctatgtaaagcttctgcaacagtttctccgaccacattccaggcttaacagcatcagtgtccacagtgattcttagccttagacaaaagcaattcttactgctttgtattatagttatttggaatgatgatatcttctctggattgaaaactctgtaataattaattccttttttatatatctgtattcctcataatgccttatacagctctttgtatgtaaaaagataattattgagtaaatacacatttggcaagtaaaaaactacacactataaaacaatttcaaggcaatagagaaagtttgtggacaaatgaggatatatttaaaagtagtagtggtacaaaagatgggttgtgaggaaacatgactgtaagaaagctgttaagttaaggaatatagtatttgggaatgctgataaaaagcaaagtgtttgtgggagacaataggtcttccctattcccttcttcagtgttgaaaattctagttctgaggtaaactcagatctgtaaacattttaaaatctttagagatcagtgtttggttttctttttcatttctactattaaataactttttcttagaaaagaaatctggagaagtggctgttctgaagagagatgggcgatatatatattacttggattggatgtggtcttgatcgtctgcaatgggaaaatgtatctgcgatgatcgaggaggtatttgaggcaacagacatcaaaattactgtgtacacactctgaaccagtgaacattttggatgtttccgtgttctcctgtgtcatctctactgggccataggaccgggcaaacctaccttaaaataggcagaggaaagtttcatgagaagtagtgtgtttaacaagacagactttggttgctgtattcaagtatttggattatgactgtggaggagggcttgcttaagatatgtggttgtgtttttttgtggaaaagtaaggagttaggtggcttgataataggcagggaaaccagattgtcgggactatgacctttttctccagtatgctacctgatttgtttggctggccactaggtggcagcattggttctacttctctgctttttaagagaaatttcaggaaggatgatcattccagttagtttggcattttttgtcgtttgtgcacataacttggtgttatccttatgtcatcagattcctcctaggggagagtttttgttttaattacaaaattaaattctacattgttaccaagaaatttgtggtgataaaaatggaaaaataaaaatttggggagttagtgaggttctgtgcttatgtctatttgttctggacatgggtaatggagggttcacctgcaacttaatttcaaacagtcagacaaagggtccaagcgggaggagaagcaaagtgagaaataagagataaaaatagacaagtcaaaaggcaggtttttagaatctcctcatggtgaactttttctctcttttgtccactgcatggtttctgtgattgaacctgcctgaatttaatcatgaaaacaagtgaaataatgtatgttaaatgcctggcagagtacttagcacagactagtgacccaataaatcagtgattgtcaaaaatccttatgagtcttctttaaaaaaataaaggccacttcctctcaaaaaattctcatacctgtcatctcagcactttgagaggctgagactggaggatgacttgagcccaggagtttgagacaaacctggttaacatagcgagaccctgtctctacaaaaaaaaa

SEQ ID NO: 350152 - DNA, 1780 bp, Homo sapiens
gcggcggcgggaaaccacggaatttactgccggaagttcggcggccttcgccaaagagtgtgggctcggctagcaagctagaggggctcgtttccgccccgctaccgggcgggggcggccatcttagatgcgtgcaattaagggctttggcgggattggctccgcgtttgggctggtccgctgctccccacctaccagggtcggatccggagcccttccccgcggggcggggacctccaaacaaccgactcctttccaggtgaagggtgacttggacttgggtacgttggggctttgagcgagcctccccgcaccctcccataggaccccaggacagactgcgtcctcgctgacccgccctaggctgaagaaacacttaaattctggaaatagcgactcagtatcatggccagcagccttaatgaagatccagaaggaagcagaatcacttatgtgaaaggagacctttttgcatgcccgaaaacagactctttagcccactgtatcagtgaggattgtcgcatgggcgctgggatagctgtcctctttaagaagaaatttggaggggtgcaagaacttttaaatcaacaaaagaaatctggagaagtggctgttctgaagagagatgggcgatatatatattacttggattggatgtggtcttgatcgtctgcaatgggaaaatgtatctgcgatgatcgaggaggtatttgaggcaacagacatcaaaattactgtgtacacactctgaaccagtgaacattttggatgtttccgtgttctcctgtgtcatctctactgggccataggaccgggcaaacctaccttaaaataggcagaggaaagtttcatgagaagtagtgtgtttaacaagacagactttggttgctgtattcaagtatttggattatgactgtggaggagggcttgcttaagatatgtggttgtgtttttttgtggaaaagtaaggagttaggtggcttgataataggcagggaaaccagattgtcgggactatgacctttttctccagtatgctacctgatttgtttggctggccactaggtggcagcattggttctacttctctgctttttaagagaaatttcaggaaggatgatcattccagttagtttggcattttttgtcgtttgtgcacataacttggtgttatccttatgtcatcagattcctcctaggggagagtttttgttttaattacaaaattaaattctacattgttaccaagaaatttgtggtgataaaaatggaaaaataaaaatttggggagttagtgaggttctgtgcttatgtctatttgttctggacatgggtaatggagggttcacctgcaacttaatttcaaacagtcagacaaagggtccaagcgggaggagaagcaaagtgagaaataagagataaaaatagacaagtcaaaaggcaggtttttagaatctcctcatggtgaactttttctctcttttgtccactgcatggtttctgtgattgaacctgcctgaatttaatcatgaaaacaagtgaaataatgtatgttaaatgcctggcagagtacttagcacagactagtgacccaataaatcagtgattgtcaaaaatccttatgagtcttctttaaaaaaataaaggccacttcctctcaaaaaattctcatacctgtcatctcagcactttgagaggctgagactggaggatgacttgagcccaggagtttgagacaaacctggttaacatagcgagaccctgtctctacaaaaaaaaa

SEQ ID NO: 350153 - DNA, 1347 bp, Homo sapiens
  misc_feature (1301)..(1301): n is a, c, g, or t
  misc_feature (1310)..(1310): n is a, c, g, or t
gcggcggcgggaaaccacggaatttactgccggaagttcggcggccttcgccaaagagtgtgggctcggctagcaagctagaggggctcgtttccgccccgctaccgggcgggggcggccatcttagatgcgtgcaattaagggctttggcgggattggctccgcgtttgggctggtccgctgctccccacctaccagggtcggatccggagcccttccccgcggggcggggacctccaaacaaccgactcctttccaggtgaagggtgacttggctgaagaaacacttaaattctggaaatagcgactcagtatcatggccagcagccttaatgaagatccagaaggaagcagaatcacttatgtgaaaggagacctttttgcatgcccgaaaacagactctttagcccactgtatcagtgaggattgtcgcatgggcgctgggatagctgtcctctttaagaagaaatttggaggggtgcaagaacttttaaatcaacaaaagaaatctggagaagtggctgttctgaagagagatgggcgatatatatattacttgattacaaagaaaagggcttcgcacaagccaacttatgaaaacttacagaagagtttagaggcaatgaagtctcattgtctgaagaatggagtcactgacctctccatgcccaggattggatgtggtcttgatcgtctgcaatgggaaaatgtatctgcgatgatcgaggaggtatttgaggcaacagacatcaaaattactgtgtacacactctgaaccagtgaacattttggatgtttccgtgttctcctgtgtcatctctactgggccataggaccgggcaaacctaccttaaaataggcagaggaaagtttcatgagaagtagtgtgtttaacaagacagactttggttgctgtattcaagtatttggattatgactgtggaggagggcttgcttaagatatgtggttgtgtttttttgtggaaaagtaaggagttaggtggcttgataataggcagggaaaccagattgtcgggactatgacctttttctccagtatgctacctgatttgtttggctggccactaggtggcagcattggttctacttctctgctttttaagagaaatttcaggaaggatgatcattccagttagtttggcattttttgtcgtttgtgcacataacttggtgttatccttatgtcatcagattcctcctaggggagagtttttgttttaattacaaaattaaattctacattgttaccaagaaatttgtggtgataaaaatggaaaatngggatgcgnccgtcactattacttaatttataattccgtttttcaa

SEQ ID NO: 350154 - DNA, 247 bp, Homo sapiens
agttggtgcctgactctgggctgctccagaaatcctatttccaaaatcttttcagctcttagctggcttcctacagtgagctaggatttcagtccaacatttaggaacttcgcttttggtggccagaatatacagaaccagatgctgcagaggaagaagccattagatggtggagaaaggttcatcgtgaagaataaatgagataagctacctcaagtgcctgtaccaaaatagactcacaatacat

SEQ ID NO: 350155 - DNA, 457 bp, Homo sapiens
ctggtcagaggcatctgacccagtgaagccagaggctcctaagtaactgttggaatgatgtgttaacagtccatagctgccaaataggagacccatataaaaggccaagcttgaggtttggggctccctaagccaaacatgtgacacgagtaatgaggtgtttagcatttgaaagggactggcagccctcttctgggtaagtggaaggagaggcactggatcccattctttaggagctgtgcttctgtaaaacagaagttggaatccaaagccagtgaaatatgaattaaagaagatgagagctgcagaaattttatggagaacaaagataatttaatatttgaagtgagtggtggcttttgggaaaatgatgaaaattcattaaattgatagttcattaaattaacagatttgaatgtgtactggtatttgcccttttatttatttatttttagag

SEQ ID NO: 350156 - DNA, 1327 bp, Homo sapiens
tttaaataaatttaaagaaacacaaatgtattattttcaaactgtaaattttataaccattatataaatgggcactgatatacaaaataatgtcagttgctaaaacaagacaattcacagctggcctacatcatataatggcagaaatctttaaacacaaaatctaatgattagaaccagaagttgaaggcccactgaaggagtccttaatattatgaggcctaggtttcaaaaagctaccaattctagaatggattttactctggaactgtttcttgactatttcttgttgcatctctttcagtgtgaagtggaatctctgaaactcaggtgtggcatcaacaaagtcaagaaggtagtccaaactctctcttacagcagataatttaaattcagcagtctgcttctcagcttctcctcctttttgaacaacttcctttgttattccacctttggtttttaggagacaacccttttcttcatctccatttaaccacaccctatcatcatccaacttagtttccaactccccacatttttcaagaatttctctataatccccatgttctaagccttgaaaatcatattcaggttcctttttgtaaagaagattttcccatgcatttgctatggttatttgttttacttcttcccaactttttgcccagttaaaaattgcactttttatattgtagattttaattttggaaactcctttatctcctttctcttgctcatcatcactttcttcaaatattacaagactctcttcaagttgcttccatctatacagccgtttgcagctcaagatcacaccttgattcattggttgaatcaaggttgaagtgttatgggggaagaacatacattttattcgaccatcctcactggttagggattcagaggaaggatgagccgggcaactgtccagaagtaacaatgccctgacgtcctcgtcatgaaatcttagaacattaagttgaaaatgtcggacctcaggaacaaagttttgaaaaaaccattctgaaaacaattctctggtgaaccaaacatctttactgggtttatatatcacaggcaatgtacttgtgtcctctttcacacttttgggcagttttgattttccaataatgattgactttaatttatgagttccgtctgcatttgcacataaaaaggcagacaacctttctttgtttattttcttccctggtaggcagatatctttcctacttgcctgagaattttctggcattgacttccaaaagaggtctgtttcatccccactgtatagctgagctagacacagtttctcctctttgattat

SEQ ID NO: 350157 - DNA, 349 bp, Homo sapiens
cttcgggacagctgcaactcacaaccagtcttttgttgaccttcagctgatttcccaggaaccagaggcccaagggcaataataaggtggaatttgcaggtcagcccaggaattggcagaggaagtaggtgtctgataaccctttgtggagaatgagattccccccacctgtgtgagaaaaataaacagctctggagtcttgttcctgactccagaggaacgagagcattccaggaaagagagattccctggaaaattgaaaatgtgaatcctagggggaaattggggattgtgtctttccctgttgaaaatgtttggatgggaataaatatcttcaggaaacataaaa

SEQ ID NO: 350158 - DNA, 799 bp, Homo sapiens
tttaaataaatttaaagaaacacaaatgtattattttcaaactgtaaattttataaccattatataaatgggcactgatatacaaaataatgtcagttgctaaaacaagacaattcacagctggcctacatcatataatggcagaaatctttaaacacaaaatctaatgattagaaccagaagttgaaggcccactgaaggagtccttaatattatgaggcctaggtttcaaaaagctaccaattctagaatggattttactctggaactgtttcttgactatttcttgttgcatctctttcagtgtgaagtggaatctctgaaactcaggtgtggcatcaacaaagtcaagaaggtagtccaaactctctcttacagcagataatttaaattcagcagtctgcttctcagcttctcctcctttttgaacaacttcctttgttattccacctttggtttttaggagacaacccttttcttcatctccatttaaccacaccctatcatcatccaacttagtttccaactccccttccaaaaagacctgattttacctcactgccagaaaagagaatggtgctcaaattgctttgtacatagtgttcactgggcagcagttcatctacctggataagggctccgagctacagggaccctgacattgggatgtatggagagttggaattcaggaacagttgtaccgaatcttgaagtgaagaagaaagtagtttgttgtacatatgaatgaaatccaacttttattgcattcaatatagtattgtcaagcaccgtgatttaa

SEQ ID NO: 350159 - DNA, 2862 bp, Homo sapiens
gacctaatgggcgctggagttcgcaaaacgtgacccggaaattggtcacgagcaggcgccgtgggcttgtggacgcctaacttgcgcgctgagatttccggcgtgggagcagaggtctgagtcttgcgtgggtcctctatatagggtgagaagcgtggcgctcggttcctgcctcggggaagtcctggcgcagatgggccacggggccggcgtggcggcgcctgggaccgactgaggcctaggcgccggagccggccgcgcctgggctggagcggggctcctcggcctggactgggagcccccggccccgggctcctgctggcgccgtccaaccttacatgggttcagggcgccttcgtaggcgggcacggctggtttcgggctaaggcgctctggagacctgacgatggcgtcgggcccgggctcccaggaacgggaagggctcctgatagtgaagctggaggaggactgcgcctggagccaggagctgcccccacctgacccaggaccgagccccgaggcctcccacttgcgcttcagacggttccgcttccaagaggcagctggtccccgggaagccctcagccggctccaagagctttgccatgggtggcttcggcctgagatgcgcacgaaggagcagatcttggagctgctggtgttagagcagttcctgaccatcctgccccaggagatccagagcagggtgcaggagctgcatccggagagcggcgaagaagcggtgacccttgtggaggatatgcagagagagcttgggagactgagacaacaggagaagagaaatttgagaacctggaaggtgttccgtctgtatgctctgagaacatccaccctcaggtgctgcttcctgaccaggcccgaggggaggtgccctggagtcctgagctgggaagacctcatgaccggtcgcaaggggattgggcgcctcccccagagggtggaatggagcaggccttggcaggagcctcaagtggcagagaactggggcgaccgaaggaactgcagccaaagaaactccatttatgtcccttgtgtggcaaaaatttctctaacaactcaaacctaattaggcaccagagaatacatgcagctgaaagactgtgtatgggtgtggactgcactgaaatctttggtgggaacccacgtttcctgtcactacacagagcacacctgggagaggaggcccacaagtgccttgaatgtgggaaatgcttcagtcagaacacccatctgactcgccaccaacgcacccacacgggtgagaagccctatcagtgcaacatttgcggaaaatgtttctcctgcaactccaacctccacaggcaccagagaacgcacactggggagaagccctacaagtgccctgagtgtggggagatctttgctcacagttccaacctccttcggcaccagagaattcacactggagagcgaccttataagtgtcccgagtgtgggaaaagtttctctcggagttcacacctcgtcattcacgaaagaactcatgagagagagagactttaccccttctctgagtgtggggaagctgtgagtgacagcaccccctttcttacaaaccatggagcccataaggcagagaagaagctctttgaatgtttgacttgtgggaaaagcttccggcagggcatgcacctcaccagacatcagagaacacacacaggagagaaaccgtataaatgtaccctttgtggggaaaacttctctcatagatccaatttaatcaggcaccagagaatccacacaggagaaaaaccctatacctgtcatgagtgcggagacagcttctctcacagctccaatcggattcgccacctgagaacgcatacgggagagagaccctataaatgttctgaatgtggagaaagcttctctcggagttcccgtcttatgagtcatcagagaactcacacaggttagtaacagtggggtttctctttgccccaggtgaggtggcatattcagaggagcctgttggcaagagctggtattccctgcccagccgaccaaatgacctctgcattcttcaggtaatgggggctcattgtgagggaggtgcagaggcagcagaggattggcataaaactgaaaaggagttctgtctgcatgagaaaggatggcaagtctctgaggtgacctcagggtggaattctctgttaagtccaccctgccccagggtgctcctaccctcttggtctttttaaagccaaggtgcgatttgggcacctgactgtccagtttaccttaacaagtttgggaatccatgtgatgtttttgatacttcttcctcatttgggacattcagtaggagcatttgggcttccggggcccctgagaccaaagaagaggggccaagtaccctgggaaatcagctgaaggtcaacaaaagactggttgtgagttgcagctgtcccgaaggccccagttgggaagccatgggcagtccagatcaagccaccacgtgccctacgatggcctaacaggagtgcccattggcagattacacatgtaaatatgacctcagacaaaaaggaaccagaggcccaagggcaataataaggtggaatttgcaggtcagcccaggaattggcagaggaagtaggtgtctgataaccctttgtggagaatgagattccccccacctgtgtgagaaaaataaacagctctggagtcttgttcctgactccagaggaacgagagcattccaggaaagagagattccctggaaaattgaaaatgtgaatcctagggggaaattggggattgtgtctttccctgttgaaaatgtttggatgggaataaatatcttcaggaaacataaaa

SEQ ID NO: 350160 - DNA, 2979 bp, Homo sapiens
gacctaatgggcgctggagttcgcaaaacgtgacccggaaattggtcacgagcaggcgccgtgggcttgtggacgcctaacttgcgcgctgagatttccggcgtgggagcagaggtctgagtcttgcgtgggtcctctatatagggtgagaagcgtggcgctcggttcctgcctcggggaagtcctggcgcagatgggccacggggccggcgtggcggcgcctgggaccgactgaggcctaggcgccggagccggccgcgcctgggctggagcggggctcctcggcctggactgggagcccccggccccgggctcctgctggcgccgtccaaccttacatgggttcagggcgccttcgtaggcgggcacggctggtttcgggctaaggcgctctggagacctgacgatggcgtcgggcccgggctcccaggaacgggaagggctcctgatagtgaagctggaggaggactgcgcctggagccaggagctgcccccacctgacccaggaccgagccccgaggcctcccacttgcgcttcagacggttccgcttccaagaggcagctggtccccgggaagccctcagccggctccaagagctttgccatgggtggcttcggcctgagatgcgcacgaaggagcagatcttggagctgctggtgttagagcagttcctgaccatcctgccccaggagatccagagcagggtgcaggagctgcatccggagagcggcgaagaagcggtgacccttgtggaggatatgcagagagagcttgggagactgagacaacagagtctcacattcccagtcaggaggtcccaggcacccaggtgggacaaggaggaaagctatgggatcccagtgtccagagctgcaaggagggcctgagccccagaggcccagctccaggagaagagaaatttgagaacctggaaggtgttccgtctgtatgctctgagaacatccaccctcaggtgctgcttcctgaccaggcccgaggggaggtgccctggagtcctgagctgggaagacctcatgaccggtcgcaaggggattgggcgcctcccccagagggtggaatggagcaggccttggcaggagcctcaagtggcagagaactggggcgaccgaaggaactgcagccaaagaaactccatttatgtcccttgtgtggcaaaaatttctctaacaactcaaacctaattaggcaccagagaatacatgcagctgaaagactgtgtatgggtgtggactgcactgaaatctttggtgggaacccacgtttcctgtcactacacagagcacacctgggagaggaggcccacaagtgccttgaatgtgggaaatgcttcagtcagaacacccatctgactcgccaccaacgcacccacacgggtgagaagccctatcagtgcaacatttgcggaaaatgtttctcctgcaactccaacctccacaggcaccagagaacgcacactggggagaagccctacaagtgccctgagtgtggggagatctttgctcacagttccaacctccttcggcaccagagaattcacactggagagcgaccttataagtgtcccgagtgtgggaaaagtttctctcggagttcacacctcgtcattcacgaaagaactcatgagagagagagactttaccccttctctgagtgtggggaagctgtgagtgacagcaccccctttcttacaaaccatggagcccataaggcagagaagaagctctttgaatgtttgacttgtgggaaaagcttccggcagggcatgcacctcaccagacatcagagaacacacacaggagagaaaccgtataaatgtaccctttgtggggaaaacttctctcatagatccaatttaatcaggcaccagagaatccacacaggagaaaaaccctatacctgtcatgagtgcggagacagcttctctcacagctccaatcggattcgccacctgagaacgcatacgggagagagaccctataaatgttctgaatgtggagaaagcttctctcggagttcccgtcttatgagtcatcagagaactcacacaggttagtaacagtggggtttctctttgccccaggtgaggtggcatattcagaggagcctgttggcaagagctggtattccctgcccagccgaccaaatgacctctgcattcttcaggtaatgggggctcattgtgagggaggtgcagaggcagcagaggattggcataaaactgaaaaggagttctgtctgcatgagaaaggatggcaagtctctgaggtgacctcagggtggaattctctgttaagtccaccctgccccagggtgctcctaccctcttggtctttttaaagccaaggtgcgatttgggcacctgactgtccagtttaccttaacaagtttgggaatccatgtgatgtttttgatacttcttcctcatttgggacattcagtaggagcatttgggcttccggggcccctgagaccaaagaagaggggccaagtaccctgggaaatcagctgaaggtcaacaaaagactggttgtgagttgcagctgtcccgaaggccccagttgggaagccatgggcagtccagatcaagccaccacgtgccctacgatggcctaacaggagtgcccattggcagattacacatgtaaatatgacctcagacaaaaaggaaccagaggcccaagggcaataataaggtggaatttgcaggtcagcccaggaattggcagaggaagtaggtgtctgataaccctttgtggagaatgagattccccccacctgtgtgagaaaaataaacagctctggagtcttgttcctgactccagaggaacgagagcattccaggaaagagagattccctggaaaattgaaaatgtgaatcctagggggaaattggggattgtgtctttccctgttgaaaatgtttggatgggaataaatatcttcaggaaacataaaa

SEQ ID NO: 350161 - DNA, 3452 bp, Homo sapiens
gacctaatgggcgctggagttcgcaaaacgtgacccggaaattggtcacgagcaggcgccgtgggcttgtggacgcctaacttgcgcgctgagatttccggcgtgggagcagaggtctgagtcttgcgtgggtcctctatatagggtgagaagcgtggcgctcggttcctgcctcggggaagtcctggcgcagatgggccacggggccggcgtggcggcgcctgggaccgactgaggcctaggcgccggagccggccgcgcctgggctggagcggggctcctcggcctggactgggagcccccggccccgggctcctgctggcgccgtccaaccttacatgggttcagggcgccttcgtaggcgggcacggctggtttcgggctaaggcgctctggagacctgacgatggcgtcgggcccgggctcccaggaacgggaagggctcctgatagtgaagctggaggaggactgcgcctggagccaggagctgcccccacctgacccaggaccgagccccgaggcctcccacttgcgcttcagacggttccgcttccaagaggcagctggtccccgggaagccctcagccggctccaagagctttgccatgggtggcttcggcctgagatgcgcacgaaggagcagatcttggagctgctggtgttagagcagttcctgaccatcctgccccaggagatccagagcagggtgcaggagctgcatccggagagcggcgaagaagcggtgacccttgtggaggatatgcagagagagcttgggagactgagacaacaggtcacaaaccatgggcggggaacagaagtgcttttggaggagcctttgcctctggaaacagcacgagagtcaccgagcttcaagctggagccaatggagactgagcgaagccctggccccaggctgcaggagctgctaggccccagcccccaaagggacccccaggctgtaaaggagagggcattatctgctccctggctttctctttttcctcctgaagggaacatggaagacaaggagatgactgggccccagttgcctgagagcttagaggacgtggcaatgtacatctcccaggaggagtgggggcatcaggatcctagtaagagggccctctccagggacacggtgcaggagagttatgagaatgtggactcactggagtctcacattcccagtcaggaggtcccaggcacccaggtgggacaaggaggaaagctatgggatcccagtgtccagagctgcaaggagggcctgagccccagaggcccagctccaggagaagagaaatttgagaacctggaaggtgttccgtctgtatgctctgagaacatccaccctcaggtgctgcttcctgaccaggcccgaggggaggtgccctggagtcctgagctgggaagacctcatgaccggtcgcaaggggattgggcgcctcccccagagggtggaatggagcaggccttggcaggagcctcaagtggcagagaactggggcgaccgaaggaactgcagccaaagaaactccatttatgtcccttgtgtggcaaaaatttctctaacaactcaaacctaattaggcaccagagaatacatgcagctgaaagactgtgtatgggtgtggactgcactgaaatctttggtgggaacccacgtttcctgtcactacacagagcacacctgggagaggaggcccacaagtgccttgaatgtgggaaatgcttcagtcagaacacccatctgactcgccaccaacgcacccacacgggtgagaagccctatcagtgcaacatttgcggaaaatgtttctcctgcaactccaacctccacaggcaccagagaacgcacactggggagaagccctacaagtgccctgagtgtggggagatctttgctcacagttccaacctccttcggcaccagagaattcacactggagagcgaccttataagtgtcccgagtgtgggaaaagtttctctcggagttcacacctcgtcattcacgaaagaactcatgagagagagagactttaccccttctctgagtgtggggaagctgtgagtgacagcaccccctttcttacaaaccatggagcccataaggcagagaagaagctctttgaatgtttgacttgtgggaaaagcttccggcagggcatgcacctcaccagacatcagagaacacacacaggagagaaaccgtataaatgtaccctttgtggggaaaacttctctcatagatccaatttaatcaggcaccagagaatccacacaggagaaaaaccctatacctgtcatgagtgcggagacagcttctctcacagctccaatcggattcgccacctgagaacgcatacgggagagagaccctataaatgttctgaatgtggagaaagcttctctcggagttcccgtcttatgagtcatcagagaactcacacaggttagtaacagtggggtttctctttgccccaggtgaggtggcatattcagaggagcctgttggcaagagctggtattccctgcccagccgaccaaatgacctctgcattcttcaggtaatgggggctcattgtgagggaggtgcagaggcagcagaggattggcataaaactgaaaaggagttctgtctgcatgagaaaggatggcaagtctctgaggtgacctcagggtggaattctctgttaagtccaccctgccccagggtgctcctaccctcttggtctttttaaagccaaggtgcgatttgggcacctgactgtccagtttaccttaacaagtttgggaatccatgtgatgtttttgatacttcttcctcatttgggacattcagtaggagcatttgggcttccggggcccctgagaccaaagaagaggggccaagtaccctgggaaatcagctgaaggtcaacaaaagactggttgtgagttgcagctgtcccgaaggccccagttgggaagccatgggcagtccagatcaagccaccacgtgccctacgatggcctaacaggagtgcccattggcagattacacatgtaaatatgacctcagacaaaaaggaaccagaggcccaagggcaataataaggtggaatttgcaggtcagcccaggaattggcagaggaagtaggtgtctgataaccctttgtggagaatgagattccccccacctgtgtgagaaaaataaacagctctggagtcttgttcctgactccagaggaacgagagcattccaggaaagagagattccctggaaaattgaaaatgtgaatcctagggggaaattggggattgtgtctttccctgttgaaaatgtttggatgggaataaatatcttcaggaaacataaaatgtctgtgagtcttcaatgaaagcctctgtctagaaccccgagtgttgatctgtctcccctctgccttggtcagaggccctgctttctcat

SEQ ID NO: 350162 - DNA, 3488 bp, Homo sapiens
gacctaatgggcgctggagttcgcaaaacgtgacccggaaattggtcacgagcaggcgccgtgggcttgtggacgcctaacttgcgcgctgagatttccggcgtgggagcagaggtctgagtcttgcgtgggtcctctatatagggtgagaagcgtggcgctcggttcctgcctcggggaagtcctggcgcagatgggccacggggccggcgtggcggcgcctgggaccgactgaggcctaggcgccggagccggccgcgcctgggctggagcggggctcctcggcctggactgggagcccccggccccgggctcctgctggcgccgtccaaccttacatgggttcagggcgccttcgtaggcgggcacggctggtttcgggctaaggcgctctggagacctgacgatggcgtcgggcccgggctcccaggaacgggaagggctcctgatagtgaagctggaggaggactgcgcctggagccaggagctgcccccacctgacccaggaccgagccccgaggcctcccacttgcgcttcagacggttccgcttccaagaggcagctggtccccgggaagccctcagccggctccaagagctttgccatgggtggcttcggcctgagatgcgcacgaaggagcagatcttggagctgctggtgttagagcagttcctgaccatcctgccccaggagatccagagcagggtgcaggagctgcatccggagagcggcgaagaagcggtgacccttgtggaggatatgcagagagagcttgggagactgagacaacaggtcacaaaccatgggcggggaacagaagtgcttttggaggagcctttgcctctggaaacagcacgagagtcaccgagcttcaagctggagccaatggagactgagcgaagccctggccccaggctgcaggagctgctaggccccagcccccaaagggacccccaggctgtaaaggagagggcattatctgctccctggctttctctttttcctcctgaagggaacatggaagacaaggagatgactgggccccagttgcctgagagcttagaggacgtggcaatgtacatctcccaggaggagtgggggcatcaggatcctagtaagagggccctctccagggacacggtgcaggagagttatgagaatgtggactcactggagtctcacattcccagtcaggaggtcccaggcacccaggtgggacaaggaggaaagctatgggatcccagtgtccagagctgcaaggagggcctgagccccagaggcccagctccaggagaagagaaatttgagaacctggaaggtgttccgtctgtatgctctgagaacatccaccctcaggtgctgcttcctgaccaggcccgaggggaggtgccctggagtcctgagctgggaagacctcatgaccggtcgcaaggggattgggcgcctcccccagagggtggaatggagcaggccttggcaggagcctcaagtggcagagaactggggcgaccgaaggaactgcagccaaagaaactccatttatgtcccttgtgtggcaaaaatttctctaacaactcaaacctaattaggcaccagagaatacatgcagctgaaagactgtgtatgggtgtggactgcactgaaatctttggtgggaacccacgtttcctgtcactacacagagcacacctgggagaggaggcccacaagtgccttgaatgtgggaaatgcttcagtcagaacacccatctgactcgccaccaacgcacccacacgggtgagaagccctatcagtgcaacatttgcggaaaatgtttctcctgcaactccaacctccacaggcaccagagaacgcacactggggagaagccctacaagtgccctgagtgtggggagatctttgctcacagttccaacctccttcggcaccagagaattcacactggagagcgaccttataagtgtcccgagtgtgggaaaagtttctctcggagttcacacctcgtcattcacgaaagaactcatgagagagagagactttaccccttctctgagtgtggggaagctgtgagtgacagcaccccctttcttacaaaccatggagcccataaggcagagaagaagctctttgaatgtttgacttgtgggaaaagcttccggcagggcatgcacctcaccagacatcagagaacacacacaggagagaaaccgtataaatgtaccctttgtggggaaaacttctctcatagatccaatttaatcaggcaccagagaatccacacaggagaaaaaccctatacctgtcatgagtgcggagacagcttctctcacagctccaatcggattcgccacctgagaacgcatacgggagagagaccctataaatgttctgaatgtggagaaagcttctctcggagttcccgtcttatgagtcatcagagaactcacacaggttagtaacagtggggtttctctttgccccaggtgaggtggcatattcagaggagcctgttggcaagagctggtattccctgcccagccgaccaaatgacctctgcattcttcaggtaatgggggctcattgtgagggaggtgcagaggcagcagaggattggcataaaactgaaaaggagttctgtctgcatgagaaaggatggcaagtctctgaggtgacctcagggtggaattctctgttaagtccaccctgccccagggtgctcctaccctcttggtctttttaaagccaaggtgcgatttgggcacctgactgtccagtttaccttaacaagtttgggaatccatgtgatgtttttgatacttcttcctcatttgggacattcagtaggagcatttgggcttccggggcccctgagaccaaagaagaggggccaagtaccctgggaaatcagctgaaggtcaacaaaagactggttgtgagttgcagctgtcccgaaggccccagttgggaagccatgggcagtccagatcaagccaccacgtgccctacgatggcctaacaggagtgcccattggcagattacacatgtaaatatgacctcagacaaaaaggaaccagaggcccaagggcaataataaggtggaatttgcaggtcagcccaggaattggcagaggaagtaggtgtaatccacacaggagaaaaaccctatacctgtcatgagtgcggagacaatttctctcacagctccaatcggattcgccacctgagaacgcatacgggagagagaccctaataatgttctgaatgtggactgataaccctttgtggagaatgagattccccccacctgtgtgagaaaaataaacagctctggagtcttgttcctgactccagaggaacgagagcattccaggaaagagagattccctggaaaattgaaaatgtgaatcctagggggaaattggggattgtgtctttccctgttgaaaatgtttggatgggaataaatatcttcaggaaacataaaa

SEQ ID NO: 350163 - DNA, 3470 bp, Homo sapiens
gacctaatgggcgctggagttcgcaaaacgtgacccggaaattggtcacgagcaggcgccgtgggcttgtggacgcctaacttgcgcgctgagatttccggcgtgggagcagaggtctgagtcttgcgtgggtcctctatatagggtgagaagcgtggcgctcggttcctgcctcggggaagtcctggcgcagatgggccacggggccggcgtggcggcgcctgggaccgactgaggcctaggcgccggagccggccgcgcctgggctggagcggggctcctcggcctggactgggagcccccggccccgggctcctgctggcgccgtccaaccttacatgggttcagggcgccttcgtaggcgggcacggctggtttcgggctaaggcgctctggagacctgacgatggcgtcgggcccgggctcccaggaacgggaagggctcctgatagtgaagctggaggaggactgcgcctggagccaggagctgcccccacctgacccaggaccgagccccgaggcctcccacttgcgcttcagacggttccgcttccaagaggcagctggtccccgggaagccctcagccggctccaagagctttgccatgggtggcttcggcctgagatgcgcacgaaggagcagatcttggagctgctggtgttagagcagttcctgaccatcctgccccaggagatccagagcagggtgcaggagctgcatccggagagcggcgaagaagcggtgacccttgtggaggatatgcagagagagcttgggagactgagacaacaggtcacaaaccatgggcggggaacagaagtgcttttggaggagcctttgcctctggaaacagcacgagagtcaccgagcttcaagctggagccaatggagactgagcgaagccctggccccaggctgcaggagctgctaggccccagcccccaaagggacccccaggctgtaaaggagagggcattatctgctccctggctttctctttttcctcctgaagggaacatggaagacaaggagatgactgggccccagttgcctgagagcttagaggacgtggcaatgtacatctcccaggaggagtgggggcatcaggatcctagtaagagggccctctccagggacacggtgcaggagagttatgagaatgtggactcactggagtctcacattcccagtcaggaggtcccaggcacccaggtgggacaaggaggaaagctatgggatcccagtgtccagagctgcaaggagggcctgagccccagaggcccagctccaggagaagagaaatttgagaacctggaaggtgttccgtctgtatgctctgagaacatccaccctcaggtgctgcttcctgaccaggcccgaggggaggtgccctggagtcctgagctgggaagacctcatgaccggtcgcaaggggattgggcgcctcccccagagggtggaatggagcaggccttggcaggagcctcaagtggcagagaactggggcgaccgaaggaactgcagccaaagaaactccatttatgtcccttgtgtggcaaaaatttctctaacaactcaaacctaattaggcaccagagaatacatgcagctgaaagactgtgtatgggtgtggactgcactgaaatctttggtgggaacccacgtttcctgtcactacacagagcacacctgggagaggaggcccacaagtgccttgaatgtgggaaatgcttcagtcagaacacccatctgactcgccaccaacgcacccacacgggtgagaagccctatcagtgcaacatttgcggaaaatgtttctcctgcaactccaacctccacaggcaccagagaacgcacactggggagaagccctacaagtgccctgagtgtggggagatctttgctcacagttccaacctccttcggcaccagagaattcacactggagagcgaccttataagtgtcccgagtgtgggaaaagtttctctcggagttcacacctcgtcattcacgaaagaactcatgagagagagagactttaccccttctctgagtgtggggaagctgtgagtgacagcaccccctttcttacaaaccatggagcccataaggcagagaagaagctctttgaatgtttgacttgtgggaaaagcttccggcagggcatgcacctcaccagacatcagagaacacacacaggagagaaaccgtataaatgtaccctttgtggggaaaacttctctcatagatccaatttaatcaggcaccagagaatccacacaggagaaaaaccctatacctgtcatgagtgcggagacagcttctctcacagctccaatcggattcgccacctgagaacgcatacgggagagagaccctataaatgttctgaatgtggagaaagcttctctcggagttcccgtcttatgagtcatcagagaactctgtgaagtggaatctctgaaactcaggtgtggcatcaacaaagtcaagaaggtagtccaaactctctcttacagcagataatttaaattcagcagtctgcttctcagcttctcctcctttttgaacaacttcctttgttattccacctttggtttttaggagacaacccttttcttcatctccatttaaccacaccctatcatcatccaacttagtttccaactccccacatttttcaagaatttctctataatccccatgttctaagccttgaaaatcatattcaggttcctttttgtaaagaagattttcccatgcatttgctatggttatttgttttacttcttcccaactttttgcccagttaaaaattgcactttttatattgtagattttaattttggaaactcctttatctcctttctcttgctcatcatcactttcttcaaatattacaagactctcttcaagttgcttccatctatacagccgtttgcagctcaagatcacaccttgattcattggttgaatcaaggttgaagtgttatgggggaagaacatacattttattcgaccatcctcactggttagggattcagaggaaggatgagccgggcaactgtccagaagtaacaatgccctgacgtcctcgtcatgaaatcttagaacattaagttgaaaatgtcggacctcaggaacaaagttttgaaaaaaccattctgaaaacaattctctggtgaaccaaacatctttactgggtttatatatcacaggcaatgtacttgtgtcctctttcacacttttgggcagttttgattttccaataatgattgactttaatttatgagttccgtctgcatttgcacataaaaaggcagacaacctttctttgtttattttcttccctggtaggcagatatctttcctacttgcctgagaattttctggcattgacttccaaaagaggtctgtttcatccccactgtatagctgagctagacacagtttctcctctttgattat

SEQ ID NO: 350164 - DNA, 2436 bp, Homo sapiens
gacctaatgggcgctggagttcgcaaaacgtgacccggaaattggtcacgagcaggcgccgtgggcttgtggacgcctaacttgcgcgctgagatttccggcgtgggagcagaggtctgagtcttgcgtgggtcctctatatagggtgagaagcgtggcgctcggttcctgcctcggggaagtcctggcgcagatgggccacggggccggcgtggcggcgcctgggaccgactgaggcctaggcgccggagccggccgcgcctgggctggagcggggctcctcggcctggactgggagcccccggccccgggctcctgctggcgccgtccaaccttacatgggttcagggcgccttcgtaggcgggcacggctggtttcgggctaaggcgctctggagacctgacgatggcgtcgggcccgggctcccaggaacgggaagggctcctgatagtgaagctggaggaggactgcgcctggagccaggagctgcccccacctgacccaggaccgagccccgaggcctcccacttgcgcttcagacggttccgcttccaagaggcagctggtccccgggaagccctcagccggctccaagagctttgccatgggtggcttcggcctgagatgcgcacgaaggagcagatcttggagctgctggtgttagagcagttcctgaccatcctgccccaggagatccagagcagggtgcaggagctgcatccggagagcggcgaagaagcggtgacccttgtggaggatatgcagagagagcttgggagactgagacaacaggtcacaaaccatgggcggggaacagaagtgcttttggaggagcctttgcctctggaaacagcacgagagtcaccgagcttcaagctggagccaatggagactgagcgaagccctggccccaggctgcaggagctgctaggccccagcccccaaagggacccccaggctgtaaaggagagggcattatctgctccctggctttctctttttcctcctgaagggaacatggaagacaaggagatgactgggccccagttgcctgagagcttagaggacgtggcaatgtacatctcccaggaggagtgggggcatcaggatcctagtaagagggccctctccagggacacggtgcaggagagttatgagaatgtggactcactggagtctcacattcccagtcaggaggtcccaggcacccaggtgggacaaggaggaaagctatgggatcccagtgtccagagctgcaaggagggcctgagccccagaggcccagctccaggagaagagaaatttgagaacctggaaggtgttccgtctgtatgctctgagaacatccaccctcaggtgctgcttcctgaccaggcccgaggggaggtgccctggagtcctgagctgggaagacctcatgaccggtcgcaaggggattgggcgcctcccccagagggtggaatggagcaggccttggcaggagcctcaagtggcagagaactggggcgaccgaaggaactgcagccaaagaaactccatttatgtcccttgtgtggcaaaaatttctctaacaactcaaacctaattaggcaccagagaatacatgcagctgaaagactgtgtatgggtgtggactgcactgaaatctttggtgggaacccacgtttcctgtcactacacagagcacacctgggagaggaggcccacaagtgccttgaatgtgggaaatgcttcagtcagaacacccatctgactcgccaccaacgcacccacacgggtgagaagccctatcagtgcaacatttgcggaaaatgtttctcctgcaactccaacctccacaggcaccagagaacgcacactggggagaagccctacaagtgccctgagtgtggggagatctttgctcacagttccaacctccttcggcaccagagaattcacactggagagcgaccttataagtgtcccgagtgtgggaaaagtttctctcggagttcacacctcgtcattcacgaaagaactcatgagagagagagactttaccccttctctgagtgtggggaagctgtgagtgacagcaccccctttcttacaaaccatggagcccataaggcagagaagaagctctttgaatgtttgacttgtgggaaaagcttccggcagggcatgcacctcaccagacatcagagaacacacacaggagagaaaccgtataaatctgataaccctttgtggagaatgagattccccccacctgtgtgagaaaaataaacagctctggagtcttgttcctgactccagaggaacgagagcattccaggaaagagagattccctggaaaattgaaaatgtgaatcctagggggaaattggggattgtgtctttccctgttgaaaatgtttggatgggaataaatatcttcaggaaacataaaa

SEQ ID NO: 350165 - DNA, 2942 bp, Homo sapiens
gacctaatgggcgctggagttcgcaaaacgtgacccggaaattggtcacgagcaggcgccgtgggcttgtggacgcctaacttgcgcgctgagatttccggcgtgggagcagaggtctgagtcttgcgtgggtcctctatatagggtgagaagcgtggcgctcggttcctgcctcggggaagtcctggcgcagatgggccacggggccggcgtggcggcgcctgggaccgactgaggcctaggcgccggagccggccgcgcctgggctggagcggggctcctcggcctggactgggagcccccggccccgggctcctgctggcgccgtccaaccttacatgggttcagggcgccttcgtaggcgggcacggctggtttcgggctaaggcgctctggagacctgacgatggcgtcgggcccgggctcccaggaacgggaagggctcctgatagtgaagctggaggaggactgcgcctggagccaggagctgcccccacctgacccaggaccgagccccgaggcctcccacttgcgcttcagacggttccgcttccaagaggcagctggtccccgggaagccctcagccggctccaagagctttgccatgggtggcttcggcctgagatgcgcacgaaggagcagatcttggagctgctggtgttagagcagttcctgaccatcctgccccaggagatccagagcagggtgcaggagctgcatccggagagcggcgaagaagcggtgacccttgtggaggatatgcagagagagcttgggagactgagacaacaggtcacaaaccatgggcggggaacagaagtgcttttggaggagcctttgcctctggaaacagcacgagagtcaccgagcttcaagctggagccaatggagactgagcgaagccctggccccaggctgcaggagctgctaggccccagcccccaaagggacccccaggctgtaaaggagagggcattatctgctccctggctttctctttttcctcctgaagggaacatggaagacaaggagatgactgggccccagttgcctgagagcttagaggacgtggcaatgtacatctcccaggaggagtgggggcatcaggatcctagtaagagggccctctccagggacacggtgcaggagagttatgagaatgtggactcactggagtctcacattcccagtcaggaggtcccaggcacccaggtgggacaaggaggaaagctatgggatcccagtgtccagagctgcaaggagggcctgagccccagaggcccagctccaggagaagagaaatttgagaacctggaaggtgttccgtctgtatgctctgagaacatccaccctcaggtgctgcttcctgaccaggcccgaggggaggtgccctggagtcctgagctgggaagacctcatgaccggtcgcaaggggattgggcgcctcccccagagggtggaatggagcaggccttggcaggagcctcaagtggcagagaactggggcgaccgaaggaactgcagccaaagaaactccatttatgtcccttgtgtggcaaaaatttctctaacaactcaaacctaattaggcaccagagaatacatgcagctgaaagactgtgtatgggtgtggactgcactgaaatctttggtgggaacccacgtttcctgtcactacacagagcacacctgggagaggaggcccacaagtgccttgaatgtgggaaatgcttcagtcagaacacccatctgactcgccaccaacgcacccacacgggtgagaagccctatcagtgcaacatttgcggaaaatgtttctcctgcaactccaacctccacaggcaccagagaacgcacactggggagaagccctacaagtgccctgagtgtggggagatctttgctcacagttccaacctccttcggcaccagagaattcacactggagagcgaccttataagtgtcccgagtgtgggaaaagtttctctcggagttcacacctcgtcattcacgaaagaactcatgagagagagagactttaccccttctctgagtgtggggaagctgtgagtgacagcaccccctttcttacaaaccatggagcccataaggcagagaagaagctctttgaatgtttgacttgtgggaaaagcttccggcagggcatgcacctcaccagacatcagagaacacacacaggagagaaaccgtataaatgtaccctttgtggggaaaacttctctcatagatccaatttaatcaggcaccagagaatccacacaggagaaaaaccctatacctgtcatgagtgcggagacagcttctctcacagctccaatcggattcgccacctgagaacgcatacgggagagagaccctataaatgttctgaatgtggagaaagcttctctcggagttcccgtcttatgagtcatcagagaactctgtgaagtggaatctctgaaactcaggtgtggcatcaacaaagtcaagaaggtagtccaaactctctcttacagcagataatttaaattcagcagtctgcttctcagcttctcctcctttttgaacaacttcctttgttattccacctttggtttttaggagacaacccttttcttcatctccatttaaccacaccctatcatcatccaacttagtttccaactccccttccaaaaagacctgattttacctcactgccagaaaagagaatggtgctcaaattgctttgtacatagtgttcactgggcagcagttcatctacctggataagggctccgagctacagggaccctgacattgggatgtatggagagttggaattcaggaacagttgtaccgaatcttgaagtgaagaagaaagtagtttgttgtacatatgaatgaaatccaacttttattgcattcaatatagtattgtcaagcaccgtgatttaa

SEQ ID NO: 350166 - DNA, 486 bp, Homo sapiens
ctataccaccctataccaccctatacaccataccacacgtctcatggaggtagtgcttttcttatacctcagcgctaatgaggactgtcctccgcaccggtggtatagctgataaagccaccacgtgccctacgatggcctaacaggagtgcccattggcagattacacatgtaaatatgacctcagacaaaaaggaaccagaggcccaagggcaataataaggtggaatttgcaggtcagcccaggaattggcagaggaagtaggtgtctgataaccctttgtggagaatgagattccccccacctgtgtgagaaaaataaacagctctggagtcttgttcctgactccagaggaacgagagcattccaggaaagagagattccctggaaaattgaaaatgtgaatcctagggggaaattggggattgtgtctttccctgttgaaaatgtttggatgggaataaatatcttcaggaaacataaaa

SEQ ID NO: 350167 - DNA, 3361 bp, Homo sapiens
gacctaatgggcgctggagttcgcaaaacgtgacccggaaattggtcacgagcaggcgccgtgggcttgtggacgcctaacttgcgcgctgagatttccggcgtgggagcagaggtctgagtcttgcgtgggtcctctatatagggtgagaagcgtggcgctcggttcctgcctcggggaagtcctggcgcagatgggccacggggccggcgtggcggcgcctgggaccgactgaggcctaggcgccggagccggccgcgcctgggctggagcggggctcctcggcctggactgggagcccccggccccgggctcctgctggcgccgtccaaccttacatgggttcagggcgccttcgtaggcgggcacggctggtttcgggctaaggcgctctggagacctgacgatggcgtcgggcccgggctcccaggaacgggaagggctcctgatagtgaagctggaggaggactgcgcctggagccaggagctgcccccacctgacccaggaccgagccccgaggcctcccacttgcgcttcagacggttccgcttccaagaggcagctggtccccgggaagccctcagccggctccaagagctttgccatgggtggcttcggcctgagatgcgcacgaaggagcagatcttggagctgctggtgttagagcagttcctgaccatcctgccccaggagatccagagcagggtgcaggagctgcatccggagagcggcgaagaagcggtgacccttgtggaggatatgcagagagagcttgggagactgagacaacaggtcacaaaccatgggcggggaacagaagtgcttttggaggagcctttgcctctggaaacagcacgagagtcaccgagcttcaagctggagccaatggagactgagcgaagccctggccccaggctgcaggagctgctaggccccagcccccaaagggacccccaggctgtaaaggagagggcattatctgctccctggctttctctttttcctcctgaagggaacatggaagacaaggagatgactgggccccagttgcctgagagcttagaggacgtggcaatgtacatctcccaggaggagtgggggcatcaggatcctagtaagagggccctctccagggacacggtgcaggagagttatgagaatgtggactcactggagtctcacattcccagtcaggaggtcccaggcacccaggtgggacaaggaggaaagctatgggatcccagtgtccagagctgcaaggagggcctgagccccagaggcccagctccaggagaagagaaatttgagaacctggaaggtgttccgtctgtatgctctgagaacatccaccctcaggtgctgcttcctgaccaggcccgaggggaggtgccctggagtcctgagctgggaagacctcatgaccggtcgcaaggggattgggcgcctcccccagagggtggaatggagcaggccttggcaggagcctcaagtggcagagaactggggcgaccgaaggaactgcagccaaagaaactccatttatgtcccttgtgtggcaaaaatttctctaacaactcaaacctaattaggcaccagagaatacatgcagctgaaagactgtgtatgggtgtggactgcactgaaatctttggtgggaacccacgtttcctgtcactacacagagcacacctgggagaggaggcccacaagtgccttgaatgtgggaaatgcttcagtcagaacacccatctgactcgccaccaacgcacccacacgggtgagaagccctatcagtgcaacatttgcggaaaatgtttctcctgcaactccaacctccacaggcaccagagaacgcacactggggagaagccctacaagtgccctgagtgtggggagatctttgctcacagttccaacctccttcggcaccagagaattcacactggagagcgaccttataagtgtcccgagtgtgggaaaagtttctctcggagttcacacctcgtcattcacgaaagaactcatgagagagagagactttaccccttctctgagtgtggggaagctgtgagtgacagcaccccctttcttacaaaccatggagcccataaggcagagaagaagctctttgaatgtttgacttgtgggaaaagcttccggcagggcatgcacctcaccagacatcagagaacacacacaggagagaaaccgtataaatgtaccctttgtggggaaaacttctctcatagatccaatttaatcaggcaccagagaatccacacaggagaaaaaccctatacctgtcatgagtgcggagacagcttctctcacagctccaatcggattcgccacctgagaacgcatacgggagagagaccctataaatgttctgaatgtggagaaagcttctctcggagttcccgtcttatgagtcatcagagaactcacacaggttagtaacagtggggtttctctttgccccaggtgaggtggcatattcagaggagcctgttggcaagagctggtattccctgcccagccgaccaaatgacctctgcattcttcaggtaatgggggctcattgtgagggaggtgcagaggcagcagaggattggcataaaactgaaaaggagttctgtctgcatgagaaaggatggcaagtctctgaggtgacctcagggtggaattctctgttaagtccaccctgccccagggtgctcctaccctcttggtctttttaaagccaaggtgcgatttgggcacctgactgtccagtttaccttaacaagtttgggaatccatgtgatgtttttgatacttcttcctcatttgggacattcagtaggagcatttgggcttccggggcccctgagaccaaagaagaggggccaagtaccctgggaaatcagctgaaggtcaacaaaagactggttgtgagttgcagctgtcccgaaggccccagttgggaagccatgggcagtccagatcaagccaccacgtgccctacgatggcctaacaggagtgcccattggcagattacacatgtaaatatgacctcagacaaaaaggaaccagaggcccaagggcaataataaggtggaatttgcaggtcagcccaggaattggcagaggaagtaggtgtctgataaccctttgtggagaatgagattccccccacctgtgtgagaaaaataaacagctctggagtcttgttcctgactccagaggaacgagagcattccaggaaagagagattccctggaaaattgaaaatgtgaatcctagggggaaattggggattgtgtctttccctgttgaaaatgtttggatgggaataaatatcttcaggaaacataaaa

SEQ ID NO: 350168 - DNA, 3106 bp, Homo sapiens
gacctaatgggcgctggagttcgcaaaacgtgacccggaaattggtcacgagcaggcgccgtgggcttgtggacgcctaacttgcgcgctgagatttccggcgtgggagcagaggtctgagtcttgcgtgggtcctctatatagggtgagaagcgtggcgctcggttcctgcctcggggaagtcctggcgcagatgggccacggggccggcgtggcggcgcctgggaccgactgaggcctaggcgccggagccggccgcgcctgggctggagcggggctcctcggcctggactgggagcccccggccccgggctcctgctggcgccgtccaaccttacatgggttcagggcgccttcgtaggcgggcacggctggtttcgggctaaggcgctctggagacctgacgatggcgtcgggcccgggctcccaggaacgggaagggctcctgatagtgaagctggaggaggactgcgcctggagccaggagctgcccccacctgacccaggaccgagccccgaggcctcccacttgcgcttcagacggttccgcttccaagaggcagctggtccccgggaagccctcagccggctccaagagctttgccatgggtggcttcggcctgagatgcgcacgaaggagcagatcttggagctgctggtgttagagcagttcctgaccatcctgccccaggagatccagagcagggtgcaggagctgcatccggagagcggcgaagaagcggtgacccttgtggaggatatgcagagagagcttgggagactgagacaacagttgcctgagagcttagaggacgtggcaatgtacatctcccaggaggagtgggggcatcaggatcctagtaagagggccctctccagggacacggtgcaggagagttatgagaatgtggactcactggagtctcacattcccagtcaggaggtcccaggcacccaggtgggacaaggaggaaagctatgggatcccagtgtccagagctgcaaggagggcctgagccccagaggcccagctccaggagaagagaaatttgagaacctggaaggtgttccgtctgtatgctctgagaacatccaccctcaggtgctgcttcctgaccaggcccgaggggaggtgccctggagtcctgagctgggaagacctcatgaccggtcgcaaggggattgggcgcctcccccagagggtggaatggagcaggccttggcaggagcctcaagtggcagagaactggggcgaccgaaggaactgcagccaaagaaactccatttatgtcccttgtgtggcaaaaatttctctaacaactcaaacctaattaggcaccagagaatacatgcagctgaaagactgtgtatgggtgtggactgcactgaaatctttggtgggaacccacgtttcctgtcactacacagagcacacctgggagaggaggcccacaagtgccttgaatgtgggaaatgcttcagtcagaacacccatctgactcgccaccaacgcacccacacgggtgagaagccctatcagtgcaacatttgcggaaaatgtttctcctgcaactccaacctccacaggcaccagagaacgcacactggggagaagccctacaagtgccctgagtgtggggagatctttgctcacagttccaacctccttcggcaccagagaattcacactggagagcgaccttataagtgtcccgagtgtgggaaaagtttctctcggagttcacacctcgtcattcacgaaagaactcatgagagagagagactttaccccttctctgagtgtggggaagctgtgagtgacagcaccccctttcttacaaaccatggagcccataaggcagagaagaagctctttgaatgtttgacttgtgggaaaagcttccggcagggcatgcacctcaccagacatcagagaacacacacaggagagaaaccgtataaatgtaccctttgtggggaaaacttctctcatagatccaatttaatcaggcaccagagaatccacacaggagaaaaaccctatacctgtcatgagtgcggagacagcttctctcacagctccaatcggattcgccacctgagaacgcatacgggagagagaccctataaatgttctgaatgtggagaaagcttctctcggagttcccgtcttatgagtcatcagagaactcacacaggttagtaacagtggggtttctctttgccccaggtgaggtggcatattcagaggagcctgttggcaagagctggtattccctgcccagccgaccaaatgacctctgcattcttcaggtaatgggggctcattgtgagggaggtgcagaggcagcagaggattggcataaaactgaaaaggagttctgtctgcatgagaaaggatggcaagtctctgaggtgacctcagggtggaattctctgttaagtccaccctgccccagggtgctcctaccctcttggtctttttaaagccaaggtgcgatttgggcacctgactgtccagtttaccttaacaagtttgggaatccatgtgatgtttttgatacttcttcctcatttgggacattcagtaggagcatttgggcttccggggcccctgagaccaaagaagaggggccaagtaccctgggaaatcagctgaaggtcaacaaaagactggttgtgagttgcagctgtcccgaaggccccagttgggaagccatgggcagtccagatcaagccaccacgtgccctacgatggcctaacaggagtgcccattggcagattacacatgtaaatatgacctcagacaaaaaggaaccagaggcccaagggcaataataaggtggaatttgcaggtcagcccaggaattggcagaggaagtaggtgtctgataaccctttgtggagaatgagattccccccacctgtgtgagaaaaataaacagctctggagtcttgttcctgactccagaggaacgagagcattccaggaaagagagattccctggaaaattgaaaatgtgaatcctagggggaaattggggattgtgtctttccctgttgaaaatgtttggatgggaataaatatcttcaggaaacataaaa

SEQ ID NO: 350169 - DNA, 3182 bp, Homo sapiens
gacctaatgggcgctggagttcgcaaaacgtgacccggaaattggtcacgagcaggcgccgtgggcttgtggacgcctaacttgcgcgctgagatttccggcgtgggagcagaggtctgagtcttgcgtgggtcctctatatagggtgagaagcgtggcgctcggttcctgcctcggggaagtcctggcgcagatgggccacggggccggcgtggcggcgcctgggaccgactgaggcctaggcgccggagccggccgcgcctgggctggagcggggctcctcggcctggactgggagcccccggccccgggctcctgctggcgccgtccaaccttacatgggttcagggcgccttcgtaggcgggcacggctggtttcgggctaaggcgctctggagacctgacgatggcgtcgggcccgggctcccaggaacgggaagggctcctgatagtgaagctggaggaggactgcgcctggagccaggagctgcccccacctgacccaggaccgagccccgaggcctcccacttgcgcttcagacggttccgcttccaagaggcagctggtccccgggaagccctcagccggctccaagagctttgccatgggtggcttcggcctgagatgcgcacgaaggagcagatcttggagctgctggtgttagagcagttcctgaccatcctgccccaggagatccagagcagggtgcaggagctgcatccggagagcggcgaagaagcggtgacccttgtggaggatatgcagagagagcttgggagactgagacaacaggtcacaaaccatgggcggggaacagaagtgcttttggaggagcctttgcctctggaaacagcacgagagtcaccgagcttcaagctggagccaatggagactgagcgaagccctggccccaggctgcaggagctgctaggccccagcccccaaagggacccccaggctgtaaaggagagggcattatctgctccctggctttctctttttcctcctgaagggaacatggaagacaaggagatgactgggccccagttgcctgagagcttagaggacgtggcaatgtacatctcccaggaggagtgggggcatcaggatcctagtaagagggccctctccagggacacggtgcaggagagttatgagaatgtggactcactggagtctcacattcccagtcaggaggtcccaggcacccaggtgggacaaggaggaaagctatgggatcccagtgtccagagctgcaaggagggcctgagccccagaggcccagctccaggagaagagaaatttgagaacctggaaggtgttccgtctgtatgctctgagaacatccaccctcaggtgctgcttcctgaccaggcccgaggggaggtgccctggagtcctgagctgggaagacctcatgaccggtcgcaaggggattgggcgcctcccccagagggtggaatggagcaggccttggcaggagcctcaagtggcagagaactggggcgaccgaaggaactgcagccaaagaaactccatttatgtcccttgtgtggcaaaaatttctctaacaactcaaacctaattaggcaccagagaatacatgcagctgaaagactgtgtatgggtgtggactgcactgaaatctttggtgggaacccacgtttcctgtcactacacagagcacacctgggagaggaggcccacaagtgccttgaatgtgggaaatgcttcagtcagaacacccatctgactcgccaccaacgcacccacacgggtgagaagccctatcagtgcaacatttgcggaaaatgtttctcctgcaactccaacctccacaggcaccagagaacgcacactggggagaagccctacaagtgccctgagtgtggggagatctttgctcacagttccaacctccttcggcaccagagaattcacactggagagcgaccttataagtgtcccgagtgtgggaaaagtttctctcggagttcacacctcgtcattcacgaaagaactcatgagagagagagactttaccccttctctgagtgtggggaagctgtgagtgacagcaccccctttcttacaaaccatggagcccataaggcagagaagaagctctttgaatgtttgacttgtgggaaaagcttccggcagggcatgcacctcaccagacatcagagaacacacacaggagagaaaccgtataaatgtaccctttgtggggaaaacttctctcatagatccaatttaatcaggcaccagagaatccacacaggagaaaaaccctatacctgtcatgagtgcggagacagcttctctcacagctccaatcggattcgccacctgagaacgcatacgggagagagaccctataaatgttctgaatgtggagaaagcttctctcggagttcccgtcttatgagtcatcagagaactcacacaggttagtaacagtggggtttctctttgccccaggtgaggtggcatattcagaggagcctgttggcaagagctggtattccctgcccagccgaccaaatgacctctgcattcttcaggtaatgggggctcattgtgagggaggtgcagaggcagcagaggattggcataaaactgaaaaggagttctgtctgcatgagaaaggatggcaagtctctgaggtgacctcagggtggaattctctgttaagtccaccctgccccagggtgctcctaccctcttggtctttttaaagccaaggtgcgatttgggcacagctgtcccgaaggccccagttgggaagccatgggcagtccagatcaagccaccacgtgccctacgatggcctaacaggagtgcccattggcagattacacatgtaaatatgacctcagacaaaaaggaaccagaggcccaagggcaataataaggtggaatttgcaggtcagcccaggaattggcagaggaagtaggtgtctgataaccctttgtggagaatgagattccccccacctgtgtgagaaaaataaacagctctggagtcttgttcctgactccagaggaacgagagcattccaggaaagagagattccctggaaaattgaaaatgtgaatcctagggggaaattggggattgtgtctttccctgttgaaaatgtttggatgggaataaatatcttcaggaaacataaaa

SEQ ID NO: 350170 - DNA, 3638 bp, Homo sapiens
gacctaatgggcgctggagttcgcaaaacgtgacccggaaattggtcacgagcaggcgccgtgggcttgtggacgcctaacttgcgcgctgagatttccggcgtgggagcagaggtctgagtcttgcgtgggtcctctatatagggtgagaagcgtggcgctcggttcctgcctcggggaagtcctggcgcagatgggccacggggccggcgtggcggcgcctgggaccgactgaggcctaggcgccggagccggccgcgcctgggctggagcggggctcctcggcctggactgggagcccccggccccgggctcctgctggcgccgtccaaccttacatgggttcagggcgccttcgtaggcgggcacggctggtttcgggctaaggcgctctggagacctgacgatggcgtcgggcccgggctcccaggaacgggaagggctcctgatagtgaagctggaggaggactgcgcctggagccaggagctgcccccacctgacccaggaccgagccccgaggcctcccacttgcgcttcagacggttccgcttccaagaggcagctggtccccgggaagccctcagccggctccaagagctttgccatgggtggcttcggcctgagatgcgcacgaaggagcagatcttggagctgctggtgttagagcagttcctgaccatcctgccccaggagatccagagcagggtgcaggagctgcatccggagagcggcgaagaagcggtgacccttgtggaggatatgcagagagagcttgggagactgagacaacaggtcacaaaccatgggcggggaacagaagtgcttttggaggagcctttgcctctggaaacagcacgagagtcaccgagcttcaagctggagccaatggagactgagcgaagccctggccccaggctgcaggagctgctaggccccagcccccaaagggacccccaggctgtaaaggagagggcattatctgctccctggctttctctttttcctcctgaagggaacatggaagacaaggagatgactgggccccagttgcctgagagcttagaggacgtggcaatgtacatctcccaggaggagtgggggcatcaggatcctagtaagagggccctctccagggacacggtgcaggagagttatgagaatgtggactcactggagtctcacattcccagtcaggaggtcccaggcacccaggtgggacaaggaggaaagctatgggatcccagtgtccagagctgcaaggagggcctgagccccagaggcccagctccaggagaagagaaatttgagaacctggaaggtgttccgtctgtatgctctgagaacatccaccctcaggtgctgcttcctgaccaggcccgaggggaggtgccctggagtcctgagctgggaagacctcatgaccggtcgcaaggggattgggcgcctcccccagagggtggaatggagcaggccttggcaggagcctcaagtggcagagaactggggcgaccgaaggaactgcagccaaagaaactccatttatgtcccttgtgtggcaaaaatttctctaacaactcaaacctaattaggcaccagagaatacatgcagctgaaagactgtgtatgggtgtggactgcactgaaatctttggtgggaacccacgtttcctgtcactacacagagcacacctgggagaggaggcccacaagtgccttgaatgtgggaaatgcttcagtcagaacacccatctgactcgccaccaacgcacccacacgggtgagaagccctatcagtgcaacatttgcggaaaatgtttctcctgcaactccaacctccacaggcaccagagaacgcacactggggagaagccctacaagtgccctgagtgtggggagatctttgctcacagttccaacctccttcggcaccagagaattcacactggagagcgaccttataagtgtcccgagtgtgggaaaagtttctctcggagttcacacctcgtcattcacgaaagaactcatgagagagagagactttaccccttctctgagtgtggggaagctgtgagtgacagcaccccctttcttacaaaccatggagcccataaggcagagaagaagctctttgaatgtttgacttgtgggaaaagcttccggcagggcatgcacctcaccagacatcagagaacacacacaggagagaaaccgtataaatgtaccctttgtggggaaaacttctctcatagatccaatttaatcaggcaccagagaatccacacaggagaaaaaccctatacctgtcatgagtgcggagacagcttctctcacagctccaatcggattcgccacctgagaacgcatacgggagagagaccctataaatgttctgaatgtggagaaagcttctctcggagttcccgtcttatgagtcatcagagaactcacacaggttagtaacagtggggtttctctttgccccaggtgaggtggcatattcagaggagcctgttggcaagagctggtattccctgcccagccgaccaaatgacctctgcattcttcaggtaatgggggctcattgtgagggaggtgcagaggcagcagaggattggcataaaactgaaaaggagttctgtctgcatgagaaaggatggcaagtctctgaggtgacctcagggtggaattctctgttaagtccaccctgccccagggtgctcctaccctcttggtctttttaaagccaaggtgcgatttgggcacctgactgtccagtttaccttaacaagtttgggaatccatgtgatgtttttgatacttcttcctcatttgggacattcagtaggagcatttgggcttccggggcccctgagaccaaagaagaggggccaagtaccctgggaaatcagctgaaggtcaacaaaagactggttgtgagttgcagctgtcccgaaggccccagttgggaagccatgggcagtccagatcaagccaccacgtgccctacgatggcctaacaggagtgcccattggcagattacacatgtaaatatgacctcagacaaaaaggaaccagaggcccaagggcaataataaggtggaatttgcaggtcagcccaggaattggcagaggaagtaggtgtctgataaccctttgtggagaatgagattccccccacctgtgtgagaaaaataaacagctctggagtcttgttcctgactccagaggaacgagagcattccaggaaagagagattccctggaaaattgaaaatgtgaatcctagggggaaattggggattgtgtctttccctgttgaaaatgtttggatgggaataaatatcttcaggaaacataaaaaaacaagaacaaacacaaaaaacaaacacaaagataagagagaaacaagaaacatcagaggggggggcgcgaaaagaaacccgcagagggggaccaaaaaatcgcggaacacaaatatattgagaaaagagcggcccccacaaagaggagcgacacaataaagagaaagagaaagagcgcagcatattaaacaacgcgaggcaggaaaaacgagcagcaccggaacattcgtgagaaaaccccactatcggggacacacaatggggacacaaccacg

SEQ ID NO: 350171 - DNA, 2993 bp, Homo sapiens
gacctaatgggcgctggagttcgcaaaacgtgacccggaaattggtcacgagcaggcgccgtgggcttgtggacgcctaacttgcgcgctgagatttccggcgtgggagcagaggtctgagtcttgcgtgggtcctctatatagggtgagaagcgtggcgctcggttcctgcctcggggaagtcctggcgcagatgggccacggggccggcgtggcggcgcctgggaccgactgaggcctaggcgccggagccggccgcgcctgggctggagcggggctcctcggcctggactgggagcccccggccccgggctcctgctggcgccgtccaaccttacatgggttcagggcgccttcgtaggcgggcacggctggtttcgggctaaggcgctctggagacctgacgatggcgtcgggcccgggctcccaggaacgggaagggctcctgatagtgaagctggaggaggactgcgcctggagccaggagctgcccccacctgacccaggaccgagccccgaggcctcccacttgcgcttcagacggttccgcttccaagaggcagctggtccccgggaagccctcagccggctccaagagctttgccatgggtggcttcggcctgagatgcgcacgaaggagcagatcttggagctgctggtgttagagcagttcctgaccatcctgccccaggagatccagagcagggtgcaggagctgcatccggagagcggcgaagaagcggtgacccttgtggaggatatgcagagagagcttgggagactgagacaacaggtcacaaaccatgggcggggaacagaagtgcttttggaggagcctttgcctctggaaacagcacgagagtcaccgagcttcaagctggagccaatggagactgagcgaagccctggccccaggctgcaggagctgctaggccccagcccccaaagggacccccaggctgtaaaggagagggcattatctgctccctggctttctctttttcctcctgaagggaacatggaagacaaggagatgactgggccccagttgcctgagagcttagaggacgtggcaatgtacatctcccaggaggagtgggggcatcaggatcctagtaagagggccctctccagggacacggtgcaggagagttatgagaatgtggactcactggagtctcacattcccagtcaggaggtcccaggcacccaggtgggacaaggaggaaagctatgggatcccagtgtccagagctgcaaggagggcctgagccccagaggcccagctccaggagaagagaaatttgagaacctggaaggtgttccgtctgtatgctctgagaacatccaccctcaggtgctgcttcctgaccaggcccgaggggaggtgccctggagtcctgagctgggaagacctcatgaccggtcgcaaggggattgggcgcctcccccagagggtggaatggagcaggccttggcaggagcctcaagtggcagagaactggggcgaccgaaggaactgcagccaaagaaactccatttatgtcccttgtgtggcaaaaatttctctaacaactcaaacctaattaggcaccagagaatacatgcagctgaaagactgtgtatgggtgtggactgcactgaaatctttggtgggaacccacgtttcctgtcactacacagagcacacctgggagaggaggcccacaagtgccttgaatgtgggaaatgcttcagtcagaacacccatctgactcgccaccaacgcacccacacgggtgagaagccctatcagtgcaacatttgcggaaaatgtttctcctgcaactccaacctccacaggcaccagagaacgcacactggggagaagccctacaagtgccctgagtgtggggagatctttgctcacagttccaacctccttcggcaccagagaattcacactggagagcgaccttataagtgtcccgagtgtgggaaaagtttctctcggagttcacacctcgtcattcacgaaagaactcatgagagagagagactttaccccttctctgagtgtggggaagctgtgagtgacagcaccccctttcttacaaaccatggagcccataaggcagagaagaagctctttgaatgtttgacttgtgggaaaagcttccggcagggcatgcacctcaccagacatcagagaacacacacaggagagaaaccgtataaatgtaccctttgtggggaaaacttctctcatagatccaatttaatcaggcaccagagaatccacacaggagaaaaaccctatacctgtcatgagtgcggagacagcttctctcacagctccaatcggattcgccacctgagaacgcatacgggagagagaccctataaatgttctgaatgtggagaaagcttctctcggagttcccgtcttatgagtcatcagagaactctgtgaagtggaatctctgaaactcaggtgtggcatcaacaaagtcaagaagatacaacagcctcagtcaggaatgacaggaatacctgcatactttccctaactcaataccggaaaacggacaatatgaagagaggagggatggagcaagatgtgcccacaagacaggtgtgataagtttccataaaaactgatgcttcagaagaagggagcgtgaaagactcaaaggcaatgacagagtaatcttgtgtgtagcagagatgcaatgtggcttctccccttccaaaaagacctgattttacctcactgccagaaaagagaatggtgctcaaattgctttgtacatagtgttcactgggcagcagttcatctacctggataagggctccgagctacagggaccctgacattgggatgtatggagagttggaattcaggaacagttgtaccgaatcttgaagtgaagaagaaagtagtttgttgtacatatgaatgaaatccaacttttattgcattcaatatagtattgtcaagcaccgtgatttaa

SEQ ID NO: 350172 - DNA, 2664 bp, Homo sapiens
gacctaatgggcgctggagttcgcaaaacgtgacccggaaattggtcacgagcaggcgccgtgggcttgtggacgcctaacttgcgcgctgagatttccggcgtgggagcagaggtctgagtcttgcgtgggtcctctatatagggtgagaagcgtggcgctcggttcctgcctcggggaagtcctggcgcagatgggccacggggccggcgtggcggcgcctgggaccgactgaggcctaggcgccggagccggccgcgcctgggctggagcggggctcctcggcctggactgggagcccccggccccgggctcctgctggcgccgtccaaccttacatgggttcagggcgccttcgtaggcgggcacggctggtttcgggctaaggcgctctggagacctgacgatggcgtcgggcccgggctcccaggaacgggaagggctcctgatagtgaagctggaggaggactgcgcctggagccaggagctgcccccacctgacccaggaccgagccccgaggcctcccacttgcgcttcagacggttccgcttccaagaggcagctggtccccgggaagccctcagccggctccaagagctttgccatgggtggcttcggcctgagatgcgcacgaaggagcagatcttggagctgctggtgttagagcagttcctgaccatcctgccccaggagatccagagcagggtgcaggagctgcatccggagagcggcgaagaagcggtgacccttgtggaggatatgcagagagagcttgggagactgagacaacaggtcacaaaccatgggcggggaacagaagtgcttttggaggagcctttgcctctggaaacagcacgagagtcaccgagcttcaagctggagccaatggagactgagcgaagccctggccccaggctgcaggagctgctaggccccagcccccaaagggacccccaggctgtaaaggagagggcattatctgctccctggctttctctttttcctcctgaagggaacatggaagacaaggagatgactgggccccagttgcctgagagcttagaggacgtggcaatgtacatctcccaggaggagtgggggcatcaggatcctagtaagagggccctctccagggacacggtgcaggagagttatgagaatgtggactcactggagtctcacattcccagtcaggaggtcccaggcacccaggtgggacaaggaggaaagctatgggatcccagtgtccagagctgcaaggagggcctgagccccagaggcccagctccaggagaagagaaatttgagaacctggaaggtgttccgtctgtatgctctgagaacatccaccctcaggtgctgcttcctgaccaggcccgaggggaggtgccctggagtcctgagctgggaagacctcatgaccggtcgcaaggggattgggcgcctcccccagagggtggaatggagcaggccttggcaggagcctcaagtggcagagaactggggcgaccgaaggaactgcagccaaagaaactccatttatgtcccttgtgtggcaaaaatttctctaacaactcaaacctaattaggcaccagagaatacatgcagctgaaagactgtgtatgggtgtggactgcactgaaatctttggtgggaacccacgtttcctgtcactacacagagcacacctgggagaggaggcccacaagtgccttgaatgtgggaaatgcttcagtcagaacacccatctgactcgccaccaacgcacccacacgggtgagaagccctatcagtgcaacatttgcggaaaatgtttctcctgcaactccaacctccacaggcaccagagaacgcacactggggagaagccctacaagtgccctgagtgtggggagatctttgctcacagttccaacctccttcggcaccagagaattcacactggagagcgaccttataagtgtcccgagtgtgggaaaagtttctctcggagttcacacctcgtcattcacgaaagaactcatgagagagagagactttaccccttctctgagtgtggggaagctgtgagtgacagcaccccctttcttacaaaccatggagcccataaggcagagaagaagctctttgaatgtttgacttgtgggaaaagcttccggcagggcatgcacctcaccagacatcagagaacacacacaggagagaaaccgtataaatgtaccctttgtggggaaaacttctctcatagatccaatttaatcaggcaccagagaatccacacaggagaaaaaccctatacctgtcatgagtgcggagacagcttctctcacagctccaatcggattcgccacctgagaacgcatacgggagagagaccctataaatgttctgaatgtggagaaagcttctctcggagttcccgtcttatgagtcatcagagaactcctgataaccctttgtggagaatgagattccccccacctgtgtgagaaaaataaacagctctggagtcttgttcctgactccagaggaacgagagcattccaggaaagagagattccctggaaaattgaaaatgtgaatcctagggggaaattggggattgtgtctttccctgttgaaaatgtttggatgggaataaatatcttcaggaaacataaaa

SEQ ID NO: 350173 - DNA, 4917 bp, Homo sapiens
cccgggccggggcacggagagagccgagcgccgcagccgtgagccgaatagagccggagagacccgagtatgaccggagaagcccaggccggccggaagaggagccgagcgcggccggaaggaaccgagcccgtccgaagggagcggagcgcagcctggcctggggcccggtcgagcccgcgccatggcggccgaggcgacagctgtggccggaagcggggctgttggcggctgcctggccaaagacggcttgcagcagtctaagtgcccggacactaccccaaaacggcggcgcgcctcgtcgctgtcgcgtgacgccgagcgccgagcctaccaatggtgccgggagtacttgggcggggcctggcgccgagtgcagcccgaggagctgagggtttaccccgtgaggtgggaggtcaggggtcagcctctccggtgcgcggatcggggtcaggggtcagccgcggggccctcaggatgctccatgttttcgcccccctcttgcgcccgcgcctggggcggggcggggccggcctggccgggagggggccggggccgcggcaggtagggccggccgcgggctgagcgcgcctggtgtgggtctgcagcggaggcctcagcaacctgctcttccgctgctcgctcccggaccacctgcccagcgttggcgaggagccccgggaggtgcttctgcggctgtacggagccatcttgcaggtgagggggttgtgagcgccgcagcaccagtggctttagggcctgtcgcttacgcgatgcgggtagtattgttcccgttgcgcagttgaggacaccgaggttcacggtctgagtaacacctcattacaccgaagcctgggcctgtattcccagagctttgggaggctgaggcgagaggatcacttgagcacaggagttcgagaccagcctggacaacatagtgagacccccatctctaaataaaaatagaccaacgctaaagcctgtgctccagagcctccaggcaattggatcagaagtcgcagctctggtgggaggaaggcgagccctcatgtgtgtccctgtgccactttgccttggcccctttgctgtccatcctttttcagggcgtggactccctggtgctagaaagcgtgatgttcgccatacttgcggagcggtcgctggggccccagctgtacggagtcttcccagagggccggctggaacagtacatcccaagtcggccattgaaaactcaagagcttcgagagccagtgttgtcagcagccattgccacgaagatggcgcaatttcatggcatggagatgcctttcaccaaggagccccactggctgtttgggaccatggagcggtacctaaaacagatccaggacctgcccccaactggcctccctgagatgaacctgctggagatgtacagcctgaaggatgagatgggcaacctcaggaagttactagagtctaccccatcgccagtcgtcttctgccacaatgacatccaggaaggtaggagaaggcatctgagtctcctaacccaagatggaagagccagagggctctggagtgagcagaacctcaccccattcccccagggaacatcttgctgctctcagagccagaaaatgctgacagcctcatgctggtggacttcgagtacagcagttataactataggggctttgacattgggaaccatttttgtgagtgggtttatgattatactcacgaggaatggcctttctacaaagcaaggcccacagactaccccactcaagaacagcagttgcattttattcgtcattacctggcagaggcaaagaaaggtgagaccctctcccaagaggagcagagaaaactggaagaagatttgctggtagaagtcagtcggtatgctctggcatcccatttcttctggggtctgtggtccatcctccaggcatccatgtccaccatagaatttggttacttggactatgcccagtctcggttccagttctacttccagcagaaggggcagctgaccagtgtccactcctcatcctgactccaccctcccactccttggatttctcctggagcctccagggcaggaccttggagggaggaacaacgagcagaaggccctggcgactgggctgagcccccaagtgaaactgaggttcaggagaccggcctgttcctgagtttgagtgccgaccaacccccaggatggcggaagctcaccaggccgtggccttccagttcacggtgaccccagacggggtcgacttccggctcagtcgggaggccctgaaacacgtctacctgtctgggatcaactcctggaagaaacgcctgatccgcatcaagaatggcatcctcaggggcgtgtaccctggcagccccaccagctggctggtcgtcatcatggcaacagtgggttcctccttctgcaacgtggacatctccttggggctggtcagttgcatccagagatgcctccctcaggggtgtggcccctaccagaccccgcagacccgggcacttctcagcatggccatcttctccacgggcgtctgggtgacgggcatcttcttcttccgccaaaccctgaagctgcttctctgctaccatgggtggatgtttgagatgcatggcaagaccagcaacttgaccaggatctgggctatgtgtatccgccttctatccagccggcaccctatgctctacagcttccagacatctctgcccaagcttcctgtgcccagggtgtcagccacaattcagcggtacctagagtctgtgcgccccttgttggatgatgaggaatattaccgcatggagttgctggccaaagaattccaggacaagactgcccccaggctgcagaaatacctggtgctcaagtcatggtgggcaagtaactatgtgagtgactggtgggaagagtacatctaccttcgaggcaggagccctctcatggtgaacagcaactattatgtcatggaccttgtgctcatcaagaatacagacgtgcaggcagcccgcctgggaaacatcatccacgccatgatcatgtatcgccgtaaactggaccgtgaagaaatcaagcctgtgatggcactgggcatagtgcctatgtgctcctaccagatggagaggatgttcaacaccactcggatcccgggcaaggacacagatgtgctacagcacctctcagacagccggcacgtggctgtctaccacaagggacgcttcttcaagctgtggctctatgagggcgcccgtctgctcaagcctcaggatctggagatgcagttccagaggatcctggacgacccctccccacctcagcctggggaggagaagctggcagccctcactgcaggaggaagggtggagtgggcgcaggcacgccaggccttctttagctctggaaagaataaggctgccttggaggccatcgagcgtgccgctttcttcgtggccctggatgaggaatcctactcctatgaccccgaagatgaggccagcctcagcctctatggcaaggccctgctacatggcaactgctacaacaggtggtttgacaaatccttcactctcatttccttcaagaatggccagttgggtctcaatgcagagcatgcgtgggcagatgctcccatcattgggcacctctgggagtttgtcctgggcacagacagcttccacctgggctacacggagaccgggcactgcctgggcaaaccgaaccctgcgctcgcacctcctacacggctgcagtgggacattccaaaacagtgccaggcggtcatcgagagttcctaccaggtggccaaggcgttggcagacgacgtggagttgtactgcttccagttcctgccctttggcaaaggcctcatcaagaagtgccggaccagccctgatgcctttgtgcagatcgcgctgcagctggctcacttccgggacaggggtaagttctgcctgacctatgaggcctcaatgaccagaatgttccgggagggacggactgagactgtgcgttcctgtaccagcgagtccacagcctttgtgcaggccatgatggaggggtcccacacaaaagcagacctgcgagatctcttccagaaggctgctaagaagcaccagaatatgtaccgcctggccatgaccggggcagggatcgacaggcacctcttctgcctttacttggtctccaagtacctaggagtcagctctcctttccttgctgaggtgctctcggaaccctggcgtctctccaccagccagatcccccaatcccagatccgcatgttcgacccagagcagcaccccaatcacctgggcgctggaggtggctttggccctgtagcagatgatggctatggagtttcctacatgattgcaggcgagaacacgatcttcttccacatctccagcaagttctcaagctcagagacgaacgcccagcgctttggaaaccacatccgcaaagccctgctggacattgctgatcttttccaagttcccaaggcctacagctgaaggttggagaaatgccagctgccctttcgtccccacactgtggaggaagggacctgtggcagctcacaggcatgaggggtggccgtgcacaggtgcccaggctccaaggacagctccggcagcaggtcctcgctgggcagatgctgctccctgagggcccaggtggtggagcccttaggtacctgtgttttgtttgggaactcggaggccctccccctcccccagctcagaccacagaggtggcaagagaagggctgaagctggaagactgttcatgagggacttgtgtgacctgctttgaaatgtgtgactctgctgagtgacgtaggctctgagatagctgtccacgcccacgtgtttgcttggaataaatacttgcctcagaacctt

SEQ ID NO: 350174 - DNA, 682 bp, Homo sapiens
tggcctggcggggggcgcgggccgggggcagccgctagtcgcggggtggggggcgcgaggggtcgcggactggctgggggcgtctcggcgcggctggcggcggggccggcctaagcgcgcccgcgcacccatctgcccccgtcctaggtgccgaccaacccccaggatggcggaagctcaccaggccgtggccttccagttcacggtgaccccagacggggtcgacttccggctcagtcgggaggccctgaaacacgtctacctgtctgggatcaactcctggaagaaacgcctgatccgcatcaagaatggcatcctcaggggcgtgtaccctggcagccccaccagctggctggtcgtcatcatggcaacagtgggttcctccttctgcaacgtggacatctccttggggctggtcagttgcatccagagatgcctccctcaggggtgtggcccctaccagaccccgcagacccgggcacttctcagcatggccatcttctccacgggcgtctgggtgacgggcatcttcttcttccgccaaaccctgaagctgcttctctgctaccatgggtggatgtttgagatgcatggcaagaccagcaacttgaccaggatctgggctgtgagcagcagccagtggaggggttcaggcacctgggttgagactctttggactcct

SEQ ID NO: 350175 - DNA, 1596 bp, Homo sapiens
cccgggccggggcacggagagagccgagcgccgcagccgtgagccgaatagagccggagagacccgagtatgaccggagaagcccaggccggccggaagaggagccgagcgcggccggaaggaaccgagcccgtccgaagggagcggagcgcagcctggcctggggcccggtcgagcccgcgccatggcggccgaggcgacagctgtggccggaagcggggctgttggcggctgcctggccaaagacggcttgcagcagtctaagtgcccggacactaccccaaaacggcggcgcgcctcgtcgctgtcgcgtgacgccgagcgccgagcctaccaatggtgccgggagtacttgggcggggcctggcgccgagtgcagcccgaggagctgagggtttaccccgtgagcggaggcctcagcaacctgctcttccgctgctcgctcccggaccacctgcccagcgttggcgaggagccccgggaggtgcttctgcggctgtacggagccatcttgcagggcgtggactccctggtgctagaaagcgtgatgttcgccatacttgcggagcggtcgctggggccccagctgtacggagtcttcccagagggccggctggaacagtacatcccaagtcggccattgaaaactcaagagcttcgagagccagtgttgtcagcagccattgccacgaagatggcgcaatttcatggcatggagatgcctttcaccaaggagccccactggctgtttgggaccatggagcggtacctaaaacagatccaggacctgcccccaactggcctccctgagatgaacctgctggagatgtacagcctgaaggatgagatgggcaacctcaggaagttactagagtctaccccatcgccagtcgtcttctgccacaatgacatccaggaagggaacatcttgctgctctcagagccagaaaatgctgacagcctcatgctggtggacttcgagtacagcagttataactataggggctttgacattgggaaccatttttgtgagtgggtttatgattatactcacgaggaatggcctttctacaaagcaaggcccacagactaccccactcaagaacagcagttgcattttattcgtcattacctggcagaggcaaagaaaggtgagaccctctcccaagaggagcagagaaaactggaagaagatttgctggtagaagtcagtcggtatgctctggcatcccatttcttctggggtctgtggtccatcctccaggcatccatgtccaccatagaatttggttacttggactatgcccagtctcggttccagttctacttccagcagaaggggcagctgaccagtgtccactcctcatcctgactccaccctcccactccttggatttctcctggagcctccagggcaggaccttggagggaggaacaacgagcagaaggccctggcgactgggctgagcccccaagtgaaactgaggttcaggagaccggcctgttcctgagtttgagtaggtccccatggctggcaggccagagccccgtgctgtgtatgtaacacaataaacaagcttcttcttcccaccctgt

SEQ ID NO: 350176 - DNA, 5252 bp, Homo sapiens
cccgggccggggcacggagagagccgagcgccgcagccgtgagccgaatagagccggagagacccgagtatgaccggagaagcccaggccggccggaagaggagccgagcgcggccggaaggaaccgagcccgtccgaagggagcggagcgcagcctggcctggggcccggtcgagcccgcgccatggcggccgaggcgacagctgtggccggaagcggggctgttggcggctgcctggccaaagacggcttgcagcagtctaagtgcccggacactaccccaaaacggcggcgcgcctcgtcgctgtcgcgtgacgccgagcgccgagcctaccaatggtgccgggagtacttgggcggggcctggcgccgagtgcagcccgaggagctgagggtttaccccgtgaggtgggaggtcaggggtcagcctctccggtgcgcggatcggggtcaggggtcagccgcggggccctcaggatgctccatgttttcgcccccctcttgcgcccgcgcctggggcggggcggggccggcctggccgggagggggccggggccgcggcaggtagggccggccgcgggctgagcgcgcctggtgtgggtctgcagcggaggcctcagcaacctgctcttccgctgctcgctcccggaccacctgcccagcgttggcgaggagccccgggaggtgcttctgcggctgtacggagccatcttgcaggtgagggggttgtgagcgccgcagcaccagtggctttagggcctgtcgcttacgcgatgcgggtagtattgttcccgttgcgcagttgaggacaccgaggttcacggtctgagtaacacctcattacaccgaagcctgggcctgtattcccagagctttgggaggctgaggcgagaggatcacttgagcacaggagttcgagaccagcctggacaacatagtgagacccccatctctaaataaaaatagaccaacgctaaagcctgtgctccagagcctccaggcaattggatcagaagtcgcagctctggtgggaggaaggcgagccctcatgtgtgtccctgtgccactttgccttggcccctttgctgtccatcctttttcagggcgtggactccctggtgctagaaagcgtgatgttcgccatacttgcggagcggtcgctggggccccagctgtacggagtcttcccagagggccggctggaacagtacatcccagtacgggcccagtcctaccctctcctccccaaggcacctccaccccctaaccctaccccagtgcccaatgtctgcctccacatccctcaccccaagtagggaatttcccccaaaaccctgacttcccctcattgccccagcccttcccactcctgccccagccccatcaccaccctgatagcttcctgggtgcagagtcggccattgaaaactcaagagcttcgagagccagtgttgtcagcagccattgccacgaagatggcgcaatttcatggcatggagatgcctttcaccaaggagccccactggctgtttgggaccatggagcggtacctaaaacagatccaggacctgcccccaactggcctccctgagatgaacctgctggagatgtacagcctgaaggatgagatgggcaacctcaggaagttactagagtctaccccatcgccagtcgtcttctgccacaatgacatccaggaaggtaggagaaggcatctgagtctcctaacccaagatggaagagccagagggctctggagtgagcagaacctcaccccattcccccagggaacatcttgctgctctcagagccagaaaatgctgacagcctcatgctggtggacttcgagtacagcagttataactataggggctttgacattgggaaccatttttgtgagtgggtttatgattatactcacgaggaatggcctttctacaaagcaaggcccacagactaccccactcaagaacagcagttgcattttattcgtcattacctggcagaggcaaagaaaggtgagaccctctcccaagaggagcagagaaaactggaagaagatttgctggtagaagtcagtcggtatgctctggcatcccatttcttctggggtctgtggtccatcctccaggcatccatgtccaccatagaatttggttacttggactatgcccagtctcggttccagttctacttccagcagaaggggcagctgaccagtgtccactcctcatcctgactccaccctcccactccttggatttctcctggagcctccagggcaggaccttggagggaggaacaacgagcagaaggccctggcgactgggctgagcccccaagtgaaactgaggttcaggagaccggcctgttcctgagtttgactctaaagccaccatcctcacgagactctggggccccccaggctcccagacctttgagcaaccttcaccgcacagaaacccagccgcgccctgcaattcccaccgcggaaggtgggtgggttctggttctcgccccacgtttttccccgaccccgatttgggagtaggtgtcaggttcctggtgagggcggggcgggggtggctaggcctgaaggacgtggggacacgggccagagtggctggccccacgcacggacaggagtgaacccgagctgtgccgaccaacccccaggatggcggaagctcaccaggccgtggccttccagttcacggtgaccccagacggggtcgacttccggctcagtcgggaggccctgaaacacgtctacctgtctgggatcaactcctggaagaaacgcctgatccgcatcaagaatggcatcctcaggggcgtgtaccctggcagccccaccagctggctggtcgtcatcatggcaacagtgggttcctccttctgcaacgtggacatctccttggggctggtcagttgcatccagagatgcctccctcaggggtgtggcccctaccagaccccgcagacccgggcacttctcagcatggccatcttctccacgggcgtctgggtgacgggcatcttcttcttccgccaaaccctgaagctgcttctctgctaccatgggtggatgtttgagatgcatggcaagaccagcaacttgaccaggatctgggctatgtgtatccgccttctatccagccggcaccctatgctctacagcttccagacatctctgcccaagcttcctgtgcccagggtgtcagccacaattcagcggtacctagagtctgtgcgccccttgttggatgatgaggaatattaccgcatggagttgctggccaaagaattccaggacaagactgcccccaggctgcagaaatacctggtgctcaagtcatggtgggcaagtaactatgtgagtgactggtgggaagagtacatctaccttcgaggcaggagccctctcatggtgaacagcaactattatgtcatggaccttgtgctcatcaagaatacagacgtgcaggcagcccgcctgggaaacatcatccacgccatgatcatgtatcgccgtaaactggaccgtgaagaaatcaagcctgtgatggcactgggcatagtgcctatgtgctcctaccagatggagaggatgttcaacaccactcggatcccgggcaaggacacagatgtgctacagcacctctcagacagccggcacgtggctgtctaccacaagggacgcttcttcaagctgtggctctatgagggcgcccgtctgctcaagcctcaggatctggagatgcagttccagaggatcctggacgacccctccccacctcagcctggggaggagaagctggcagccctcactgcaggaggaagggtggagtgggcgcaggcacgccaggccttctttagctctggaaagaataaggctgccttggaggccatcgagcgtgccgctttcttcgtggccctggatgaggaatcctactcctatgaccccgaagatgaggccagcctcagcctctatggcaaggccctgctacatggcaactgctacaacaggtggtttgacaaatccttcactctcatttccttcaagaatggccagttgggtctcaatgcagagcatgcgtgggcagatgctcccatcattgggcacctctgggagtttgtcctgggcacagacagcttccacctgggctacacggagaccgggcactgcctgggcaaaccgaaccctgcgctcgcacctcctacacggctgcagtgggacattccaaaacagtgccaggcggtcatcgagagttcctaccaggtggccaaggcgttggcagacgacgtggagttgtactgcttccagttcctgccctttggcaaaggcctcatcaagaagtgccggaccagccctgatgcctttgtgcagatcgcgctgcagctggctcacttccgggacaggggtaagttctgcctgacctatgaggcctcaatgaccagaatgttccgggagggacggactgagactgtgcgttcctgtaccagcgagtccacagcctttgtgcaggccatgatggaggggtcccacacaaaagcagacctgcgagatctcttccagaaggctgctaagaagcaccagaatatgtaccgcctggccatgaccggggcagggatcgacaggcacctcttctgcctttacttggtctccaagtacctaggagtcagctctcctttccttgctgaggtgctctcggaaccctggcgtctctccaccagccagatcccccaatcccagatccgcatgttcgacccagagcagcaccccaatcacctgggcgctggaggtggctttggccctgtagcagatgatggctatggagtttcctacatgattgcaggcgagaacacgatcttcttccacatctccagcaagttctcaagctcagagacgaacgcccagcgctttggaaaccacatccgcaaagccctgctggacattgctgatcttttccaagttcccaaggcctacagctgaaggttggagaaatgccagctgccctttcgtccccacactgtggaggaagggacctgtggcagctcacaggcatgaggggtggccgtgcacaggtgcccaggctccaaggacagctccggcagcaggtcctcgctgggcagatgctgctccctgagggcccaggtggtggaggtggggttggagcaggaagggaattttgatttttttttttcttgatagatactaataaaaataaggctgtgtaattttctctcag

SEQ ID NO: 350177 - DNA, 5469 bp, Homo sapiens
cccgggccggggcacggagagagccgagcgccgcagccgtgagccgaatagagccggagagacccgagtatgaccggagaagcccaggccggccggaagaggagccgagcgcggccggaaggaaccgagcccgtccgaagggagcggagcgcagcctggcctggggcccggtcgagcccgcgccatggcggccgaggcgacagctgtggccggaagcggggctgttggcggctgcctggccaaagacggcttgcagcagtctaagtgcccggacactaccccaaaacggcggcgcgcctcgtcgctgtcgcgtgacgccgagcgccgagcctaccaatggtgccgggagtacttgggcggggcctggcgccgagtgcagcccgaggagctgagggtttaccccgtgaggtgggaggtcaggggtcagcctctccggtgcgcggatcggggtcaggggtcagccgcggggccctcaggatgctccatgttttcgcccccctcttgcgcccgcgcctggggcggggcggggccggcctggccgggagggggccggggccgcggcaggtagggccggccgcgggctgagcgcgcctggtgtgggtctgcagcggaggcctcagcaacctgctcttccgctgctcgctcccggaccacctgcccagcgttggcgaggagccccgggaggtgcttctgcggctgtacggagccatcttgcaggtgagggggttgtgagcgccgcagcaccagtggctttagggcctgtcgcttacgcgatgcgggtagtattgttcccgttgcgcagttgaggacaccgaggttcacggtctgagtaacacctcattacaccgaagcctgggcctgtattcccagagctttgggaggctgaggcgagaggatcacttgagcacaggagttcgagaccagcctggacaacatagtgagacccccatctctaaataaaaatagaccaacgctaaagcctgtgctccagagcctccaggcaattggatcagaagtcgcagctctggtgggaggaaggcgagccctcatgtgtgtccctgtgccactttgccttggcccctttgctgtccatcctttttcagggcgtggactccctggtgctagaaagcgtgatgttcgccatacttgcggagcggtcgctggggccccagctgtacggagtcttcccagagggccggctggaacagtacatcccagtacgggcccagtcctaccctctcctccccaaggcacctccaccccctaaccctaccccagtgcccaatgtctgcctccacatccctcaccccaagtagggaatttcccccaaaaccctgacttcccctcattgccccagcccttcccactcctgccccagccccatcaccaccctgatagcttcctgggtgcagagtcggccattgaaaactcaagagcttcgagagccagtgttgtcagcagccattgccacgaagatggcgcaatttcatggcatggagatgcctttcaccaaggagccccactggctgtttgggaccatggagcggtgagtcaggagcctcctcagggctcctgtactcctgagctgaacctccatgccagcggatgtgtcgggggctctatccagccctccacttgagtggatctgatgtcatgggtgacagagcaagactccatttcaaaagaaaaaaagaaatgattgccggacaagtcacacagtgataggagcaggggtgcagtagtctggcctgaggggtagataggcgaggggtgggaaagaatagcagagccagtgtatcctattctttgggcttcaggtacctaaaacagatccaggacctgcccccaactggcctccctgagatgaacctgctggagatgtacagcctgaaggatgagatgggcaacctcaggaagttactagagtctaccccatcgccagtcgtcttctgccacaatgacatccaggaaggtaggagaaggcatctgagtctcctaacccaagatggaagagccagagggctctggagtgagcagaacctcaccccattcccccagggaacatcttgctgctctcagagccagaaaatgctgacagcctcatgctggtggacttcgagtacagcagttataactataggggctttgacattgggaaccatttttgtgagtgggtttatgattatactcacgaggaatggcctttctacaaagcaaggcccacagactaccccactcaagaacagcagttgcattttattcgtcattacctggcagaggcaaagaaaggtgagaccctctcccaagaggagcagagtttcttctggggtctgtggtccatcctccaggcatccatgtccaccatagaatttggttacttggactatgcccagtctcggttccagttctacttccagcagaaggggcagctgaccagtgtccactcctcatcctgactccaccctcccactccttggatttctcctggagcctccagggcaggaccttggagggaggaacaacgagcagaaggccctggcgactgggctgagcccccaagtgaaactgaggttcaggagaccggcctgttcctgagtttgactctaaagccaccatcctcacgagactctggggccccccaggctcccagacctttgagcaaccttcaccgcacagaaacccagccgcgccctgcaattcccaccgcggaaggtgggtgggttctggttctcgccccacgtttttccccgaccccgatttgggagtaggtgtcaggttcctggtgagggcggggcgggggtggctaggcctgaaggacgtggggacacgggccagagtggctggccccacgcacggacaggagtgaacccgagctgtgccgaccaacccccaggatggcggaagctcaccaggccgtggccttccagttcacggtgaccccagacggggtcgacttccggctcagtcgggaggccctgaaacacgtctacctgtctgggatcaactcctggaagaaacgcctgatccgcatcaagaatggcatcctcaggggcgtgtaccctggcagccccaccagctggctggtcgtcatcatggcaacagtgggttcctccttctgcaacgtggacatctccttggggctggtcagttgcatccagagatgcctccctcaggggtgtggcccctaccagaccccgcagacccgggcacttctcagcatggccatcttctccacgggcgtctgggtgacgggcatcttcttcttccgccaaaccctgaagctgcttctctgctaccatgggtggatgtttgagatgcatggcaagaccagcaacttgaccaggatctgggctatgtgtatccgccttctatccagccggcaccctatgctctacagcttccagacatctctgcccaagcttcctgtgcccagggtgtcagccacaattcagcggtacctagagtctgtgcgccccttgttggatgatgaggaatattaccgcatggagttgctggccaaagaattccaggacaagactgcccccaggctgcagaaatacctggtgctcaagtcatggtgggcaagtaactatgtgagtgactggtgggaagagtacatctaccttcgaggcaggagccctctcatggtgaacagcaactattatgtcatggaccttgtgctcatcaagaatacagacgtgcaggcagcccgcctgggaaacatcatccacgccatgatcatgtatcgccgtaaactggaccgtgaagaaatcaagcctgtgatggcactgggcatagtgcctatgtgctcctaccagatggagaggatgttcaacaccactcggatcccgggcaaggacacagatgtgctacagcacctctcagacagccggcacgtggctgtctaccacaagggacgcttcttcaagctgtggctctatgagggcgcccgtctgctcaagcctcaggatctggagatgcagttccagaggatcctggacgacccctccccacctcagcctggggaggagaagctggcagccctcactgcaggaggaagggtggagtgggcgcaggcacgccaggccttctttagctctggaaagaataaggctgccttggaggccatcgagcgtgccgctttcttcgtggccctggatgaggaatcctactcctatgaccccgaagatgaggccagcctcagcctctatggcaaggccctgctacatggcaactgctacaacaggtggtttgacaaatccttcactctcatttccttcaagaatggccagttgggtctcaatgcagagcatgcgtgggcagatgctcccatcattgggcacctctgggagtttgtcctgggcacagacagcttccacctgggctacacggagaccgggcactgcctgggcaaaccgaaccctgcgctcgcacctcctacacggctgcagtgggacattccaaaacagtgccaggcggtcatcgagagttcctaccaggtggccaaggcgttggcagacgacgtggagttgtactgcttccagttcctgccctttggcaaaggcctcatcaagaagtgccggaccagccctgatgcctttgtgcagatcgcgctgcagctggctcacttccgggacaggggtaagttctgcctgacctatgaggcctcaatgaccagaatgttccgggagggacggactgagactgtgcgttcctgtaccagcgagtccacagcctttgtgcaggccatgatggaggggtcccacacaaaagcagacctgcgagatctcttccagaaggctgctaagaagcaccagaatatgtaccgcctggccatgaccggggcagggatcgacaggcacctcttctgcctttacttggtctccaagtacctaggagtcagctctcctttccttgctgaggtgctctcggaaccctggcgtctctccaccagccagatcccccaatcccagatccgcatgttcgacccagagcagcaccccaatcacctgggcgctggaggtggctttggccctgtagcagatgatggctatggagtttcctacatgattgcaggcgagaacacgatcttcttccacatctccagcaagttctcaagctcagagacgaacgcccagcgctttggaaaccacatccgcaaagccctgctggacattgctgatcttttccaagttcccaaggcctacagctgaaggttggagaaatgccagctgccctttcgtccccacactgtggaggaagggacctgtggcagctcacaggcatgaggggtggccgtgcacaggtgcccaggctccaaggacagctccggcagcaggtcctcgctgggcagatgctgctccctgagggcccaggtggtggaggtggggttggagcaggaagggaattttgatttttttttttcttgatagatactaataaaaataaggctgtgtaattttctctcag

SEQ ID NO: 350178 - DNA, 4387 bp, Homo sapiens
ttgcactttagcctgggtgagagcaagactctgtctcaaaacaccaaacaaaaaaagaaaaaagaaatgattgccaaggccgggcacggtggctcacccctgtaatcccagcactttgggaggccgaggcaggcggatcacaaggtcaggagatcaagcacaatggctaacacggtgaaaccccatctctactaaaaatacaaaaaattagccaggcgtggcggcaggcgcctgtagtcccaccccatcaccaccctgatagcttcctgggtgcagagtcggccattgaaaactcaagagcttcgagagccagtgttgtcagcagccattgccacgaagatggcgcaatttcatggcatggagatgcctttcaccaaggagccccactggctgtttgggaccatggagcggtgagtcaggagcctcctcagggctcctgtactcctgagctgaacctccatgccagcggatgtgtcgggggctctatccagccctccacttgagtggatctgatgtcatgggtgacagagcaagactccatttcaaaagaaaaaaagaaatgattgccggacaagtcacacagtgataggagcaggggtgcagtagtctggcctgaggggtagataggcgaggggtgggaaagaatagcagagccagtgtatcctattctttgggcttcaggtacctaaaacagatccaggacctgcccccaactggcctccctgagatgaacctgctggagatgtacagcctgaaggatgagatgggcaacctcaggaagttactagagtctaccccatcgccagtcgtcttctgccacaatgacatccaggaaggtaggagaaggcatctgagtctcctaacccaagatggaagagccagagggctctggagtgagcagaacctcaccccattcccccagggaacatcttgctgctctcagagccagaaaatgctgacagcctcatgctggtggacttcgagtacagcagttataactataggggctttgacattgggaaccatttttgtgagtgggtttatgattatactcacgaggaatggcctttctacaaagcaaggcccacagactaccccactcaagaacagcagttgcattttattcgtcattacctggcagaggcaaagaaaggtgagaccctctcccaagaggagcagagaaaactggaagaagatttgctggtagaagtcagtcggtatgctctggcatcccatttcttctggggtctgtggtccatcctccaggcatccatgtccaccatagaatttggttacttggactatgcccagtctcggttccagttctacttccagcagaaggggcagctgaccagtgtccactcctcatcctgactccaccctcccactccttggatttctcctggagcctccagggcaggaccttggagggaggaacaacgagcagaaggccctggcgactgggctgagcccccaagtgaaactgaggttcaggagaccggcctgttcctgagtttgactctaaagccaccatcctcacgagactctggggccccccaggctcccagacctttgagcaaccttcaccgcacagaaacccagccgcgccctgcaattcccaccgcggaaggtgggtgggttctggttctcgccccacgtttttccccgaccccgatttgggagtaggtgtcaggttcctggtgagggcggggcgggggtggctaggcctgaaggacgtggggacacgggccagagtggctggccccacgcacggacaggagtgaacccgagctgtgccgaccaacccccaggatggcggaagctcaccaggccgtggccttccagttcacggtgaccccagacggggtcgacttccggctcagtcgggaggccctgaaacacgtctacctgtctgggatcaactcctggaagaaacgcctgatccgcatcaagaatggcatcctcaggggcgtgtaccctggcagccccaccagctggctggtcgtcatcatggcaacagtgggttcctccttctgcaacgtggacatctccttggggctggtcagttgcatccagagatgcctccctcaggggtgtggcccctaccagaccccgcagacccgggcacttctcagcatggccatcttctccacgggcgtctgggtgacgggcatcttcttcttccgccaaaccctgaagctgcttctctgctaccatgggtggatgtttgagatgcatggcaagaccagcaacttgaccaggatctgggctatgtgtatccgccttctatccagccggcaccctatgctctacagcttccagacatctctgcccaagcttcctgtgcccagggtgtcagccacaattcagcggtacctagagtctgtgcgccccttgttggatgatgaggaatattaccgcatggagttgctggccaaagaattccaggacaagactgcccccaggctgcagaaatacctggtgctcaagtcatggtgggcaagtaactatgtgagtgactggtgggaagagtacatctaccttcgaggcaggagccctctcatggtgaacagcaactattatgtcatggaccttgtgctcatcaagaatacagacgtgcaggcagcccgcctgggaaacatcatccacgccatgatcatgtatcgccgtaaactggaccgtgaagaaatcaagcctgtgatggcactgggcatagtgcctatgtgctcctaccagatggagaggatgttcaacaccactcggatcccgggcaaggacacagatgtgctacagcacctctcagacagccggcacgtggctgtctaccacaagggacgcttcttcaagctgtggctctatgagggcgcccgtctgctcaagcctcaggatctggagatgcagttccagaggatcctggacgacccctccccacctcagcctggggaggagaagctggcagccctcactgcaggaggaagggtggagtgggcgcaggcacgccaggccttctttagctctggaaagaataaggctgccttggaggccatcgagcgtgccgctttcttcgtggccctggatgaggaatcctactcctatgaccccgaagatgaggccagcctcagcctctatggcaaggccctgctacatggcaactgctacaacaggtggtttgacaaatccttcactctcatttccttcaagaatggccagttgggtctcaatgcagagcatgcgtgggcagatgctcccatcattgggcacctctgggagtttgtcctgggcacagacagcttccacctgggctacacggagaccgggcactgcctgggcaaaccgaaccctgcgctcgcacctcctacacggctgcagtgggacattccaaaacagtgccaggcggtcatcgagagttcctaccaggtggccaaggcgttggcagacgacgtggagttgtactgcttccagttcctgccctttggcaaaggcctcatcaagaagtgccggaccagccctgatgcctttgtgcagatcgcgctgcagctggctcacttccgggacaggggtaagttctgcctgacctatgaggcctcaatgaccagaatgttccgggagggacggactgagactgtgcgttcctgtaccagcgagtccacagcctttgtgcaggccatgatggaggggtcccacacaaaagcagacctgcgagatctcttccagaaggctgctaagaagcaccagaatatgtaccgcctggccatgaccggggcagggatcgacaggcacctcttctgcctttacttggtctccaagtacctaggagtcagctctcctttccttgctgaggtgctctcggaaccctggcgtctctccaccagccagatcccccaatcccagatccgcatgttcgacccagagcagcaccccaatcacctgggcgctggaggtggctttggccctgtagcagatgatggctatggagtttcctacatgattgcaggcgagaacacgatcttcttccacatctccagcaagttctcaagctcagagacgaacgcccagcgctttggaaaccacatccgcaaagccctgctggacattgctgatcttttccaagttcccaaggcctacagctgaaggttggagaaatgccagctgccctttcgtccccacactgtggaggaagggacctgtggcagctcacaggcatgaggggtggccgtgcacaggtgcccaggctccaaggacagctccggcagcaggtcctcgctgggcagatgctgctccctgagggcccaggtggtggaggtggggttggagcaggaagggaattttgatttttttttttcttgatagatactaataaaaataaggctgtgtaattttctctcag

SEQ ID NO: 350179 - DNA, 3867 bp, Homo sapiens
ttgcactttagcctgggtgagagcaagactctgtctcaaaacaccaaacaaaaaaagaaaaaagaaatgattgccaaggccgggcacggtggctcacccctgtaatcccagcactttgggaggccgaggcaggcggatcacaaggtcaggagatcaagcacaatggctaacacggtgaaaccccatctctactaaaaatacaaaaaattagccaggcgtggcggcaggcgcctgtagtcccaccccatcaccaccctgatagcttcctgggtgcagagtcggccattgaaaactcaagagcttcgagagccagtgttgtcagcagccattgccacgaagatggcgcaatttcatggcatggagatgcctttcaccaaggagccccactggctgtttgggaccatggagcggtacctaaaacagatccaggacctgcccccaactggcctccctgagatgaacctgctggagatgtacagcctgaaggatgagatgggcaacctcaggaagttactagagtctaccccatcgccagtcgtcttctgccacaatgacatccaggaagggaacatcttgctgctctcagagccagaaaatgctgacagcctcatgctggtggacttcgagtacagcagttataactatagttgcattttattcgtcattacctggcagaggcaaagaaaggtgagaccctctcccaagaggagcagagtttcttctggggtctgtggtccatcctccaggcatccatgtccaccatagaatttggttacttggactatgcccagtctcggttccagttctacttccagcagaaggggcagctgaccagtgtccactcctcatcctgactccaccctcccactccttggatttctcctggagcctccagggcaggaccttggagggaggaacaacgagcagaaggccctggcgactgggctgagcccccaagtgaaactgaggttcaggagaccggcctgttcctgagtttgactctaaagccaccatcctcacgagactctggggccccccaggctcccagacctttgagcaaccttcaccgcacagaaacccagccgcgccctgcaattcccaccgcggaaggtgggtgggttctggttctcgccccacgtttttccccgaccccgatttgggagtaggtgtcaggttcctggtgagggcggggcgggggtggctaggcctgaaggacgtggggacacgggccagagtggctggccccacgcacggacaggagtgaacccgagctgtgccgaccaacccccaggatggcggaagctcaccaggccgtggccttccagttcacggtgaccccagacggggtcgacttccggctcagtcgggaggccctgaaacacgtctacctgtctgggatcaactcctggaagaaacgcctgatccgcatcaagaatggcatcctcaggggcgtgtaccctggcagccccaccagctggctggtcgtcatcatggcaacagtgggttcctccttctgcaacgtggacatctccttggggctggtcagttgcatccagagatgcctccctcaggggtgtggcccctaccagaccccgcagacccgggcacttctcagcatggccatcttctccacgggcgtctgggtgacgggcatcttcttcttccgccaaaccctgaagctgcttctctgctaccatgggtggatgtttgagatgcatggcaagaccagcaacttgaccaggatctgggctatgtgtatccgccttctatccagccggcaccctatgctctacagcttccagacatctctgcccaagcttcctgtgcccagggtgtcagccacaattcagcggtacctagagtctgtgcgccccttgttggatgatgaggaatattaccgcatggagttgctggccaaagaattccaggacaagactgcccccaggctgcagaaatacctggtgctcaagtcatggtgggcaagtaactatgtgagtgactggtgggaagagtacatctaccttcgaggcaggagccctctcatggtgaacagcaactattatgtcatggaccttgtgctcatcaagaatacagacgtgcaggcagcccgcctgggaaacatcatccacgccatgatcatgtatcgccgtaaactggaccgtgaagaaatcaagcctgtgatggcactgggcatagtgcctatgtgctcctaccagatggagaggatgttcaacaccactcggatcccgggcaaggacacagatgtgctacagcacctctcagacagccggcacgtggctgtctaccacaagggacgcttcttcaagctgtggctctatgagggcgcccgtctgctcaagcctcaggatctggagatgcagttccagaggatcctggacgacccctccccacctcagcctggggaggagaagctggcagccctcactgcaggaggaagggtggagtgggcgcaggcacgccaggccttctttagctctggaaagaataaggctgccttggaggccatcgagcgtgccgctttcttcgtggccctggatgaggaatcctactcctatgaccccgaagatgaggccagcctcagcctctatggcaaggccctgctacatggcaactgctacaacaggtggtttgacaaatccttcactctcatttccttcaagaatggccagttgggtctcaatgcagagcatgcgtgggcagatgctcccatcattgggcacctctgggagtttgtcctgggcacagacagcttccacctgggctacacggagaccgggcactgcctgggcaaaccgaaccctgcgctcgcacctcctacacggctgcagtgggacattccaaaacagtgccaggcggtcatcgagagttcctaccaggtggccaaggcgttggcagacgacgtggagttgtactgcttccagttcctgccctttggcaaaggcctcatcaagaagtgccggaccagccctgatgcctttgtgcagatcgcgctgcagctggctcacttccgggacaggggtaagttctgcctgacctatgaggcctcaatgaccagaatgttccgggagggacggactgagactgtgcgttcctgtaccagcgagtccacagcctttgtgcaggccatgatggaggggtcccacacaaaagcagacctgcgagatctcttccagaaggctgctaagaagcaccagaatatgtaccgcctggccatgaccggggcagggatcgacaggcacctcttctgcctttacttggtctccaagtacctaggagtcagctctcctttccttgctgaggtgctctcggaaccctggcgtctctccaccagccagatcccccaatcccagatccgcatgttcgacccagagcagcaccccaatcacctgggcgctggaggtggctttggccctgtagcagatgatggctatggagtttcctacatgattgcaggcgagaacacgatcttcttccacatctccagcaagttctcaagctcagagacgaacgcccagcgctttggaaaccacatccgcaaagccctgctggacattgctgatcttttccaagttcccaaggcctacagctgaaggttggagaaatgccagctgccctttcgtccccacactgtggaggaagggacctgtggcagctcacaggcatgaggggtggccgtgcacaggtgcccaggctccaaggacagctccggcagcaggtcctcgctgggcagatgctgctccctgagggcccaggtggtggaggtggggttggagcaggaagggaattttgatttttttttttcttgatagatactaataaaaataaggctgtgtaattttctctcag

SEQ ID NO: 350180 - DNA, 5570 bp, Homo sapiens
cccgggccggggcacggagagagccgagcgccgcagccgtgagccgaatagagccggagagacccgagtatgaccggagaagcccaggccggccggaagaggagccgagcgcggccggaaggaaccgagcccgtccgaagggagcggagcgcagcctggcctggggcccggtcgagcccgcgccatggcggccgaggcgacagctgtggccggaagcggggctgttggcggctgcctggccaaagacggcttgcagcagtctaagtgcccggacactaccccaaaacggcggcgcgcctcgtcgctgtcgcgtgacgccgagcgccgagcctaccaatggtgccgggagtacttgggcggggcctggcgccgagtgcagcccgaggagctgagggtttaccccgtgaggtgggaggtcaggggtcagcctctccggtgcgcggatcggggtcaggggtcagccgcggggccctcaggatgctccatgttttcgcccccctcttgcgcccgcgcctggggcggggcggggccggcctggccgggagggggccggggccgcggcaggtagggccggccgcgggctgagcgcgcctggtgtgggtctgcagcggaggcctcagcaacctgctcttccgctgctcgctcccggaccacctgcccagcgttggcgaggagccccgggaggtgcttctgcggctgtacggagccatcttgcaggtgagggggttgtgagcgccgcagcaccagtggctttagggcctgtcgcttacgcgatgcgggtagtattgttcccgttgcgcagttgaggacaccgaggttcacggtctgagtaacacctcattacaccgaagcctgggcctgtattcccagagctttgggaggctgaggcgagaggatcacttgagcacaggagttcgagaccagcctggacaacatagtgagacccccatctctaaataaaaatagaccaacgctaaagcctgtgctccagagcctccaggcaattggatcagaagtcgcagctctggtgggaggaaggcgagccctcatgtgtgtccctgtgccactttgccttggcccctttgctgtccatcctttttcagggcgtggactccctggtgctagaaagcgtgatgttcgccatacttgcggagcggtcgctggggccccagctgtacggagtcttcccagagggccggctggaacagtacatcccagtacgggcccagtcctaccctctcctccccaaggcacctccaccccctaaccctaccccagtgcccaatgtctgcctccacatccctcaccccaagtagggaatttcccccaaaaccctgacttcccctcattgccccagcccttcccactcctgccccagccccatcaccaccctgatagcttcctgggtgcagagtcggccattgaaaactcaagagcttcgagagccagtgttgtcagcagccattgccacgaagatggcgcaatttcatggcatggagatgcctttcaccaaggagccccactggctgtttgggaccatggagcggtgagtcaggagcctcctcagggctcctgtactcctgagctgaacctccatgccagcggatgtgtcgggggctctatccagccctccacttgagtggatctgatgtcatgggtgacagagcaagactccatttcaaaagaaaaaaagaaatgattgccggacaagtcacacagtgataggagcaggggtgcagtagtctggcctgaggggtagataggcgaggggtgggaaagaatagcagagccagtgtatcctattctttgggcttcaggtacctaaaacagatccaggacctgcccccaactggcctccctgagatgaacctgctggagatgtacagcctgaaggatgagatgggcaacctcaggaagttactagagtctaccccatcgccagtcgtcttctgccacaatgacatccaggaaggtaggagaaggcatctgagtctcctaacccaagatggaagagccagagggctctggagtgagcagaacctcaccccattcccccagggaacatcttgctgctctcagagccagaaaatgctgacagcctcatgctggtggacttcgagtacagcagttataactataggggctttgacattgggaaccatttttgtgagtgggtttatgattatactcacgaggaatggcctttctacaaagcaaggcccacagactaccccactcaagaacagcagttgcattttattcgtcattacctggcagaggcaaagaaaggtgagaccctctcccaagaggagcagagaaaactggaagaagatttgctggtagaagtcagtcggtatgctctggcatcccatttcttctggggtctgtggtccatcctccaggcatccatgtccaccatagaatttggttacttggactatgcccagtctcggttccagttctacttccagcagaaggggcagctgaccagtgtccactcctcatcctgactccaccctcccactccttggatttctcctggagcctccagggcaggaccttggagggaggaacaacgagcagaaggccctggcgactgggctgagcccccaagtgaaactgaggttcaggagaccggcctgttcctgagtttgactctaaagccaccatcctcacgagactctggggccccccaggctcccagacctttgagcaaccttcaccgcacagaaacccagccgcgccctgcaattcccaccgcggaaggtgggtgggttctggttctcgccccacgtttttccccgaccccgatttgggagtaggtgtcaggttcctggtgagggcggggcgggggtggctaggcctgaaggacgtggggacacgggccagagtggctggccccacgcacggacaggagtgaacccgagctgtgccgaccaacccccaggatggcggaagctcaccaggccgtggccttccagttcacggtgaccccagacggggtcgacttccggctcagtcgggaggccctgaaacacgtctacctgtctgggatcaactcctggaagaaacgcctgatccgcatcaagaatggcatcctcaggggcgtgtaccctggcagccccaccagctggctggtcgtcatcatggcaacagtgggttcctccttctgcaacgtggacatctccttggggctggtcagttgcatccagagatgcctccctcaggggtgtggcccctaccagaccccgcagacccgggcacttctcagcatggccatcttctccacgggcgtctgggtgacgggcatcttcttcttccgccaaaccctgaagctgcttctctgctaccatgggtggatgtttgagatgcatggcaagaccagcaacttgaccaggatctgggctatgtgtatccgccttctatccagccggcaccctatgctctacagcttccagacatctctgcccaagcttcctgtgcccagggtgtcagccacaattcagcggtacctagagtctgtgcgccccttgttggatgatgaggaatattaccgcatggagttgctggccaaagaattccaggacaagactgcccccaggctgcagaaatacctggtgctcaagtcatggtgggcaagtaactatgtgagtgactggtgggaagagtacatctaccttcgaggcaggagccctctcatggtgaacagcaactattatgtcatggaccttgtgctcatcaagaatacagacgtgcaggcagcccgcctgggaaacatcatccacgccatgatcatgtatcgccgtaaactggaccgtgaagaaatcaagcctgtgatggcactgggcatagtgcctatgtgctcctaccagatggagaggatgttcaacaccactcggatcccgggcaaggacacagatgtgctacagcacctctcagacagccggcacgtggctgtctaccacaagggacgcttcttcaagctgtggctctatgagggcgcccgtctgctcaagcctcaggatctggagatgcagttccagaggatcctggacgacccctccccacctcagcctggggaggagaagctggcagccctcactgcaggaggaagggtggagtgggcgcaggcacgccaggccttctttagctctggaaagaataaggctgccttggaggccatcgagcgtgccgctttcttcgtggccctggatgaggaatcctactcctatgaccccgaagatgaggccagcctcagcctctatggcaaggccctgctacatggcaactgctacaacaggtggtttgacaaatccttcactctcatttccttcaagaatggccagttgggtctcaatgcagagcatgcgtgggcagatgctcccatcattgggcacctctgggagtttgtcctgggcacagacagcttccacctgggctacacggagaccgggcactgcctgggcaaaccgaaccctgcgctcgcacctcctacacggctgcagtgggacattccaaaacagtgccaggcggtcatcgagagttcctaccaggtggccaaggcgttggcagacgacgtggagttgtactgcttccagttcctgccctttggcaaaggcctcatcaagaagtgccggaccagccctgatgcctttgtgcagatcgcgctgcagctggctcacttccgggtaggagccccgcctcccgctgctgagagggcagggtggtaccagggtccacctgccagattcacccctctgtatatcccaggacaggggtaagttctgcctgacctatgaggcctcaatgaccagaatgttccgggagggacggactgagactgtgcgttcctgtaccagcgagtccacagcctttgtgcaggccatgatggaggggtcccacacaaaagcagacctgcgagatctcttccagaaggctgctaagaagcaccagaatatgtaccgcctggccatgaccggggcagggatcgacaggcacctcttctgcctttacttggtctccaagtacctaggagtcagctctcctttccttgctgaggtgctctcggaaccctggcgtctctccaccagccagatcccccaatcccagatccgcatgttcgacccagagcagcaccccaatcacctgggcgctggaggtggctttggccctgtagcagatgatggctatggagtttcctacatgattgcaggcgagaacacgatcttcttccacatctccagcaagttctcaagctcagagacgaacgcccagcgctttggaaaccacatccgcaaagccctgctggacattgctgatcttttccaagttcccaaggcctacagctgaagcccttaggtacctgtgttttgtttgggaactcggaggccctccccctcccccagctcagaccacagaggtggcaagagaagggctgaagctggaagactgttcatgagggacttgtgtgacctgctttgaaatgtgtgactctgctgagtgacgtaggctctgagatagctgtccacgcccacgtgtttgcttggaataaatacttgcctcagaacctt

SEQ ID NO: 350181 - DNA, 5742 bp, Homo sapiens
cccgggccggggcacggagagagccgagcgccgcagccgtgagccgaatagagccggagagacccgagtatgaccggagaagcccaggccggccggaagaggagccgagcgcggccggaaggaaccgagcccgtccgaagggagcggagcgcagcctggcctggggcccggtcgagcccgcgccatggcggccgaggcgacagctgtggccggaagcggggctgttggcggctgcctggccaaagacggcttgcagcagtctaagtgcccggacactaccccaaaacggcggcgcgcctcgtcgctgtcgcgtgacgccgagcgccgagcctaccaatggtgccgggagtacttgggcggggcctggcgccgagtgcagcccgaggagctgagggtttaccccgtgaggtgggaggtcaggggtcagcctctccggtgcgcggatcggggtcaggggtcagccgcggggccctcaggatgctccatgttttcgcccccctcttgcgcccgcgcctggggcggggcggggccggcctggccgggagggggccggggccgcggcaggtagggccggccgcgggctgagcgcgcctggtgtgggtctgcagcggaggcctcagcaacctgctcttccgctgctcgctcccggaccacctgcccagcgttggcgaggagccccgggaggtgcttctgcggctgtacggagccatcttgcaggtgagggggttgtgagcgccgcagcaccagtggctttagggcctgtcgcttacgcgatgcgggtagtattgttcccgttgcgcagttgaggacaccgaggttcacggtctgagtaacacctcattacaccgaagcctgggcctgtattcccagagctttgggaggctgaggcgagaggatcacttgagcacaggagttcgagaccagcctggacaacatagtgagacccccatctctaaataaaaatagaccaacgctaaagcctgtgctccagagcctccaggcaattggatcagaagtcgcagctctggtgggaggaaggcgagccctcatgtgtgtccctgtgccactttgccttggcccctttgctgtccatcctttttcagggcgtggactccctggtgctagaaagcgtgatgttcgccatacttgcggagcggtcgctggggccccagctgtacggagtcttcccagagggccggctggaacagtacatcccagtacgggcccagtcctaccctctcctccccaaggcacctccaccccctaaccctaccccagtgcccaatgtctgcctccacatccctcaccccaagtagggaatttcccccaaaaccctgacttcccctcattgccccagcccttcccactcctgccccagccccatcaccaccctgatagcttcctgggtgcagagtcggccattgaaaactcaagagcttcgagagccagtgttgtcagcagccattgccacgaagatggcgcaatttcatggcatggagatgcctttcaccaaggagccccactggctgtttgggaccatggagcggtgagtcaggagcctcctcagggctcctgtactcctgagctgaacctccatgccagcggatgtgtcgggggctctatccagccctccacttgagtggatctgatgtcatgggtgacagagcaagactccatttcaaaagaaaaaaagaaatgattgccggacaagtcacacagtgataggagcaggggtgcagtagtctggcctgaggggtagataggcgaggggtgggaaagaatagcagagccagtgtatcctattctttgggcttcaggtacctaaaacagatccaggacctgcccccaactggcctccctgagatgaacctgctggagatgtacagcctgaaggatgagatgggcaacctcaggaagttactagagtctaccccatcgccagtcgtcttctgccacaatgacatccaggaaggtaggagaaggcatctgagtctcctaacccaagatggaagagccagagggctctggagtgagcagaacctcaccccattcccccagggaacatcttgctgctctcagagccagaaaatgctgacagcctcatgctggtggacttcgagtacagcagttataactataggggctttgacattgggaaccatttttgtgagtgggtttatgattatactcacgaggaatggcctttctacaaagcaaggcccacagactaccccactcaagaacagcagttgcattttattcgtcattacctggcagaggcaaagaaaggtgagaccctctcccaagaggagcagagaaaactggaagaagatttgctggtagaagtcagtcggtatgctctggcatcccatttcttctggggtctgtggtccatcctccaggcatccatgtccaccatagaatttggttacttggactatgcccagtctcggttccagttctacttccagcagaaggggcagctgaccagtgtccactcctcatcctgactccaccctcccactccttggatttctcctggagcctccagggcaggaccttggagggaggaacaacgagcagaaggccctggcgactgggctgagcccccaagtgaaactgaggttcaggagaccggcctgttcctgagtttgactctaaagccaccatcctcacgagactctggggccccccaggctcccagacctttgagcaaccttcaccgcacagaaacccagccgcgccctgcaattcccaccgcggaaggtgggtgggttctggttctcgccccacgtttttccccgaccccgatttgggagtaggtgtcaggttcctggtgagggcggggcgggggtggctaggcctgaaggacgtggggacacgggccagagtggctggccccacgcacggacaggagtgaacccgagctgtgccgaccaacccccaggatggcggaagctcaccaggccgtggccttccagttcacggtgaccccagacggggtcgacttccggctcagtcgggaggccctgaaacacgtctacctgtctgggatcaactcctggaagaaacgcctgatccgcatcaagaatggcatcctcaggggcgtgtaccctggcagccccaccagctggctggtcgtcatcatggcaacagtgggttcctccttctgcaacgtggacatctccttggggctggtcagttgcatccagagatgcctccctcaggggtgtggcccctaccagaccccgcagacccgggcacttctcagcatggccatcttctccacgggcgtctgggtgacgggcatcttcttcttccgccaaaccctgaagctgcttctctgctaccatgggtggatgtttgagatgcatggcaagaccagcaacttgaccaggatctgggctatgtgtatccgccttctatccagccggcaccctatgctctacagcttccagacatctctgcccaagcttcctgtgcccagggtgtcagccacaattcagcggtacctagagtctgtgcgccccttgttggatgatgaggaatattaccgcatggagttgctggccaaagaattccaggacaagactgcccccaggctgcagaaatacctggtgctcaagtcatggtgggcaagtaactatgtgagtgactggtgggaagagtacatctaccttcgaggcaggagccctctcatggtgaacagcaactattatgtcatggaccttgtgctcatcaagaatacagacgtgcaggcagcccgcctgggaaacatcatccacgccatgatcatgtatcgccgtaaactggaccgtgaagaaatcaagcctgtgatggcactgggcatagtgcctatgtgctcctaccagatggagaggatgttcaacaccactcggatcccgggcaaggacacagatgtgctacagcacctctcagacagccggcacgtggctgtctaccacaagggacgcttcttcaagctgtggctctatgagggcgcccgtctgctcaagcctcaggatctggagatgcagttccagaggatcctggacgacccctccccacctcagcctggggaggagaagctggcagccctcactgcaggaggaagggtggagtgggcgcaggcacgccaggccttctttagctctggaaagaataaggctgccttggaggccatcgagcgtgccgctttcttcgtggccctggatgaggaatcctactcctatgaccccgaagatgaggccagcctcagcctctatggcaaggccctgctacatggcaactgctacaacaggtggtttgacaaatccttcactctcatttccttcaagaatggccagttgggtctcaatgcagagcatgcgtgggcagatgctcccatcattgggcacctctgggagtttgtcctgggcacagacagcttccacctgggctacacggagaccgggcactgcctgggcaaaccgaaccctgcgctcgcacctcctacacggctgcagtgggacattccaaaacagtgccaggcggtcatcgagagttcctaccaggtggccaaggcgttggcagacgacgtggagttgtactgcttccagttcctgccctttggcaaaggcctcatcaagaagtgccggaccagccctgatgcctttgtgcagatcgcgctgcagctggctcacttccgggacaggggtaagttctgcctgacctatgaggcctcaatgaccagaatgttccgggagggacggactgagactgtgcgttcctgtaccagcgagtccacagcctttgtgcaggccatgatggaggggtcccacacaaaagcagacctgcgagatctcttccagaaggctgctaagaagcaccagaatatgtaccgcctggccatgaccggggcagggatcgacaggcacctcttctgcctttacttggtctccaagtacctaggagtcagctctcctttccttgctgaggtgctctcggaaccctggcgtctctccaccagccagatcccccaatcccagatccgcatgttcgacccagagcagcaccccaatcacctgggcgctggaggtggctttggccctgtagcagatgatggctatggagtttcctacatgattgcaggcgagaacacgatcttcttccacatctccagcaagttctcaagctcagagacgaacgcccagcgctttggaaaccacatccgcaaagccctgctggacattgctgatcttttccaagttcccaaggcctacagctgaaggttggagaaatgccagctgccctttcgtccccacactgtggaggaagggacctgtggcagctcacaggcatgaggggtggccgtgcacaggtgcccaggctccaaggacagctccggcagcaggtcctcgctgggcagatgctgctccctgagggcccaggtggtggaggtggggttggagcaggaagggaattttgatttttttttttcttgatagatactaataaaaataaggctgtgtaattttctctcagcccttaggtacctgtgttttgtttgggaactcggaggccctccccctcccccagctcagaccacagaggtggcaagagaagggctgaagctggaagactgttcatgagggacttgtgtgacctgctttgaaatgtgtgactctgctgagtgacgtaggctctgagatagctgtccacgcccacgtgtttgcttggaataaatacttgcctcagaacctt

SEQ ID NO: 350182 - DNA, 5113 bp, Homo sapiens
cccgggccggggcacggagagagccgagcgccgcagccgtgagccgaatagagccggagagacccgagtatgaccggagaagcccaggccggccggaagaggagccgagcgcggccggaaggaaccgagcccgtccgaagggagcggagcgcagcctggcctggggcccggtcgagcccgcgccatggcggccgaggcgacagctgtggccggaagcggggctgttggcggctgcctggccaaagacggcttgcagcagtctaagtgcccggacactaccccaaaacggcggcgcgcctcgtcgctgtcgcgtgacgccgagcgccgagcctaccaatggtgccgggagtacttgggcggggcctggcgccgagtgcagcccgaggagctgagggtttaccccgtgaggtgggaggtcaggggtcagcctctccggtgcgcggatcggggtcaggggtcagccgcggggccctcaggatgctccatgttttcgcccccctcttgcgcccgcgcctggggcggggcggggccggcctggccgggagggggccggggccgcggcaggtagggccggccgcgggctgagcgcgcctggtgtgggtctgcagcggaggcctcagcaacctgctcttccgctgctcgctcccggaccacctgcccagcgttggcgaggagccccgggaggtgcttctgcggctgtacggagccatcttgcaggtgagggggttgtgagcgccgcagcaccagtggctttagggcctgtcgcttacgcgatgcgggtagtattgttcccgttgcgcagttgaggacaccgaggttcacggtctgagtaacacctcattacaccgaagcctgggcctgtattcccagagctttgggaggctgaggcgagaggatcacttgagcacaggagttcgagaccagcctggacaacatagtgagacccccatctctaaataaaaatagaccaacgctaaagcctgtgctccagagcctccaggcaattggatcagaagtcgcagctctggtgggaggaaggcgagccctcatgtgtgtccctgtgccactttgccttggcccctttgctgtccatcctttttcagggcgtggactccctggtgctagaaagcgtgatgttcgccatacttgcggagcggtcgctggggccccagctgtacggagtcttcccagagggccggctggaacagtacatcccagtacgggcccagtcctaccctctcctccccaaggcacctccaccccctaaccctaccccagtgcccaatgtctgcctccacatccctcaccccaagtagggaatttcccccaaaaccctgacttcccctcattgccccagcccttcccactcctgccccagccccatcaccaccctgatagcttcctgggtgcagagtcggccattgaaaactcaagagcttcgagagccagtgttgtcagcagccattgccacgaagatggcgcaatttcatggcatggagatgcctttcaccaaggagccccactggctgtttgggaccatggagcggtgagtcaggagcctcctcagggctcctgtactcctgagctgaacctccatgccagcggatgtgtcgggggctctatccagccctccacttgagtggatctgatgtcatgggtgacagagcaagactccatttcaaaagaaaaaaagaaatgattgccggacaagtcacacagtgataggagcaggggtgcagtagtctggcctgaggggtagataggcgaggggtgggaaagaatagcagagccagtgtatcctattctttgggcttcaggtacctaaaacagatccaggacctgcccccaactggcctccctgagatgaacctgctggagatgtacagcctgaaggatgagatgggcaacctcaggaagttactagagtctaccccatcgccagtcgtcttctgccacaatgacatccaggaaggtaggagaaggcatctgagtctcctaacccaagatggaagagccagagggctctggagtgagcagaacctcaccccattcccccagggaacatcttgctgctctcagagccagaaaatgctgacagcctcatgctggtggacttcgagtacagcagttataactataggggctttgacattgggaaccatttttgtgagtgggtttatgattatactcacgaggaatggcctttctacaaagcaaggcccacagactaccccactcaagaacagcagttgcattttattcgtcattacctggcagaggcaaagaaaggtgagaccctctcccaagaggagcagagaaaactggaagaagatttgctggtagaagtcagtcggtatgctctggcatcccatttcttctggggtctgtggtccatcctccaggcatccatgtccaccatagaatttggttacttggactatgcccagtctcggttccagttctacttccagcagaaggggcagctgaccagtgtccactcctcatcctgactccaccctcccactccttggatttctcctggagcctccagggcaggaccttggagggaggaacaacgagcagaaggccctggcgactgggctgagcccccaagtgaaactgaggttcaggagaccggcctgttcctgagtttgactctaaagccaccatcctcacgagactctggggccccccaggctcccagacctttgagcaaccttcaccgcacagaaacccagccgcgccctgcaattcccaccgcggaaggtgggtgggttctggttctcgccccacgtttttccccgaccccgatttgggagtaggtgtcaggttcctggtgagggcggggcgggggtggctaggcctgaaggacgtggggacacgggccagagtggctggccccacgcacggacaggagtgaacccgagctgtgccgaccaacccccaggatggcggaagctcaccaggccgtggccttccagttcacggtgaccccagacggggtcgacttccggctcagtcgggaggccctgaaacacgtctacctgtctgggatcaactcctggaagaaacgcctgatccgcatcaagaatggcatcctcaggggcgtgtaccctggcagccccaccagctggctggtcgtcatcatggcaacagtgggttcctccttctgcaacgtggacatctccttggggctggtcagttgcatccagagatgcctccctcaggggtgtggcccctaccagaccccgcagacccgggcacttctcagcatggccatcttctccacgggcgtctgggtgacgggcatcttcttcttccgccaaaccctgaagctgcttctctgctaccatgggtggatgtttgagatgcatggcaagaccagcaacttgaccaggatctgggctatgtgtatccgccttctatccagccggcaccctatgctctacagcttccagacatctctgcccaagcttcctgtgcccagggtgtcagccacaattcagcggtacctagagtctgtgcgccccttgttggatgatgaggaatattaccgcatggagttgctggccaaagaattccaggacaagactgcccccaggctgcagaaatacctggtgctcaagtcatggtgggcaagtaactatgtgagtgactggtgggaagagtacatctaccttcgaggcaggagccctctcatggtgaacagcaactattatgtcatggaccttgtgctcatcaagaatacagacgtgcaggcagcccgcctgggaaacatcatccacgccatgatcatgtatcgccgtaaactggaccgtgaagaaatcaagcctgtgatggcactgggcatagtgcctatgtgctcctaccagatggagaggatgttcaacaccactcggatcccgggcaaggacacagatgtgctacagcacctctcagacagccggcacgtggctgtctaccacaagggacgcttcttcaagctgtggctctatgagggcgcccgtctgctcaagcctcaggatctggagatgcagttccagaggatcctggacgacccctccccacctcagcctggggaggagaagctggcagccctcactgcaggaggaagggtggagtgggcgcaggcacgccaggccttctttagctctggaaagaataaggctgccttggaggccatcgagcgtgccgctttcttcgtggccctggatgaggaatcctactcctatgaccccgaagatgaggccagcctcagcctctatggcaaggccctgctacatggcaactgctacaacaggtggtttgacaaatccttcactctcatttccttcaagaatggccagttgggtctcaatgcagagcatgcgtgggcagatgctcccatcattgggcacctctgggagtttgtcctgggcacagacagcttccacctgggctacacggagaccgggcactgcctgggcaaaccgaaccctgcgctcgcacctcctacacggctgcagtgggacattccaaaacagtgccaggcggtcatcgagagttcctaccaggtggccaaggcgttggcagacgacgtggagttgtactgcttccagttcctgccctttggcaaaggcctcatcaagaagtgccggaccagccctgatgcctttgtgcagatcgcgctgcagctggctcacttccgggacaggggtaagttctgcctgacctatgaggcctcaatgaccagaatgttccgggagggacggactgagactgtgcgttcctgtaccagcgagtccacagcctttgtgcaggccatgatggaggggtcccacacaaaagcagacctgcgagatctcttccagaaggctgctaagaagcaccagaatatgtaccgcctggccatgaccggggcagggatcgacaggcacctcttctgcctttacttggtctccaagtacctaggagtcagctctcctttccttgctgaggtgctctcggaaccctggcgtctctccaccagccagatcccccaatcccagatccgcatgttcgacccagagcagcaccccaatcacctgggcgctggaggtggctttggccctgtgagtgctcctgaagggggtgg

SEQ ID NO: 350183 - DNA, 2734 bp, Homo sapiens
cccgggccggggcacggagagagccgagcgccgcagccgtgagccgaatagagccggagagacccgagtatgaccggagaagcccaggccggccggaagaggagccgagcgcggccggaaggaaccgagcccgtccgaagggagcggagcgcagcctggcctggggcccggtcgagcccgcgccatggcggccgaggcgacagctgtggccggaagcggggctgttggcggctgcctggccaaagacggcttgcagcagtctaagtgcccggacactaccccaaaacggcggcgcgcctcgtcgctgtcgcgtgacgccgagcgccgagcctaccaatggtgccgggagtacttgggcggggcctggcgccgagtgcagcccgaggagctgagggtttaccccgtgaggtgggaggtcaggggtcagcctctccggtgcgcggatcggggtcaggggtcagccgcggggccctcaggatgctccatgttttcgcccccctcttgcgcccgcgcctggggcggggcggggccggcctggccgggagggggccggggccgcggcaggtagggccggccgcgggctgagcgcgcctggtgtgggtctgcagcggaggcctcagcaacctgctcttccgctgctcgctcccggaccacctgcccagcgttggcgaggagccccgggaggtgcttctgcggctgtacggagccatcttgcaggtgagggggttgtgagcgccgcagcaccagtggctttagggcctgtcgcttacgcgatgcgggtagtattgttcccgttgcgcagttgaggacaccgaggttcacggtctgagtaacacctcattacaccgaagcctgggcctgtattcccagagctttgggaggctgaggcgagaggatcacttgagcacaggagttcgagaccagcctggacaacatagtgagacccccatctctaaataaaaatagaccaacgctaaagcctgtgctccagagcctccaggcaattggatcagaagtcgcagctctggtgggaggaaggcgagccctcatgtgtgtccctgtgccactttgccttggcccctttgctgtccatcctttttcagggcgtggactccctggtgctagaaagcgtgatgttcgccatacttgcggagcggtcgctggggccccagctgtacggagtcttcccagagggccggctggaacagtacatcccagtacgggcccagtcctaccctctcctccccaaggcacctccaccccctaaccctaccccagtgcccaatgtctgcctccacatccctcaccccaagtagggaatttcccccaaaaccctgacttcccctcattgccccagcccttcccactcctgccccagccccatcaccaccctgatagcttcctgggtgcagagtcggccattgaaaactcaagagcttcgagagccagtgttgtcagcagccattgccacgaagatggcgcaatttcatggcatggagatgcctttcaccaaggagccccactggctgtttgggaccatggagcggtgagtcaggagcctcctcagggctcctgtactcctgagctgaacctccatgccagcggatgtgtcgggggctctatccagccctccacttgagtggatctgatgtcatgggtgacagagcaagactccatttcaaaagaaaaaaagaaatgattgccggacaagtcacacagtgataggagcaggggtgcagtagtctggcctgaggggtagataggcgaggggtgggaaagaatagcagagccagtgtatcctattctttgggcttcaggtacctaaaacagatccaggacctgcccccaactggcctccctgagatgaacctgctggagatgtacagcctgaaggatgagatgggcaacctcaggaagttactagagtctaccccatcgccagtcgtcttctgccacaatgacatccaggaaggtaggagaaggcatctgagtctcctaacccaagatggaagagccagagggctctggagtgagcagaacctcaccccattcccccagggaacatcttgctgctctcagagccagaaaatgctgacagcctcatgctggtggacttcgagtacagcagttataactataggggctttgacattgggaaccatttttgtgagtgggtttatgattatactcacgaggaatggcctttctacaaagcaaggcccacagactaccccactcaagaacagcagttgcattttattcgtcattacctggcagaggcaaagaaaggtgagaccctctcccaagaggagcagagaaaactggaagaagatttgctggtagaagtcagtcggtatgctctggcatcccatttcttctggggtctgtggtccatcctccaggcatccatgtccaccatagaatttggttacttggactatgcccagtctcggttccagttctacttccagcagaaggggcagctgaccagtgtccactcctcatcctgactccaccctcccactccttggatttctcctggagcctccagggcaggaccttggagggaggaacaacgagcagaaggccctggcgactgggctgagcccccaagtgaaactgaggttcaggagaccggcctgttcctgagtttgagtaggtccccatggctggcaggccagagccccgtgctgtgtatgtaacacaataaacaagcttcttcttcccaccctgt

SEQ ID NO: 350184 - DNA, 4005 bp, Homo sapiens
cccgggccggggcacggagagagccgagcgccgcagccgtgagccgaatagagccggagagacccgagtatgaccggagaagcccaggccggccggaagaggagccgagcgcggccggaaggaaccgagcccgtccgaagggagcggagcgcagcctggcctggggcccggtcgagcccgcgccatggcggccgaggcgacagctgtggccggaagcggggctgttggcggctgcctggccaaagacggcttgcagcagtctaagtgcccggacactaccccaaaacggcggcgcgcctcgtcgctgtcgcgtgacgccgagcgccgagcctaccaatggtgccgggagtacttgggcggggcctggcgccgagtgcagcccgaggagctgagggtttaccccgtgaggtgggaggtcaggggtcagcctctccggtgcgcggatcggggtcaggggtcagccgcggggccctcaggatgctccatgttttcgcccccctcttgcgcccgcgcctggggcggggcggggccggcctggccgggagggggccggggccgcggcaggtagggccggccgcgggctgagcgcgcctggtgtgggtctgcagcggaggcctcagcaacctgctcttccgctgctcgctcccggaccacctgcccagcgttggcgaggagccccgggaggtgcttctgcggctgtacggagccatcttgcaggtgagggggttgtgagcgccgcagcaccagtggctttagggcctgtcgcttacgcgatgcgggtagtattgttcccgttgcgcagttgaggacaccgaggttcacggtctgagtaacacctcattacaccgaagcctgggcctgtattcccagagctttgggaggctgaggcgagaggatcacttgagcacaggagttcgagaccagcctggacaacatagtgagacccccatctctaaataaaaatagaccaacgctaaagcctgtgctccagagcctccaggcaattggatcagaagtcgcagctctggtgggaggaaggcgagccctcatgtgtgtccctgtgccactttgccttggcccctttgctgtccatcctttttcagggcgtggactccctggtgctagaaagcgtgatgttcgccatacttgcggagcggtcgctggggccccagctgtacggagtcttcccagagggccggctggaacagtacatcccagtacgggcccagtcctaccctctcctccccaaggcacctccaccccctaaccctaccccagtgcccaatgtctgcctccacatccctcaccccaagtagggaatttcccccaaaaccctgacttcccctcattgccccagcccttcccactcctgccccagccccatcaccaccctgatagcttcctgggtgcagagtcggccattgaaaactcaagagcttcgagagccagtgttgtcagcagccattgccacgaagatggcgcaatttcatggcatggagatgcctttcaccaaggagccccactggctgtttgggaccatggagcggtgagtcaggagcctcctcagggctcctgtactcctgagctgaacctccatgccagcggatgtgtcgggggctctatccagccctccacttgagtggatctgatgtcatgggtgacagagcaagactccatttcaaaagaaaaaaagaaatgattgccggacaagtcacacagtgataggagcaggggtgcagtagtctggcctgaggggtagataggcgaggggtgggaaagaatagcagagccagtgtatcctattctttgggcttcaggtacctaaaacagatccaggacctgcccccaactggcctccctgagatgaacctgctggagatgtacagcctgaaggatgagatgggcaacctcaggaagttactagagtctaccccatcgccagtcgtcttctgccacaatgacatccaggaaggtaggagaaggcatctgagtctcctaacccaagatggaagagccagagggctctggagtgagcagaacctcaccccattcccccagggaacatcttgctgctctcagagccagaaaatgctgacagcctcatgctggtggacttcgagtacagcagttataactataggggctttgacattgggaaccatttttgtgagtgggtttatgattatactcacgaggaatggcctttctacaaagcaaggcccacagactaccccactcaagaacagcagttgcattttattcgtcattacctggcagaggcaaagaaaggtgagaccctctcccaagaggagcagagaaaactggaagaagatttgctggtagaagtcagtcggtatgctctggcatcccatttcttctggggtctgtggtccatcctccaggcatccatgtccaccatagaatttggttacttggactatgcccagtctcggttccagttctacttccagcagaaggggcagctgaccagtgtccactcctcatcctgactccaccctcccactccttggatttctcctggagcctccagggcaggaccttggagggaggaacaacgagcagaaggccctggcgactgggctgagcccccaagtgaaactgaggttcaggagaccggcctgttcctgagtttgactctaaagccaccatcctcacgagactctggggccccccaggctcccagacctttgagcaaccttcaccgcacagaaacccagccgcgccctgcaattcccaccgcggaaggtgggtgggttctggttctcgccccacgtttttccccgaccccgatttgggagtaggtgtcaggttcctggtgagggcggggcgggggtggctaggcctgaaggacgtggggacacgggccagagtggctggccccacgcacggacaggagtgaacccgagctgtgccgaccaacccccaggatggcggaagctcaccaggccgtggccttccagttcacggtgaccccagacggggtcgacttccggctcagtcgggaggccctgaaacacgtctacctgtctgggatcaactcctggaagaaacgcctgatccgcatcaagaatggcatcctcaggggcgtgtaccctggcagccccaccagctggctggtcgtcatcatggcaacagtgggttcctccttctgcaacgtggacatctccttggggctggtcagttgcatccagagatgcctccctcaggggtgtggcccctaccagaccccgcagacccgggcacttctcagcatggccatcttctccacgggcgtctgggtgacgggcatcttcttcttccgccaaaccctgaagctgcttctctgctaccatgggtggatgtttgagatgcatggcaagaccagcaacttgaccaggatctgggctatgtgtatccgccttctatccagccggcaccctatgctctacagcttccagacatctctgcccaagcttcctgtgcccagggtgtcagccacaattcagcggtacctagagtctgtgcgccccttgttggatgatgaggaatattaccgcatggagttgctggccaaagaattccaggacaagactgcccccaggctgcagaaatacctggtgctcaagtcatggtgggcaagtaactatgtgagtgactggtgggaagagtacatctaccttcgaggcaggagccctctcatggtgaacagcaactattatgtcatggaccttgtgctcatcaagaatacagacgtgcaggcagcccgcctgggaaacatcatccacgccatgatcatgtatcgccgtaaactggaccgtgaagaaatcaagcctgtgatggcactgggcatagtgcctatgtgctcctaccagatggagaggatgttcaacaccactcggatcccgggcaaggacacaggattgttggtgttgcgtgagagagagtggaagcacccagcacagggcctggtttaggacacacggatcccatccagggggcaggaag

SEQ ID NO: 350185 - DNA, 1864 bp, Homo sapiens
cccgggccggggcacggagagagccgagcgccgcagccgtgagccgaatagagccggagagacccgagtatgaccggagaagcccaggccggccggaagaggagccgagcgcggccggaaggaaccgagcccgtccgaagggagcggagcgcagcctggcctggggcccggtcgagcccgcgccatggcggccgaggcgacagctgtggccggaagcggggctgttggcggctgcctggccaaagacggcttgcagcagtctaagtgcccggacactaccccaaaacggcggcgcgcctcgtcgctgtcgcgtgacgccgagcgccgagcctaccaatggtgccgggagtacttgggcggggcctggcgccgagtgcagcccgaggagctgagggtttaccccgtgaggtgggaggtcaggggtcagcctctccggtgcgcggatcggggtcaggggtcagccgcggggccctcaggatgctccatgttttcgcccccctcttgcgcccgcgcctggggcggggcggggccggcctggccgggagggggccggggccgcggcaggtagggccggccgcgggctgagcgcgcctggtgtgggtctgcagcggaggcctcagcaacctgctcttccgctgctcgctcccggaccacctgcccagcgttggcgaggagccccgggaggtgcttctgcggctgtacggagccatcttgcaggtgagggggttgtgagcgccgcagcaccagtggctttagggcctgtcgcttacgcgatgcgggtagtattgttcccgttgcgcagttgaggacaccgaggttcacggtctgagtaacacctcattacaccgaagcctgggcctgtattcccagagctttgggaggctgaggcgagaggatcacttgagcacaggagttcgagaccagcctggacaacatagtgagacccccatctctaaataaaaatagaccaacgctaaagcctgtgctccagagcctccaggcaattggatcagaagtcgcagctctggtgggaggaaggcgagccctcatgtgtgtccctgtgccactttgccttggcccctttgctgtccatcctttttcagggcgtggactccctggtgctagaaagcgtgatgttcgccatacttgcggagcggtcgctggggccccagctgtacggagtcttcccagagggccggctggaacagtacatcccagtacgggcccagtcctaccctctcctccccaaggcacctccaccccctaaccctaccccagtgcccaatgtctgcctccacatccctcaccccaagtagggaatttcccccaaaaccctgacttcccctcattgccccagcccttcccactcctgccccagccccatcaccaccctgatagcttcctgggtgcagagtcggccattgaaaactcaagagcttcgagagccagtgttgtcagcagccattgccacgaagatggcgcaatttcatggcatggagatgcctttcaccaaggagccccactggctgtttgggaccatggagcggtgagtcaggagcctcctcagggctcctgtactcctgagctgaacctccatgccagcggatgtgtcgggggctctatccagccctccacttgagtggatctgatgtcatgggctgtcacagaacaggcttttaaatgcttgccagaggccacatgcagtgcctcatgcctgtaatcccagaactttgggagccgaggtgggtgaggtgggaggatcacttgagcccaggaggcggaggttgcagtgagctgagctcatgccattgcacttcagcctgggtgagagcaagactctgtctcaaaacaccaaacaaaaaaa

SEQ ID NO: 350186 - DNA, 3008 bp, Homo sapiens
cccgggccggggcacggagagagccgagcgccgcagccgtgagccgaatagagccggagagacccgagtatgaccggagaagcccaggccggccggaagaggagccgagcgcggccggaaggaaccgagcccgtccgaagggagcggagcgcagcctggcctggggcccggtcgagcccgcgccatggcggccgaggcgacagctgtggccggaagcggggctgttggcggctgcctggccaaagacggcttgcagcagtctaagtgcccggacactaccccaaaacggcggcgcgcctcgtcgctgtcgcgtgacgccgagcgccgagcctaccaatggtgccgggagtacttgggcggggcctggcgccgagtgcagcccgaggagctgagggtttaccccgtgaggtgggaggtcaggggtcagcctctccggtgcgcggatcggggtcaggggtcagccgcggggccctcaggatgctccatgttttcgcccccctcttgcgcccgcgcctggggcggggcggggccggcctggccgggagggggccggggccgcggcaggtagggccggccgcgggctgagcgcgcctggtgtgggtctgcagcggaggcctcagcaacctgctcttccgctgctcgctcccggaccacctgcccagcgttggcgaggagccccgggaggtgcttctgcggctgtacggagccatcttgcaggtgagggggttgtgagcgccgcagcaccagtggctttagggcctgtcgcttacgcgatgcgggtagtattgttcccgttgcgcagttgaggacaccgaggttcacggtctgagtaacacctcattacaccgaagcctgggcctgtattcccagagctttgggaggctgaggcgagaggatcacttgagcacaggagttcgagaccagcctggacaacatagtgagacccccatctctaaataaaaatagaccaacgctaaagcctgtgctccagagcctccaggcaattggatcagaagtcgcagctctggtgggaggaaggcgagccctcatgtgtgtccctgtgccactttgccttggcccctttgctgtccatcctttttcagggcgtggactccctggtgctagaaagcgtgatgttcgccatacttgcggagcggtcgctggggccccagctgtacggagtcttcccagagggccggctggaacagtacatcccagtacgggcccagtcctaccctctcctccccaaggcacctccaccccctaaccctaccccagtgcccaatgtctgcctccacatccctcaccccaagtagggaatttcccccaaaaccctgacttcccctcattgccccagcccttcccactcctgccccagccccatcaccaccctgatagcttcctgggtgcagagtcggccattgaaaactcaagagcttcgagagccagtgttgtcagcagccattgccacgaagatggcgcaatttcatggcatggagatgcctttcaccaaggagccccactggctgtttgggaccatggagcggtgagtcaggagcctcctcagggctcctgtactcctgagctgaacctccatgccagcggatgtgtcgggggctctatccagccctccacttgagtggatctgatgtcatgggtgacagagcaagactccatttcaaaagaaaaaaagaaatgattgccggacaagtcacacagtgataggagcaggggtgcagtagtctggcctgaggggtagataggcgaggggtgggaaagaatagcagagccagtgtatcctattctttgggcttcaggtacctaaaacagatccaggacctgcccccaactggcctccctgagatgaacctgctggagatgtacagcctgaaggatgagatgggcaacctcaggaagttactagagtctaccccatcgccagtcgtcttctgccacaatgacatccaggaaggtaggagaaggcatctgagtctcctaacccaagatggaagagccagagggctctggagtgagcagaacctcaccccattcccccagggaacatcttgctgctctcagagccagaaaatgctgacagcctcatgctggtggacttcgagtacagcagttataactataggggctttgacattgggaaccatttttgtgagtgggtttatgattatactcacgaggaatggcctttctacaaagcaaggcccacagactaccccactcaagaacagcagttgcattttattcgtcattacctggcagaggcaaagaaaggtgagaccctctcccaagaggagcagagaaaactggaagaagatttgctggtagaagtcagtcggtatgctctggcatcccatttcttctggggtctgtggtccatcctccaggcatccatgtccaccatagaatttggttacttggactatgcccagtctcggttccagttctacttccagcagaaggggcagctgaccagtgtccactcctcatcctgactccaccctcccactccttggatttctcctggagcctccagggcaggaccttggagggaggaacaacgagcagaaggccctggcgactgggctgagcccccaagtgaaactgaggttcaggagaccggcctgttcctgagtttgactctaaagccaccatcctcacgagactctggggccccccaggctcccagacctttgagcaaccttcaccgcacagaaacccagccgcgccctgcaattcccaccgcggaaggtgccgaccaacccccaggatggcggaagctcaccaggccgtggccttccagttcacggtgaccccagacggggtcgacttccggctcagtcgggaggccctgaaacacgtctacctgtctgggatcaactcctggaagaaacgcctgatccgcatcaagatgcatcctagggcgtgtacctgcagcccacactgctgtcgtcatcatgcacagtgacgtcctcatccggatcctctagcac

SEQ ID NO: 350187 - DNA, 1950 bp, Homo sapiens
cccgggccggggcacggagagagccgagcgccgcagccgtgagccgaatagagccggagagacccgagtatgaccggagaagcccaggccggccggaagaggagccgagcgcggccggaaggaaccgagcccgtccgaagggagcggagcgcagcctggcctggggcccggtcgagcccgcgccatggcggccgaggcgacagctgtggccggaagcggggctgttggcggctgcctggccaaagacggcttgcagcagtctaagtgcccggacactaccccaaaacggcggcgcgcctcgtcgctgtcgcgtgacgccgagcgccgagcctaccaatggtgccgggagtacttgggcggggcctggcgccgagtgcagcccgaggagctgagggtttaccccgtgaggtgggaggtcaggggtcagcctctccggtgcgcggatcggggtcaggggtcagccgcggggccctcaggatgctccatgttttcgcccccctcttgcgcccgcgcctggggcggggcggggccggcctggccgggagggggccggggccgcggcaggtagggccggccgcgggctgagcgcgcctggtgtgggtctgcagcggaggcctcagcaacctgctcttccgctgctcgctcccggaccacctgcccagcgttggcgaggagccccgggaggtgcttctgcggctgtacggagccatcttgcaggtgagggggttgtgagcgccgcagcaccagtggctttagggcctgtcgcttacgcgatgcgggtagtattgttcccgttgcgcagttgaggacaccgaggttcacggtctgagtaacacctcattacaccgaagcctgggcctgtattcccagagctttgggaggctgaggcgagaggatcacttgagcacaggagttcgagaccagcctggacaacatagtgagacccccatctctaaataaaaatagaccaacgctaaagcctgtgctccagagcctccaggcaattggatcagaagtcgcagctctggtgggaggaaggcgagccctcatgtgtgtccctgtgccactttgccttggcccctttgctgtccatcctttttcagggcgtggactccctggtgctagaaagcgtgatgttcgccatacttgcggagcggtcgctggggccccagctgtacggagtcttcccagagggccggctggaacagtacatcccagtacgggcccagtcctaccctctcctccccaaggcacctccaccccctaaccctaccccagtgcccaatgtctgcctccacatccctcaccccaagtagggaatttcccccaaaaccctgacttcccctcattgccccagcccttcccactcctgccccagccccatcaccaccctgatagcttcctgggtgcagagtcggccattgaaaactcaagagcttcgagagccagtgttgtcagcagccattgccacgaagatggcgcaatttcatggcatggagatgcctttcaccaaggagccccactggctgtttgggaccatggagcggtacctaaaacagatccaggacctgcccccaactggcctccctgagatgaacctgctggagatgtacagcctgaaggatgagatgggcaacctcaggaagttactagagtctaccccatcgccagtcgtcttctgccacaatgacatccaggaaggtaggagaaggcatctgagtctcctaacccaagatggaagagccagagggctctggagtgagcagaacctcaccccattcccccagggaacatcttgctgctctcagagccagaaaatgctgacagcctcatgctggtggacttcgagtacagcagttataactataggtgaggctggaaagatggcttcccatagatctgttcccatagggctcttgaaaacaggccagctgcccagggcatttgggg

SEQ ID NO: 350188 - DNA, 891 bp, Homo sapiens
ttgcactttagcctgggtgagagcaagactctgtctcaaaacaccaaacaaaaaaagaaaaaagaaatgattgccaaggccgggcacggtggctcacccctgtaatcccagcactttgggaggccgaggcaggcggatcacaaggtcaggagatcaagcacaatggctaacacggtgaaaccccatctctactaaaaatacaaaaaattagccaggcgtggcggcaggcgcctgtagtcccaccccatcaccaccctgatagcttcctgggtgcagagtcggccattgaaaactcaagagcttcgagagccagtgttgtcagcagccattgccacgaagatggcgcaatttcatggcatggagatgcctttcaccaaggagccccactggctgtttgggaccatggagcggtacctaaaacagatccaggacctgcccccaactggcctccctgagatgaacctgctggagatgtacagcctgaaggatgagatgggcaacctcagagcaccccaatcacctgggcgctggaggtggctttggccctgtagcagatgatggctatggagtttcctacatgattgcaggcgagaacacgatcttcttccacatctccagcaagttctcaagctcagagacgaacgcccagcgctttggaaaccacatccgcaaagccctgctggacattgctgatcttttccaagttcccaaggcctacagctgaagctcagaccacagaggtggcaagagaagggctgaagctggaagactgttcatgagggacttgtgtgacctgctttgaaatgtgtgactctgctgagtgacgtaggctctgagatagctgtccacgcccacgtgtttgcttggaataaatacttgcctcagaacctt

SEQ ID NO: 350189 - DNA, 468 bp, Homo sapiens
ctgtgaacagtagtcaattgtgacagatactagacatccattgtttacaggcatgatgctggcgcagggaccccacagggcccagagcagagcccctcccctccggggctcactgcgcatggtgaagggagtcctgctgcagcccaaagcttaggacagacccggcgctgccatggagccggcagaggaggggaggggcgcacccaggggtctggcagaggcagcagccttccctgcttctgacactgtatccttaggcggtttgcacaaccctctagtgcgtcgtttcctcttctgtgaaatactttataggattgttggtgttgcgtgagagagagtggaagcacccagcacagggcctggtttaggacacacggatcccatccagggggcaggaaggcccaggcagaggccgagcaaaacagggtctgcaggggtcacctagtgcatgggaggtgggcccttccc

SEQ ID NO: 350190 - DNA, 2706 bp, Homo sapiens
tggcctggcggggggcgcgggccgggggcagccgctagtcgcggggtggggggcgcgaggggtcgcggactggctgggggcgtctcggcgcggctggcggcggggccggcctaagcgcgcccgcgcacccatctgcccccgtcctaggtgccgaccaacccccaggatggcggaagctcaccaggccgtggccttccagttcacggtgaccccagacggggtcgacttccggctcagtcgggaggccctgaaacacgtctacctgtctgggatcaactcctggaagaaacgcctgatccgcatcaagaatggcatcctcaggggcgtgtaccctggcagccccaccagctggctggtcgtcatcatggcaacagtgggttcctccttctgcaacgtggacatctccttggggctggtcagttgcatccagagatgcctccctcaggggtgtggcccctaccagaccccgcagacccgggcacttctcagcatggccatcttctccacgggcgtctgggtgacgggcatcttcttcttccgccaaaccctgaagctgcttctctgctaccatgggtggatgtttgagatgcatggcaagaccagcaacttgaccaggatctgggctatgtgtatccgccttctatccagccggcaccctatgctctacagcttccagacatctctgcccaagcttcctgtgcccagggtgtcagccacaattcagcggtacctagagtctgtgcgccccttgttggatgatgaggaatattaccgcatggagttgctggccaaagaattccaggacaagactgcccccaggctgcagaaatacctggtgctcaagtcatggtgggcaagtaactatgtgagtgactggtgggaagagtacatctaccttcgaggcaggagccctctcatggtgaacagcaactattatgtcatggaccttgtgctcatcaagaatacagacgtgcaggcagcccgcctgggaaacatcatccacgccatgatcatgtatcgccgtaaactggaccgtgaagaaatcaagcctgtgatggcactgggcatagtgcctatgtgctcctaccagatggagaggatgttcaacaccactcggatcccgggcaaggacacagatgtgctacagcacctctcagacagccggcacgtggctgtctaccacaagggacgcttcttcaagctgtggctctatgagggcgcccgtctgctcaagcctcaggatctggagatgcagttccagaggatcctggacgacccctccccacctcagcctggggaggagaagctggcagccctcactgcaggaggaagggtggagtgggcgcaggcacgccaggccttctttagctctggaaagaataaggctgccttggaggccatcgagcgtgccgctttcttcgtggccctggatgaggaatcctactcctatgaccccgaagatgaggccagcctcagcctctatggcaaggccctgctacatggcaactgctacaacaggtggtttgacaaatccttcactctcatttccttcaagaatggccagttgggtctcaatgcagagcatgcgtgggcagatgctcccatcattgggcacctctgggagtttgtcctgggcacagacagcttccacctgggctacacggagaccgggcactgcctgggcaaaccgaaccctgcgctcgcacctcctacacggctgcagtgggacattccaaaacagtgccaggcggtcatcgagagttcctaccaggtggccaaggcgttggcagacgacgtggagttgtactgcttccagttcctgccctttggcaaaggcctcatcaagaagtgccggaccagccctgatgcctttgtgcagatcgcgctgcagctggctcacttccgggacaggggtaagttctgcctgacctatgaggcctcaatgaccagaatgttccgggagggacggactgagactgtgcgttcctgtaccagcgagtccacagcctttgtgcaggccatgatggaggggtcccacacaaaagcagacctgcgagatctcttccagaaggctgctaagaagcaccagaatatgtaccgcctggccatgaccggggcagggatcgacaggcacctcttctgcctttacttggtctccaagtacctaggagtcagctctcctttccttgctgaggtgctctcggaaccctggcgtctctccaccagccagatcccccaatcccagatccgcatgttcgacccagagcagcaccccaatcacctgggcgctggaggtggctttggccctgtagcagatgatggctatggagtttcctacatgattgcaggcgagaacacgatcttcttccacatctccagcaagttctcaagctcagagacgaacgcccagcgctttggaaaccacatccgcaaagccctgctggacattgctgatcttttccaagttcccaaggcctacagctgaagcccttaggtacctgtgttttgtttgggaactcggaggccctccccctcccccagctcagaccacagaggtggcaagagaagggctgaagctggaagactgttcatgagggacttgtgtgacctgctttgaaatgtgtgactctgctgagtgacgtaggctctgagatagctgtccacgcccacgtgtttgcttggaataaatacttgcctcagaacctt

SEQ ID NO: 350191 - DNA, 372 bp, Homo sapiens
aggcagcccttgccatctggccccacggtgatgataactggctggacagtacctagagtctgtgcgccccttgttggatgatgaggaatattaccgcatggagttgctggccaaagaattccaggacaagactgcccccaggctgcagaaatacctggtgctcaagtcatggtgggcaagtaactatgtgagtgactggtgggaagagtacatctaccttcgaggcaggagccctctcatggtgaacagcaactattatgtcatggtatgaactagagcccccaggtccccgcacgtgctcagctctgtcccagctccaaggcaagggatctggaggacagcccagagctctagtagcagcttccgtgggca

SEQ ID NO: 350192 - DNA, 5523 bp, Homo sapiens
cccgggccggggcacggagagagccgagcgccgcagccgtgagccgaatagagccggagagacccgagtatgaccggagaagcccaggccggccggaagaggagccgagcgcggccggaaggaaccgagcccgtccgaagggagcggagcgcagcctggcctggggcccggtcgagcccgcgccatggcggccgaggcgacagctgtggccggaagcggggctgttggcggctgcctggccaaagacggcttgcagcagtctaagtgcccggacactaccccaaaacggcggcgcgcctcgtcgctgtcgcgtgacgccgagcgccgagcctaccaatggtgccgggagtacttgggcggggcctggcgccgagtgcagcccgaggagctgagggtttaccccgtgaggtgggaggtcaggggtcagcctctccggtgcgcggatcggggtcaggggtcagccgcggggccctcaggatgctccatgttttcgcccccctcttgcgcccgcgcctggggcggggcggggccggcctggccgggagggggccggggccgcggcaggtagggccggccgcgggctgagcgcgcctggtgtgggtctgcagcggaggcctcagcaacctgctcttccgctgctcgctcccggaccacctgcccagcgttggcgaggagccccgggaggtgcttctgcggctgtacggagccatcttgcaggtgagggggttgtgagcgccgcagcaccagtggctttagggcctgtcgcttacgcgatgcgggtagtattgttcccgttgcgcagttgaggacaccgaggttcacggtctgagtaacacctcattacaccgaagcctgggcctgtattcccagagctttgggaggctgaggcgagaggatcacttgagcacaggagttcgagaccagcctggacaacatagtgagacccccatctctaaataaaaatagaccaacgctaaagcctgtgctccagagcctccaggcaattggatcagaagtcgcagctctggtgggaggaaggcgagccctcatgtgtgtccctgtgccactttgccttggcccctttgctgtccatcctttttcagggcgtggactccctggtgctagaaagcgtgatgttcgccatacttgcggagcggtcgctggggccccagctgtacggagtcttcccagagggccggctggaacagtacatcccagtacgggcccagtcctaccctctcctccccaaggcacctccaccccctaaccctaccccagtgcccaatgtctgcctccacatccctcaccccaagtagggaatttcccccaaaaccctgacttcccctcattgccccagcccttcccactcctgccccagccccatcaccaccctgatagcttcctgggtgcagagtcggccattgaaaactcaagagcttcgagagccagtgttgtcagcagccattgccacgaagatggcgcaatttcatggcatggagatgcctttcaccaaggagccccactggctgtttgggaccatggagcggtgagtcaggagcctcctcagggctcctgtactcctgagctgaacctccatgccagcggatgtgtcgggggctctatccagccctccacttgagtggatctgatgtcatgggtgacagagcaagactccatttcaaaagaaaaaaagaaatgattgccggacaagtcacacagtgataggagcaggggtgcagtagtctggcctgaggggtagataggcgaggggtgggaaagaatagcagagccagtgtatcctattctttgggcttcaggtacctaaaacagatccaggacctgcccccaactggcctccctgagatgaacctgctggagatgtacagcctgaaggatgagatgggcaacctcaggaagttactagagtctaccccatcgccagtcgtcttctgccacaatgacatccaggaaggtaggagaaggcatctgagtctcctaacccaagatggaagagccagagggctctggagtgagcagaacctcaccccattcccccagggaacatcttgctgctctcagagccagaaaatgctgacagcctcatgctggtggacttcgagtacagcagttataactataggggctttgacattgggaaccatttttgtgagtgggtttatgattatactcacgaggaatggcctttctacaaagcaaggcccacagactaccccactcaagaacagcagttgcattttattcgtcattacctggcagaggcaaagaaaggtgagaccctctcccaagaggagcagagaaaactggaagaagatttgctggtagaagtcagtcggtatgctctggcatcccatttcttctggggtctgtggtccatcctccaggcatccatgtccaccatagaatttggttacttggactatgcccagtctcggttccagttctacttccagcagaaggggcagctgaccagtgtccactcctcatcctgactccaccctcccactccttggatttctcctggagcctccagggcaggaccttggagggaggaacaacgagcagaaggccctggcgactgggctgagcccccaagtgaaactgaggttcaggagaccggcctgttcctgagtttgactctaaagccaccatcctcacgagactctggggccccccaggctcccagacctttgagcaaccttcaccgcacagaaacccagccgcgccctgcaattcccaccgcggaaggtgggtgggttctggttctcgccccacgtttttccccgaccccgatttgggagtaggtgtcaggttcctggtgagggcggggcgggggtggctaggcctgaaggacgtggggacacgggccagagtggctggccccacgcacggacaggagtgaacccgagctgtgccgaccaacccccaggatggcggaagctcaccaggccgtggccttccagttcacggtgaccccagacggggtcgacttccggctcagtcgggaggccctgaaacacgtctacctgtctgggatcaactcctggaagaaacgcctgatccgcatcaagaatggcatcctcaggggcgtgtaccctggcagccccaccagctggctggtcgtcatcatggcaacagtgggttcctccttctgcaacgtggacatctccttggggctggtcagttgcatccagagatgcctccctcaggggtgtggcccctaccagaccccgcagacccgggcacttctcagcatggccatcttctccacgggcgtctgggtgacgggcatcttcttcttccgccaaaccctgaagctgcttctctgctaccatgggtggatgtttgagatgcatggcaagaccagcaacttgaccaggatctgggctatgtgtatccgccttctatccagccggcaccctatgctctacagcttccagacatctctgcccaagcttcctgtgcccagggtgtcagccacaattcagcggtacctagagtctgtgcgccccttgttggatgatgaggaatattaccgcatggagttgctggccaaagaattccaggacaagactgcccccaggctgcagaaatacctggtgctcaagtcatggtgggcaagtaactatgtgagtgactggtgggaagagtacatctaccttcgaggcaggagccctctcatggtgaacagcaactattatgtcatggaccttgtgctcatcaagaatacagacgtgcaggcagcccgcctgggaaacatcatccacgccatgatcatgtatcgccgtaaactggaccgtgaagaaatcaagcctgtgatggcactgggcatagtgcctatgtgctcctaccagatggagaggatgttcaacaccactcggatcccgggcaaggacacagatgtgctacagcacctctcagacagccggcacgtggctgtctaccacaagggacgcttcttcaagctgtggctctatgagggcgcccgtctgctcaagcctcaggatctggagatgcagttccagaggatcctggacgacccctccccacctcagcctggggaggagaagctggcagccctcactgcaggaggaagggtggagtgggcgcaggcacgccaggccttctttagctctggaaagaataaggctgccttggaggccatcgagcgtgccgctttcttcgtggccctggatgaggaatcctactcctatgaccccgaagatgaggccagcctcagcctctatggcaaggccctgctacatggcaactgctacaacaggtggtttgacaaatccttcactctcatttccttcaagaatggccagttgggtctcaatgcagagcatgcgtgggcagatgctcccatcattgggcacctctgggagtttgtcctgggcacagacagcttccacctgggctacacggagaccgggcactgcctgggcaaaccgaaccctgcgctcgcacctcctacacggctgcagtgggacattccaaaacagtgccaggcggtcatcgagagttcctaccaggtggccaaggcgttggcagacgacgtggagttgtactgcttccagttcctgccctttggcaaaggcctcatcaagaagtgccggaccagccctgatgcctttgtgcagatcgcgctgcagctggctcacttccgggacaggggtaagttctgcctgacctatgaggcctcaatgaccagaatgttccgggagggacggactgagactgtgcgttcctgtaccagcgagtccacagcctttgtgcaggccatgatggaggggtcccacacaaaagcagacctgcgagatctcttccagaaggctgctaagaagcaccagaatatgtaccgcctggccatgaccggggcagggatcgacaggcacctcttctgcctttacttggtctccaagtacctaggagtcagctctcctttccttgctgaggtgctctcggaaccctggcgtctctccaccagccagatcccccaatcccagatccgcatgttcgacccagagcagcaccccaatcacctgggcgctggaggtggctttggccctgtagcagatgatggctatggagtttcctacatgattgcaggcgagaacacgatcttcttccacatctccagcaagttctcaagctcagagacgaacgcccagcgctttggaaaccacatccgcaaagccctgctggacattgctgatcttttccaagttcccaaggcctacagctgaaggttggagaaatgccagctgccctttcgtccccacactgtggaggaagggacctgtggcagctcacaggcatgaggggtggccgtgcacaggtgcccaggctccaaggacagctccggcagcaggtcctcgctgggcagatgctgctccctgagggcccaggtggtggaggtggggttggagcaggaagggaattttgatttttttttttcttgatagatactaataaaaataaggctgtgtaattttctctcag

SEQ ID NO: 350193 - DNA, 5488 bp, Homo sapiens
cccgggccggggcacggagagagccgagcgccgcagccgtgagccgaatagagccggagagacccgagtatgaccggagaagcccaggccggccggaagaggagccgagcgcggccggaaggaaccgagcccgtccgaagggagcggagcgcagcctggcctggggcccggtcgagcccgcgccatggcggccgaggcgacagctgtggccggaagcggggctgttggcggctgcctggccaaagacggcttgcagcagtctaagtgcccggacactaccccaaaacggcggcgcgcctcgtcgctgtcgcgtgacgccgagcgccgagcctaccaatggtgccgggagtacttgggcggggcctggcgccgagtgcagcccgaggagctgagggtttaccccgtgaggtgggaggtcaggggtcagcctctccggtgcgcggatcggggtcaggggtcagccgcggggccctcaggatgctccatgttttcgcccccctcttgcgcccgcgcctggggcggggcggggccggcctggccgggagggggccggggccgcggcaggtagggccggccgcgggctgagcgcgcctggtgtgggtctgcagcggaggcctcagcaacctgctcttccgctgctcgctcccggaccacctgcccagcgttggcgaggagccccgggaggtgcttctgcggctgtacggagccatcttgcaggtgagggggttgtgagcgccgcagcaccagtggctttagggcctgtcgcttacgcgatgcgggtagtattgttcccgttgcgcagttgaggacaccgaggttcacggtctgagtaacacctcattacaccgaagcctgggcctgtattcccagagctttgggaggctgaggcgagaggatcacttgagcacaggagttcgagaccagcctggacaacatagtgagacccccatctctaaataaaaatagaccaacgctaaagcctgtgctccagagcctccaggcaattggatcagaagtcgcagctctggtgggaggaaggcgagccctcatgtgtgtccctgtgccactttgccttggcccctttgctgtccatcctttttcagggcgtggactccctggtgctagaaagcgtgatgttcgccatacttgcggagcggtcgctggggccccagctgtacggagtcttcccagagggccggctggaacagtacatcccagtacgggcccagtcctaccctctcctccccaaggcacctccaccccctaaccctaccccagtgcccaatgtctgcctccacatccctcaccccaagtagggaatttcccccaaaaccctgacttcccctcattgccccagcccttcccactcctgccccagccccatcaccaccctgatagcttcctgggtgcagagtcggccattgaaaactcaagagcttcgagagccagtgttgtcagcagccattgccacgaagatggcgcaatttcatggcatggagatgcctttcaccaaggagccccactggctgtttgggaccatggagcggtgagtcaggagcctcctcagggctcctgtactcctgagctgaacctccatgccagcggatgtgtcgggggctctatccagccctccacttgagtggatctgatgtcatgggtgacagagcaagactccatttcaaaagaaaaaaagaaatgattgccggacaagtcacacagtgataggagcaggggtgcagtagtctggcctgaggggtagataggcgaggggtgggaaagaatagcagagccagtgtatcctattctttgggcttcaggtacctaaaacagatccaggacctgcccccaactggcctccctgagatgaacctgctggagatgtacagcctgaaggatgagatgggcaacctcaggaagttactagagtctaccccatcgccagtcgtcttctgccacaatgacatccaggaaggtaggagaaggcatctgagtctcctaacccaagatggaagagccagagggctctggagtgagcagaacctcaccccattcccccagggaacatcttgctgctctcagagccagaaaatgctgacagcctcatgctggtggacttcgagtacagcagttataactataggggctttgacattgggaaccatttttgtgagtgggtttatgattatactcacgaggaatggcctttctacaaagcaaggcccacagactaccccactcaagaacagcagttgcattttattcgtcattacctggcagaggcaaagaaaggtgagaccctctcccaagaggagcagagaaaactggaagaagatttgctggtagaagtcagtcggtatgctctggcatcccatttcttctggggtctgtggtccatcctccaggcatccatgtccaccatagaatttggttacttggactatgcccagtctcggttccagttctacttccagcagaaggggcagctgaccagtgtccactcctcatcctgactccaccctcccactccttggatttctcctggagcctccagggcaggaccttggagggaggaacaacgagcagaaggccctggcgactgggctgagcccccaagtgaaactgaggttcaggagaccggcctgttcctgagtttgactctaaagccaccatcctcacgagactctggggccccccaggctcccagacctttgagcaaccttcaccgcacagaaacccagccgcgccctgcaattcccaccgcggaaggtgggtgggttctggttctcgccccacgtttttccccgaccccgatttgggagtaggtgtcaggttcctggtgagggcggggcgggggtggctaggcctgaaggacgtggggacacgggccagagtggctggccccacgcacggacaggagtgaacccgagctgtgccgaccaacccccaggatggcggaagctcaccaggccgtggccttccagttcacggtgaccccagacggggtcgacttccggctcagtcgggaggccctgaaacacgtctacctgtctgggatcaactcctggaagaaacgcctgatccgcatcaagaatggcatcctcaggggcgtgtaccctggcagccccaccagctggctggtcgtcatcatggcaacagtgggttcctccttctgcaacgtggacatctccttggggctggtcagttgcatccagagatgcctccctcaggggtgtggcccctaccagaccccgcagacccgggcacttctcagcatggccatcttctccacgggcgtctgggtgacgggcatcttcttcttccgccaaaccctgaagctgcttctctgctaccatgggtggatgtttgagatgcatggcaagaccagcaacttgaccaggatctgggctatgtgtatccgccttctatccagccggcaccctatgctctacagcttccagacatctctgcccaagcttcctgtgcccagggtgtcagccacaattcagcggtacctagagtctgtgcgccccttgttggatgatgaggaatattaccgcatggagttgctggccaaagaattccaggacaagactgcccccaggctgcagaaatacctggtgctcaagtcatggtgggcaagtaactatgtgagtgactggtgggaagagtacatctaccttcgaggcaggagccctctcatggtgaacagcaactattatgtcatggaccttgtgctcatcaagaatacagacgtgcaggcagcccgcctgggaaacatcatccacgccatgatcatgtatcgccgtaaactggaccgtgaagaaatcaagcctgtgatggcactgggcatagtgcctatgtgctcctaccagatggagaggatgttcaacaccactcggatcccgggcaaggacacagatgtgctacagcacctctcagacagccggcacgtggctgtctaccacaagggacgcttcttcaagctgtggctctatgagggcgcccgtctgctcaagcctcaggatctggagatgcagttccagaggatcctggacgacccctccccacctcagcctggggaggagaagctggcagccctcactgcaggaggaagggtggagtgggcgcaggcacgccaggccttctttagctctggaaagaataaggctgccttggaggccatcgagcgtgccgctttcttcgtggccctggatgaggaatcctactcctatgaccccgaagatgaggccagcctcagcctctatggcaaggccctgctacatggcaactgctacaacaggtggtttgacaaatccttcactctcatttccttcaagaatggccagttgggtctcaatgcagagcatgcgtgggcagatgctcccatcattgggcacctctgggagtttgtcctgggcacagacagcttccacctgggctacacggagaccgggcactgcctgggcaaaccgaaccctgcgctcgcacctcctacacggctgcagtgggacattccaaaacagtgccaggcggtcatcgagagttcctaccaggtggccaaggcgttggcagacgacgtggagttgtactgcttccagttcctgccctttggcaaaggcctcatcaagaagtgccggaccagccctgatgcctttgtgcagatcgcgctgcagctggctcacttccgggacaggggtaagttctgcctgacctatgaggcctcaatgaccagaatgttccgggagggacggactgagactgtgcgttcctgtaccagcgagtccacagcctttgtgcaggccatgatggaggggtcccacacaaaagcagacctgcgagatctcttccagaaggctgctaagaagcaccagaatatgtaccgcctggccatgaccggggcagggatcgacaggcacctcttctgcctttacttggtctccaagtacctaggagtcagctctcctttccttgctgaggtgctctcggaaccctggcgtctctccaccagccagatcccccaatcccagatccgcatgttcgacccagagcagcaccccaatcacctgggcgctggaggtggctttggccctgtagcagatgatggctatggagtttcctacatgattgcaggcgagaacacgatcttcttccacatctccagcaagttctcaagctcagagacgaacgcccagcgctttggaaaccacatccgcaaagccctgctggacattgctgatcttttccaagttcccaaggcctacagctgaagcccttaggtacctgtgttttgtttgggaactcggaggccctccccctcccccagctcagaccacagaggtggcaagagaagggctgaagctggaagactgttcatgagggacttgtgtgacctgctttgaaatgtgtgactctgctgagtgacgtaggctctgagatagctgtccacgcccacgtgtttgcttggaataaatacttgcctcagaacctt

SEQ ID NO: 350194 - DNA, 3733 bp, Homo sapiens
tgggaagaagaagcttgtttattgtgttacatacacagcacggggctctggcctgccagccatggggacctactcaaactcaggaacaggccggtctcctgaacctcagtttcacttgggggcgaagttactagagtctaccccatcgccagtcgtcttctgccacaatgacatccaggaaggtaggagaaggcatctgagtctcctaacccaagatggaagagccagagggctctggagtgagcagaacctcaccccattcccccagggaacatcttgctgctctcagagccagaaaatgctgacagcctcatgctggtggacttcgagtacagcagttataactataggggctttgacattgggaaccatttttgtgagtgggtttatgattatactcacgaggaatggcctttctacaaagcaaggcccacagactaccccactcaagaacagcagttgcattttattcgtcattacctggcagaggcaaagaaaggtgagaccctctcccaagaggagcagagaaaactggaagaagatttgctggtagaagtcagtcggtatgctctggcatcccatttcttctggggtctgtggtccatcctccaggcatccatgtccaccatagaatttggttacttggactatgcccagtctcggttccagttctacttccagcagaaggggcagctgaccagtgtccactcctcatcctgactccaccctcccactccttggatttctcctggagcctccagggcaggaccttggagggaggaacaacgagcagaaggccctggcgactgggctgagcccccaagtgaaactgaggttcaggagaccggcctgttcctgagtttgactctaaagccaccatcctcacgagactctggggccccccaggctcccagacctttgagcaaccttcaccgcacagaaacccagccgcgccctgcaattcccaccgcggaaggtgggtgggttctggttctcgccccacgtttttccccgaccccgatttgggagtaggtgtcaggttcctggtgagggcggggcgggggtggctaggcctgaaggacgtggggacacgggccagagtggctggccccacgcacggacaggagtgaacccgagctgtgccgaccaacccccaggatggcggaagctcaccaggccgtggccttccagttcacggtgaccccagacggggtcgacttccggctcagtcgggaggccctgaaacacgtctacctgtctgggatcaactcctggaagaaacgcctgatccgcatcaagaatggcatcctcaggggcgtgtaccctggcagccccaccagctggctggtcgtcatcatggcaacagtgggttcctccttctgcaacgtggacatctccttggggctggtcagttgcatccagagatgcctccctcaggggtgtggcccctaccagaccccgcagacccgggcacttctcagcatggccatcttctccacgggcgtctgggtgacgggcatcttcttcttccgccaaaccctgaagctgcttctctgctaccatgggtggatgtttgagatgcatggcaagaccagcaacttgaccaggatctgggctatgtgtatccgccttctatccagccggcaccctatgctctacagcttccagacatctctgcccaagcttcctgtgcccagggtgtcagccacaattcagcggtacctagagtctgtgcgccccttgttggatgatgaggaatattaccgcatggagttgctggccaaagaattccaggacaagactgcccccaggctgcagaaatacctggtgctcaagtcatggtgggcaagtaactatgtgagtgactggtgggaagagtacatctaccttcgaggcaggagccctctcatggtgaacagcaactattatgtcatggaccttgtgctcatcaagaatacagacgtgcaggcagcccgcctgggaaacatcatccacgccatgatcatgtatcgccgtaaactggaccgtgaagaaatcaagcctgtgatggcactgggcatagtgcctatgtgctcctaccagatggagaggatgttcaacaccactcggatcccgggcaaggacacagatgtgctacagcacctctcagacagccggcacgtggctgtctaccacaagggacgcttcttcaagctgtggctctatgagggcgcccgtctgctcaagcctcaggatctggagatgcagttccagaggatcctggacgacccctccccacctcagcctggggaggagaagctggcagccctcactgcaggaggaagggtggagtgggcgcaggcacgccaggccttctttagctctggaaagaataaggctgccttggaggccatcgagcgtgccgctttcttcgtggccctggatgaggaatcctactcctatgaccccgaagatgaggccagcctcagcctctatggcaaggccctgctacatggcaactgctacaacaggtggtttgacaaatccttcactctcatttccttcaagaatggccagttgggtctcaatgcagagcatgcgtgggcagatgctcccatcattgggcacctctgggagtttgtcctgggcacagacagcttccacctgggctacacggagaccgggcactgcctgggcaaaccgaaccctgcgctcgcacctcctacacggctgcagtgggacattccaaaacagtgccaggcggtcatcgagagttcctaccaggtggccaaggcgttggcagacgacgtggagttgtactgcttccagttcctgccctttggcaaaggcctcatcaagaagtgccggaccagccctgatgcctttgtgcagatcgcgctgcagctggctcacttccgggacaggggtaagttctgcctgacctatgaggcctcaatgaccagaatgttccgggagggacggactgagactgtgcgttcctgtaccagcgagtccacagcctttgtgcaggccatgatggaggggtcccacacaaaagcagacctgcgagatctcttccagaaggctgctaagaagcaccagaatatgtaccgcctggccatgaccggggcagggatcgacaggcacctcttctgcctttacttggtctccaagtacctaggagtcagctctcctttccttgctgaggtgctctcggaaccctggcgtctctccaccagccagatcccccaatcccagatccgcatgttcgacccagagcagcaccccaatcacctgggcgctggaggtggctttggccctgtagcagatgatggctatggagtttcctacatgattgcaggcgagaacacgatcttcttccacatctccagcaagttctcaagctcagagacgaacgcccagcgctttggaaaccacatccgcaaagccctgctggacattgctgatcttttccaagttcccaaggcctacagctgaaggttggagaaatgccagctgccctttcgtccccacactgtggaggaagggacctgtggcagctcacaggcatgaggggtggccgtgcacaggtgcccaggctccaaggacagctccggcagcaggtcctcgctgggcagatgctgctccctgagggcccaggtggtggaggtggggttggagcaggaagggaattttgatttttttttttcttgatagatactaataaaaataaggctgtgtaattttctctcag

SEQ ID NO: 350195 - DNA, 5182 bp, Homo sapiens
cccgggccggggcacggagagagccgagcgccgcagccgtgagccgaatagagccggagagacccgagtatgaccggagaagcccaggccggccggaagaggagccgagcgcggccggaaggaaccgagcccgtccgaagggagcggagcgcagcctggcctggggcccggtcgagcccgcgccatggcggccgaggcgacagctgtggccggaagcggggctgttggcggctgcctggccaaagacggcttgcagcagtctaagtgcccggacactaccccaaaacggcggcgcgcctcgtcgctgtcgcgtgacgccgagcgccgagcctaccaatggtgccgggagtacttgggcggggcctggcgccgagtgcagcccgaggagctgagggtttaccccgtgaggtgggaggtcaggggtcagcctctccggtgcgcggatcggggtcaggggtcagccgcggggccctcaggatgctccatgttttcgcccccctcttgcgcccgcgcctggggcggggcggggccggcctggccgggagggggccggggccgcggcaggtagggccggccgcgggctgagcgcgcctggtgtgggtctgcagcggaggcctcagcaacctgctcttccgctgctcgctcccggaccacctgcccagcgttggcgaggagccccgggaggtgcttctgcggctgtacggagccatcttgcaggtgagggggttgtgagcgccgcagcaccagtggctttagggcctgtcgcttacgcgatgcgggtagtattgttcccgttgcgcagttgaggacaccgaggttcacggtctgagtaacacctcattacaccgaagcctgggcctgtattcccagagctttgggaggctgaggcgagaggatcacttgagcacaggagttcgagaccagcctggacaacatagtgagacccccatctctaaataaaaatagaccaacgctaaagcctgtgctccagagcctccaggcaattggatcagaagtcgcagctctggtgggaggaaggcgagccctcatgtgtgtccctgtgccactttgccttggcccctttgctgtccatcctttttcagggcgtggactccctggtgctagaaagcgtgatgttcgccatacttgcggagcggtcgctggggccccagctgtacggagtcttcccagagggccggctggaacagtacatcccagtacgggcccagtcctaccctctcctccccaaggcacctccaccccctaaccctaccccagtgcccaatgtctgcctccacatccctcaccccaagtagggaatttcccccaaaaccctgacttcccctcattgccccagcccttcccactcctgccccagccccatcaccaccctgatagcttcctgggtgcagagtcggccattgaaaactcaagagcttcgagagccagtgttgtcagcagccattgccacgaagatggcgcaatttcatggcatggagatgcctttcaccaaggagccccactggctgtttgggaccatggagcggtgagtcaggagcctcctcagggctcctgtactcctgagctgaacctccatgccagcggatgtgtcgggggctctatccagccctccacttgagtggatctgatgtcatgggtgacagagcaagactccatttcaaaagaaaaaaagaaatgattgccggacaagtcacacagtgataggagcaggggtgcagtagtctggcctgaggggtagataggcgaggggtgggaaagaatagcagagccagtgtatcctattctttgggcttcaggtacctaaaacagatccaggacctgcccccaactggcctccctgagatgaacctgctggagatgtacagcctgaaggatgagatgggcaacctcaggaagttactagagtctaccccatcgccagtcgtcttctgccacaatgacatccaggaaggtaggagaaggcatctgagtctcctaacccaagatggaagagccagagggctctggagtgagcagaacctcaccccattcccccagggaacatcttgctgctctcagagccagaaaatgctgacagcctcatgctggtggacttcgagtacagcagttataactataggggctttgacattgggaaccatttttgtgagtgggtttatgattatactcacgaggaatggcctttctacaaagcaaggcccacagactaccccactcaagaacagcagttgcattttattcgtcattacctggcagaggcaaagaaaggtgagaccctctcccaagaggagcagagaaaactggaagaagatttgctggtagaagtcagtcggtatgctctggcatcccatttcttctggggtctgtggtccatcctccaggcatccatgtccaccatagaatttggttacttggactatgcccagtctcggttccagttctacttccagcagaaggggcagctgaccagtgtccactcctcatcctgactccaccctcccactccttggatttctcctggagcctccagggcaggaccttggagggaggaacaacgagcagaaggccctggcgactgggctgagcccccaagtgaaactgaggttcaggagaccggcctgttcctgagtttgagtgccgaccaacccccaggatggcggaagctcaccaggccgtggccttccagttcacggtgaccccagacggggtcgacttccggctcagtcgggaggccctgaaacacgtctacctgtctgggatcaactcctggaagaaacgcctgatccgcatcaagaatggcatcctcaggggcgtgtaccctggcagccccaccagctggctggtcgtcatcatggcaacagtgggttcctccttctgcaacgtggacatctccttggggctggtgtggcccctaccagaccccgcagacccgggcacttctcagcatggccatcttctccacgggcgtctgggtgacgggcatcttcttcttccgccaaaccctgaagctgcttctctgctaccatgggtggatgtttgagatgcatggcaagaccagcaacttgaccaggatctgggctatgtgtatccgccttctatccagccggcaccctatgctctacagcttccagacatctctgcccaagcttcctgtgcccagggtgtcagccacaattcagcggtacctagagtctgtgcgccccttgttggatgatgaggaatattaccgcatggagttgctggccaaagaattccaggacaagactgcccccaggctgcagaaatacctggtgctcaagtcatggtgggcaagtaactatgtgagtgactggtgggaagagtacatctaccttcgaggcaggagccctctcatggtgaacagcaactattatgtcatggaccttgtgctcatcaagaatacagacgtgcaggcagcccgcctgggaaacatcatccacgccatgatcatgtatcgccgtaaactggaccgtgaagaaatcaagcctgtgatggcactgggcatagtgcctatgtgctcctaccagatggagaggatgttcaacaccactcggatcccgggcaaggacacagatgtgctacagcacctctcagacagccggcacgtggctgtctaccacaagggacgcttcttcaagctgtggctctatgagggcgcccgtctgctcaagcctcaggatctggagatgcagttccagaggatcctggacgacccctccccacctcagcctggggaggagaagctggcagccctcactgcaggaggaagggtggagtgggcgcaggcacgccaggccttctttagctctggaaagaataaggctgccttggaggccatcgagcgtgccgctttcttcgtggccctggatgaggaatcctactcctatgaccccgaagatgaggccagcctcagcctctatggcaaggccctgctacatggcaactgctacaacaggtggtttgacaaatccttcactctcatttccttcaagaatggccagttgggtctcaatgcagagcatgcgtgggcagatgctcccatcattgggcacctctgggagtttgtcctgggcacagacagcttccacctgggctacacggagaccgggcactgcctgggcaaaccgaaccctgcgctcgcacctcctacacggctgcagtgggacattccaaaacagtgccaggcggtcatcgagagttcctaccaggtggccaaggcgttggcagacgacgtggagttgtactgcttccagttcctgccctttggcaaaggcctcatcaagaagtgccggaccagccctgatgcctttgtgcagatcgcgctgcagctggctcacttccgggacaggggtaagttctgcctgacctatgaggcctcaatgaccagaatgttccgggagggacggactgagactgtgcgttcctgtaccagcgagtccacagcctttgtgcaggccatgatggaggggtcccacacaaaagcagacctgcgagatctcttccagaaggctgctaagaagcaccagaatatgtaccgcctggccatgaccggggcagggatcgacaggcacctcttctgcctttacttggtctccaagtacctaggagtcagctctcctttccttgctgaggtgctctcggaaccctggcgtctctccaccagccagatcccccaatcccagatccgcatgttcgacccagagcagcaccccaatcacctgggcgctggaggtggctttggccctgtagcagatgatggctatggagtttcctacatgattgcaggcgagaacacgatcttcttccacatctccagcaagttctcaagctcagagacgaacgcccagcgctttggaaaccacatccgcaaagccctgctggacattgctgatcttttccaagttcccaaggcctacagctgaagcccttaggtacctgtgttttgtttgggaactcggaggccctccccctcccccagctcagaccacagaggtggcaagagaagggctgaagctggaagactgttcatgagggacttgtgtgacctgctttgaaatgtgtgactctgctgagtgacgtaggctctgagatagctgtccacgcccacgtgtttgcttggaataaatacttgcctcagaacctt

SEQ ID NO: 350196 - DNA, 5611 bp, Homo sapiens
cccgggccggggcacggagagagccgagcgccgcagccgtgagccgaatagagccggagagacccgagtatgaccggagaagcccaggccggccggaagaggagccgagcgcggccggaaggaaccgagcccgtccgaagggagcggagcgcagcctggcctggggcccggtcgagcccgcgccatggcggccgaggcgacagctgtggccggaagcggggctgttggcggctgcctggccaaagacggcttgcagcagtctaagtgcccggacactaccccaaaacggcggcgcgcctcgtcgctgtcgcgtgacgccgagcgccgagcctaccaatggtgccgggagtacttgggcggggcctggcgccgagtgcagcccgaggagctgagggtttaccccgtgaggtgggaggtcaggggtcagcctctccggtgcgcggatcggggtcaggggtcagccgcggggccctcaggatgctccatgttttcgcccccctcttgcgcccgcgcctggggcggggcggggccggcctggccgggagggggccggggccgcggcaggtagggccggccgcgggctgagcgcgcctggtgtgggtctgcagcggaggcctcagcaacctgctcttccgctgctcgctcccggaccacctgcccagcgttggcgaggagccccgggaggtgcttctgcggctgtacggagccatcttgcaggtgagggggttgtgagcgccgcagcaccagtggctttagggcctgtcgcttacgcgatgcgggtagtattgttcccgttgcgcagttgaggacaccgaggttcacggtctgagtaacacctcattacaccgaagcctgggcctgtattcccagagctttgggaggctgaggcgagaggatcacttgagcacaggagttcgagaccagcctggacaacatagtgagacccccatctctaaataaaaatagaccaacgctaaagcctgtgctccagagcctccaggcaattggatcagaagtcgcagctctggtgggaggaaggcgagccctcatgtgtgtccctgtgccactttgccttggcccctttgctgtccatcctttttcagggcgtggactccctggtgctagaaagcgtgatgttcgccatacttgcggagcggtcgctggggccccagctgtacggagtcttcccagagggccggctggaacagtacatcccagtacgggcccagtcctaccctctcctccccaaggcacctccaccccctaaccctaccccagtgcccaatgtctgcctccacatccctcaccccaagtagggaatttcccccaaaaccctgacttcccctcattgccccagcccttcccactcctgccccagccccatcaccaccctgatagcttcctgggtgcagagtcggccattgaaaactcaagagcttcgagagccagtgttgtcagcagccattgccacgaagatggcgcaatttcatggcatggagatgcctttcaccaaggagccccactggctgtttgggaccatggagcggtgagtcaggagcctcctcagggctcctgtactcctgagctgaacctccatgccagcggatgtgtcgggggctctatccagccctccacttgagtggatctgatgtcatgggtgacagagcaagactccatttcaaaagaaaaaaagaaatgattgccggacaagtcacacagtgataggagcaggggtgcagtagtctggcctgaggggtagataggcgaggggtgggaaagaatagcagagccagtgtatcctattctttgggcttcaggtacctaaaacagatccaggacctgcccccaactggcctccctgagatgaacctgctggagatgtacagcctgaaggatgagatgggcaacctcaggaagttactagagtctaccccatcgccagtcgtcttctgccacaatgacatccaggaaggtaggagaaggcatctgagtctcctaacccaagatggaagagccagagggctctggagtgagcagaacctcaccccattcccccagggaacatcttgctgctctcagagccagaaaatgctgacagcctcatgctggtggacttcgagtacagcagttataactataggggctttgacattgggaaccatttttgtgagtgggtttatgattatactcacgaggaatggcctttctacaaagcaaggcccacagactaccccactcaagaacagcagttgcattttattcgtcattacctggcagaggcaaagaaaggtgagaccctctcccaagaggagcagagaaaactggaagaagatttgctggtagaagtcagtcggtatgctctggcatcccatttcttctggggtctgtggtccatcctccaggcatccatgtccaccatagaatttggttacttggactatgcccagtctcggttccagttctacttccagcagaaggggcagctgaccagtgtccactcctcatcctgactccaccctcccactccttggatttctcctggagcctccagggcaggaccttggagggaggaacaacgagcagaaggccctggcgactgggctgagcccccaagtgaaactgaggttcaggagaccggcctgttcctgagtttgactctaaagccaccatcctcacgagactctggggccccccaggctcccagacctttgagcaaccttcaccgcacagaaacccagccgcgccctgcaattcccaccgcggaaggtgggtgggttctggttctcgccccacgtttttccccgaccccgatttgggagtaggtgtcaggttcctggtgagggcggggcgggggtggctaggcctgaaggacgtggggacacgggccagagtggctggccccacgcacggacaggagtgaacccgagctgtgccgaccaacccccaggatggcggaagctcaccaggccgtggccttccagttcacggtgaccccagacggggtcgacttccggctcagtcgggaggccctgaaacacgtctacctgtctgggatcaactcctggaagaaacgcctgatccgcatcaagaatggcatcctcaggggcgtgtaccctggcagccccaccagctggctggtcgtcatcatggcaacagtgggttcctccttctgcaacgtggacatctccttggggctggtcagttgcatccagagatgcctccctcaggggtgtggcccctaccagaccccgcagacccgggcacttctcagcatggccatcttctccacgggcgtctgggtgacgggcatcttcttcttccgccaaaccctgaagctgcttctctgctaccatgggtggatgtttgagatgcatggcaagaccagcaacttgaccaggatctgggctatgtgtatccgccttctatccagccggcaccctatgctctacagcttccagacatctctgcccaagcttcctgtgcccagggtgtcagccacaattcagcggtacctagagtctgtgcgccccttgttggatgatgaggaatattaccgcatggagttgctggccaaagaattccaggacaagactgcccccaggctgcagaaatacctggtgctcaagtcatggtgggcaagtaactatgtgagtgactggtgggaagagtacatctaccttcgaggcaggagccctctcatggtgaacagcaactattatgtcatggaccttgtgctcatcaagaatacagacgtgcaggcagcccgcctgggaaacatcatccacgccatgatcatgtatcgccgtaaactggaccgtgaagaaatcaagcctgtgatggcactgggcatagtgcctatgtgctcctaccagatggagaggatgttcaacaccactcggatcccgggcaaggacacagatgtgctacagcacctctcagacagccggcacgtggctgtctaccacaagggacgcttcttcaagctgtggctctatgagggcgcccgtctgctcaagcctcaggatctggagatgcagttccagaggatcctggacgacccctccccacctcagcctggggaggagaagctggcagccctcactgcaggaggaagggtggagtgggcgcaggcacgccaggccttctttagctctggaaagaataaggctgccttggaggccatcgagcgtgccgctttcttcgtggccctggatgaggaatcctactcctatgaccccgaagatgaggccagcctcagcctctatggcaaggccctgctacatggcaactgctacaacaggtggtttgacaaatccttcactctcatttccttcaagaatggccagttgggtctcaatgcagagcatgcgtgggcagatgctcccatcattgggcacctctgggagtttgtcctgggcacagacagcttccacctgggctacacggagaccgggcactgcctgggcaaaccgaaccctgcgctcgcacctcctacacggctgcagtgggacattccaaaacagtgccaggcggtcatcgagagttcctaccaggtggccaaggcgttggcagacgacgtggagttgtactgcttccagttcctgccctttggcaaaggcctcatcaagaagtgccggaccagccctgatgcctttgtgcagatcgcgctgcagctggctcacttccgggacaggggtaagttctgcctgacctatgaggcctcaatgaccagaatgttccgggagggacggactgagactgtgcgttcctgtaccagcgagtccacagcctttgtgcaggccatgatggaggggtcccacacaaaagcagacctgcgagatctcttccagaaggctgctaagaagcaccagaatatgtaccgcctggccatgaccggggcagggatcgacaggcacctcttctgcctttacttggtctccaagtacctaggagtcagctctcctttccttgctgaggtgctctcggaaccctggcgtctctccaccagccagatcccccaatcccagatccgcatgttcgacccagagcagcaccccaatcacctgggcgctggaggtggctttggccctgtagcagatgatggctatggagtttcctacatgattgcaggcgagaacacgatcttcttccacatctccagcaagttctcaagctcagagacgaacgcccagcgctttggaaaccacatccgcaaagccctgctggacattgctgatcttttccaagttcccaaggcctacagctgaaggttggagaaatgccagctgccctttcgtccccacactgtggaggaagggacctgtggcagctcacaggcatgaggggtggccgtgcacaggtgcccaggctccaaggacagctccggcagcagcccttaggtacctgtgttttgtttgggaactcggaggccctccccctcccccagctcagaccacagaggtggcaagagaagggctgaagctggaagactgttcatgagggacttgtgtgacctgctttgaaatgtgtgactctgctgagtgacgtaggctctgagatagctgtccacgcccacgtgtttgcttggaataaatacttgcctcagaacctt

SEQ ID NO: 350197 - DNA, 4632 bp, Homo sapiens
cccgggccggggcacggagagagccgagcgccgcagccgtgagccgaatagagccggagagacccgagtatgaccggagaagcccaggccggccggaagaggagccgagcgcggccggaaggaaccgagcccgtccgaagggagcggagcgcagcctggcctggggcccggtcgagcccgcgccatggcggccgaggcgacagctgtggccggaagcggggctgttggcggctgcctggccaaagacggcttgcagcagtctaagtgcccggacactaccccaaaacggcggcgcgcctcgtcgctgtcgcgtgacgccgagcgccgagcctaccaatggtgccgggagtacttgggcggggcctggcgccgagtgcagcccgaggagctgagggtttaccccgtgaggtgggaggtcaggggtcagcctctccggtgcgcggatcggggtcaggggtcagccgcggggccctcaggatgctccatgttttcgcccccctcttgcgcccgcgcctggggcggggcggggccggcctggccgggagggggccggggccgcggcaggtagggccggccgcgggctgagcgcgcctggtgtgggtctgcagcggaggcctcagcaacctgctcttccgctgctcgctcccggaccacctgcccagcgttggcgaggagccccgggaggtgcttctgcggctgtacggagccatcttgcaggtgagggggttgtgagcgccgcagcaccagtggctttagggcctgtcgcttacgcgatgcgggtagtattgttcccgttgcgcagttgaggacaccgaggttcacggtctgagtaacacctcattacaccgaagcctgggcctgtattcccagagctttgggaggctgaggcgagaggatcacttgagcacaggagttcgagaccagcctggacaacatagtgagacccccatctctaaataaaaatagaccaacgctaaagcctgtgctccagagcctccaggcaattggatcagaagtcgcagctctggtgggaggaaggcgagccctcatgtgtgtccctgtgccactttgccttggcccctttgctgtccatcctttttcagggcgtggactccctggtgctagaaagcgtgatgttcgccatacttgcggagcggtcgctggggccccagctgtacggagtcttcccagagggccggctggaacagtacatcccagtacgggcccagtcctaccctctcctccccaaggcacctccaccccctaaccctaccccagtgcccaatgtctgcctccacatccctcaccccaagtagggaatttcccccaaaaccctgacttcccctcattgccccagcccttcccactcctgccccagccccatcaccaccctgatagcttcctgggtgcagagtcggccattgaaaactcaagagcttcgagagccagtgttgtcagcagccattgccacgaagatggcgcaatttcatggcatggagatgcctttcaccaaggagccccactggctgtttgggaccatggagcggtgagtcaggagcctcctcagggctcctgtactcctgagctgaacctccatgccagcggatgtgtcgggggctctatccagccctccacttgagtggatctgatgtcatgggtgacagagcaagactccatttcaaaagaaaaaaagaaatgattgccggacaagtcacacagtgataggagcaggggtgcagtagtctggcctgaggggtagataggcgaggggtgggaaagaatagcagagccagtgtatcctattctttgggcttcaggtacctaaaacagatccaggacctgcccccaactggcctccctgagatgaacctgctggagatgtacagcctgaaggatgagatgggcaacctcaggaagttactagagtctaccccatcgccagtcgtcttctgccacaatgacatccaggaaggtaggagaaggcatctgagtctcctaacccaagatggaagagccagagggctctggagtgagcagaacctcaccccattcccccagggaacatcttgctgctctcagagccagaaaatgctgacagcctcatgctggtggacttcgagtacagcagttataactataggggctttgacattgggaaccatttttgtgagtgggtttatgattatactcacgaggaatggcctttctacaaagcaaggcccacagactaccccactcaagaacagcagttgcattttattcgtcattacctggcagaggcaaagaaaggtgagaccctctcccaagaggagcagagaaaactggaagaagatttgctggtagaagtcagtcggtatgctctggcatcccatttcttctggggtctgtggtccatcctccaggcatccatgtccaccatagaatttggttacttggactatgcccagtctcggttccagttctacttccagcagaaggggcagctgaccagtgtccactcctcatcctgactccaccctcccactccttggatttctcctggagcctccagggcaggaccttggagggaggaacaacgagcagaaggccctggcgactgggctgagcccccaagtgaaactgaggttcaggagaccggcctgttcctgagtttgactctaaagccaccatcctcacgagactctggggccccccaggctcccagacctttgagcaaccttcaccgcacagaaacccagccgcgccctgcaattcccaccgcggaaggtgggtgggttctggttctcgccccacgtttttccccgaccccgatttgggagtaggtgtcaggttcctggtgagggcggggcgggggtggctaggcctgaaggacgtggggacacgggccagagtggctggccccacgcacggacaggagtgaacccgagctgtgccgaccaacccccaggatggcggaagctcaccaggccgtggccttccagttcacggtgaccccagacggggtcgacttccggctcagtcgggaggccctgaaacacgtctacctgtctgggatcaactcctggaagaaacgcctgatccgcatcaagaatggcatcctcaggggcgtgtaccctggcagccccaccagctggctggtcgtcatcatggcaacagtgggttcctccttctgcaacgtggacatctccttggggctggtcagttgcatccagagatgcctccctcaggggtgtggcccctaccagaccccgcagacccgggcacttctcagcatggccatcttctccacgggcgtctgggtgacgggcatcttcttcttccgccaaaccctgaagctgcttctctgctaccatgggtggatgtttgagatgcatggcaagaccagcaacttgaccaggatctgggctatgtgtatccgccttctatccagccggcaccctatgctctacagcttccagacatctctgcccaagcttcctgtgcccagggtgtcagccacaattcagcggtacctagagtctgtgcgccccttgttggatgatgaggaatattaccgcatggagttgctggccaaagaattccaggacaagactgcccccaggctgcagaaatacctggtgctcaagtcatggtgggcaagtaactatgtgagtgactggtgggaagagtacatctaccttcgaggcaggagccctctcatggtgaacagcaactattatgtcatggaccttgtgctcatcaagaatacagacgtgcaggcagcccgcctgggaaacatcatccacgccatgatcatgtatcgccgtaaactggaccgtgaagaaatcaagcctgtgatggcactgggcatagtgcctatgtgctcctaccagatggagaggatgttcaacaccactcggatcccgggcaaggacacagatgtgctacagcacctctcagacagccggcacgtggctgtctaccacaagggacgcttcttcaagctgtggctctatgagggcgcccgtctgctcaagcctcaggatctggagatgcagttccagaggatcctggacgacccctccccacctcagcctggggaggagaagctggcagccctcactgcaggaggaagggtggagtgggcgcaggcacgccaggccttctttagctctggaaagaataaggctgccttggaggccatcgagcgtgccgctttcttcgtggccctggatgaggaatcctactcctatgaccccgaagatgaggccagcctcagcctctatggcaaggccctgctacatggcaactgctacaacaggtgcatctgaactcttggctcccacagaacgcccagcgctttggaaaccacatccgcaaagccctgctggacattgctgatcttttccaagttcccaaggcctacagctgaagcccttaggtacctgtgttttgtttgggaactcggaggccctccccctcccccagctcagaccacagaggtggcaagagaagggctgaagctggaagactgttcatgagggacttgtgtgacctgctttgaaatgtgtgactctgctgagtgacgtaggctctgagatagctgtccacgcccacgtgtttgcttggaataaatacttgcctcagaacctt

SEQ ID NO: 350198 - DNA, 2377 bp, Homo sapiens
cccgggccggggcacggagagagccgagcgccgcagccgtgagccgaatagagccggagagacccgagtatgaccggagaagcccaggccggccggaagaggagccgagcgcggccggaaggaaccgagcccgtccgaagggagcggagcgcagcctggcctggggcccggtcgagcccgcgccatggcggccgaggcgacagctgtggccggaagcggggctgttggcggctgcctggccaaagacggcttgcagcagtctaagtgcccggacactaccccaaaacggcggcgcgcctcgtcgctgtcgcgtgacgccgagcgccgagcctaccaatggtgccgggagtacttgggcggggcctggcgccgagtgcagcccgaggagctgagggtttaccccgtgaggtgggaggtcaggggtcagcctctccggtgcgcggatcggggtcaggggtcagccgcggggccctcaggatgctccatgttttcgcccccctcttgcgcccgcgcctggggcggggcggggccggcctggccgggagggggccggggccgcggcaggtagggccggccgcgggctgagcgcgcctggtgtgggtctgcagcggaggcctcagcaacctgctcttccgctgctcgctcccggaccacctgcccagcgttggcgaggagccccgggaggtgcttctgcggctgtacggagccatcttgcaggtgagggggttgtgagcgccgcagcaccagtggctttagggcctgtcgcttacgcgatgcgggtagtattgttcccgttgcgcagttgaggacaccgaggttcacggtctgagtaacacctcattacaccgaagcctgggcctgtattcccagagctttgggaggctgaggcgagaggatcacttgagcacaggagttcgagaccagcctggacaacatagtgagacccccatctctaaataaaaatagaccaacgctaaagcctgtgctccagagcctccaggcaattggatcagaagtcgcagctctggtgggaggaaggcgagccctcatgtgtgtccctgtgccactttgccttggcccctttgctgtccatcctttttcagggcgtggactccctggtgctagaaagcgtgatgttcgccatacttgcggagcggtcgctggggccccagctgtacggagtcttcccagagggccggctggaacagtacatcccagtacgggcccagtcctaccctctcctccccaaggcacctccaccccctaaccctaccccagtgcccaatgtctgcctccacatccctcaccccaagtagggaatttcccccaaaaccctgacttcccctcattgccccagcccttcccactcctgccccagccccatcaccaccctgatagcttcctgggtgcagagtcggccattgaaaactcaagagcttcgagagccagtgttgtcagcagccattgccacgaagatggcgcaatttcatggcatggagatgcctttcaccaaggagccccactggctgtttgggaccatggagcggtacctaaaacagatccaggacctgcccccaactggcctccctgagatgaacctgctggagatgtacagcctgaaggatgagatgggcaacctcaggaagttactagagtctaccccatcgccagtcgtcttctgccacaatgacatccaggaagggaacatcttgctgctctcagagccagaaaatgctgacagcctcatgctggtggacttcgagtacagcagttataactataggggctttgacattgggaaccatttttgtgagtgggtttatgattatactcacgaggaatggcctttctacaaagcaaggcccacagactaccccactcaagaacagcagttgcattttattcgtcattacctggcagaggcaaagaaaggtgagaccctctcccaagaggagcagagaaaactggaagaagatttgctggtagaagtcagtcggtatgctctggcatcccatttcttctggggtctgtggtccatcctccaggcatccatgtccaccatagaatttggttacttggactatgcccagtctcggttccagttctacttccagcagaaggggcagctgaccagtgtccactcctcatcctgactccaccctcccactccttggatttctcctggagcctccagggcaggaccttggagggaggaacaacgagcagaaggccctggcgactgggctgagcccccaagtgaaactgaggttcaggagaccggcctgttcctgagtttgagtaggtccccatggctggcaggccagagccccgtgctgtgtatgtaacacaataaacaagcttcttcttcccaccctgt

SEQ ID NO: 350199 - DNA, 3178 bp, Homo sapiens
cccgggccggggcacggagagagccgagcgccgcagccgtgagccgaatagagccggagagacccgagtatgaccggagaagcccaggccggccggaagaggagccgagcgcggccggaaggaaccgagcccgtccgaagggagcggagcgcagcctggcctggggcccggtcgagcccgcgccatggcggccgaggcgacagctgtggccggaagcggggctgttggcggctgcctggccaaagacggcttgcagcagtctaagtgcccggacactaccccaaaacggcggcgcgcctcgtcgctgtcgcgtgacgccgagcgccgagcctaccaatggtgccgggagtacttgggcggggcctggcgccgagtgcagcccgaggagctgagggtttaccccgtgaggtgggaggtcaggggtcagcctctccggtgcgcggatcggggtcaggggtcagccgcggggccctcaggatgctccatgttttcgcccccctcttgcgcccgcgcctggggcggggcggggccggcctggccgggagggggccggggccgcggcaggtagggccggccgcgggctgagcgcgcctggtgtgggtctgcagcggaggcctcagcaacctgctcttccgctgctcgctcccggaccacctgcccagcgttggcgaggagccccgggaggtgcttctgcggctgtacggagccatcttgcaggtgagggggttgtgagcgccgcagcaccagtggctttagggcctgtcgcttacgcgatgcgggtagtattgttcccgttgcgcagttgaggacaccgaggttcacggtctgagtaacacctcattacaccgaagcctgggcctgtattcccagagctttgggaggctgaggcgagaggatcacttgagcacaggagttcgagaccagcctggacaacatagtgagacccccatctctaaataaaaatagaccaacgctaaagcctgtgctccagagcctccaggcaattggatcagaagtcgcagctctggtgggaggaaggcgagccctcatgtgtgtccctgtgccactttgccttggcccctttgctgtccatcctttttcagggcgtggactccctggtgctagaaagcgtgatgttcgccatacttgcggagcggtcgctggggccccagctgtacggagtcttcccagagggccggctggaacagtacatcccagtacgggcccagtcctaccctctcctccccaaggcacctccaccccctaaccctaccccagtgcccaatgtctgcctccacatccctcaccccaagtagggaatttcccccaaaaccctgacttcccctcattgccccagcccttcccactcctgccccagccccatcaccaccctgatagcttcctgggtgcagagtcggccattgaaaactcaagagcttcgagagccagtgttgtcagcagccattgccacgaagatggcgcaatttcatggcatggagatgcctttcaccaaggagccccactggctgtttgggaccatggagcggtgagtcaggagcctcctcagggctcctgtactcctgagctgaacctccatgccagcggatgtgtcgggggctctatccagccctccacttgagtggatctgatgtcatgggtgacagagcaagactccatttcaaaagaaaaaaagaaatgattgccggacaagtcacacagtgataggagcaggggtgcagtagtctggcctgaggggtagataggcgaggggtgggaaagaatagcagagccagtgtatcctattctttgggcttcaggtacctaaaacagatccaggacctgcccccaactggcctccctgagatgaacctgctggagatgtacagcctgaaggatgagatgggcaacctcaggaagttactagagtctaccccatcgccagtcgtcttctgccacaatgacatccaggaaggtaggagaaggcatctgagtctcctaacccaagatggaagagccagagggctctggagtgagcagaacctcaccccattcccccagggaacatcttgctgctctcagagccagaaaatgctgacagcctcatgctggtggacttcgagtacagcagttataactataggggctttgacattgggaaccatttttgtgagtgggtttatgattatactcacgaggaatggcctttctacaaagcaaggcccacagactaccccactcaagaacagcagttgcattttattcgtcattacctggcagaggcaaagaaaggtgagaccctctcccaagaggagcagagaaaactggaagaagatttgctggtagaagtcagtcggtatgctctggcatcccatttcttctggggtctgtggtccatcctccaggcatccatgtccaccatagaatttggttacttggactatgcccagtctcggttccagttctacttccagcagaaggggcagctgaccagtgtccactcctcatcctgactccaccctcccactccttggatttctcctggagcctccagggcaggaccttggagggaggaacaacgagcagaaggccctggcgactgggctgagcccccaagtgaaactgaggttcaggagaccggcctgttcctgagtttgactctaaagccaccatcctcacgagactctggggccccccaggctcccagacctttgagcaaccttcaccgcacagaaacccagccgcgccctgcaattcccaccgcggaaggtgggtgggttctggttctcgccccacgtttttccccgaccccgatttgggagtaggtgtcaggttcctggtgagggcggggcgggggtggctaggcctgaaggacgtggggacacgggccagagtggctggccccacgcacggacaggagtgaacccgagctgtgagtaggggccggcacagggcggcccgcgggggtctgggccctcagccctgcacaggggcgaggacggcgctggggcccgcgcgctcgggtggggaagggcgggctcccgaaccctgcctctgtccaggccggctccacttccaggggcgcctctctcccctgcccgcgccctcgctgacgccccccaactccaggctgcccttcgccgtccttggggctcctggagctttcaaggcccaaatcccc

SEQ ID NO: 350200 - DNA, 2394 bp, Homo sapiens
cccgggccggggcacggagagagccgagcgccgcagccgtgagccgaatagagccggagagacccgagtatgaccggagaagcccaggccggccggaagaggagccgagcgcggccggaaggaaccgagcccgtccgaagggagcggagcgcagcctggcctggggcccggtcgagcccgcgccatggcggccgaggcgacagctgtggccggaagcggggctgttggcggctgcctggccaaagacggcttgcagcagtctaagtgcccggacactaccccaaaacggcggcgcgcctcgtcgctgtcgcgtgacgccgagcgccgagcctaccaatggtgccgggagtacttgggcggggcctggcgccgagtgcagcccgaggagctgagggtttaccccgtgaggtgggaggtcaggggtcagcctctccggtgcgcggatcggggtcaggggtcagccgcggggccctcaggatgctccatgttttcgcccccctcttgcgcccgcgcctggggcggggcggggccggcctggccgggagggggccggggccgcggcaggtagggccggccgcgggctgagcgcgcctggtgtgggtctgcagcggaggcctcagcaacctgctcttccgctgctcgctcccggaccacctgcccagcgttggcgaggagccccgggaggtgcttctgcggctgtacggagccatcttgcaggtgagggggttgtgagcgccgcagcaccagtggctttagggcctgtcgcttacgcgatgcgggtagtattgttcccgttgcgcagttgaggacaccgaggttcacggtctgagtaacacctcattacaccgaagcctgggcctgtattcccagagctttgggaggctgaggcgagaggatcacttgagcacaggagttcgagaccagcctggacaacatagtgagacccccatctctaaataaaaatagaccaacgctaaagcctgtgctccagagcctccaggcaattggatcagaagtcgcagctctggtgggaggaaggcgagccctcatgtgtgtccctgtgccactttgccttggcccctttgctgtccatcctttttcagggcgtggactccctggtgctagaaagcgtgatgttcgccatacttgcggagcggtcgctggggccccagctgtacggagtcttcccagagggccggctggaacagtacatcccagtacgggcccagtcctaccctctcctccccaaggcacctccaccccctaaccctaccccagtgcccaatgtctgcctccacatccctcaccccaagtagggaatttcccccaaaaccctgacttcccctcattgccccagcccttcccactcctgccccagccccatcaccaccctgatagcttcctgggtgcagagtcggccattgaaaactcaagagcttcgagagccagtgttgtcagcagccattgccacgaagatggcgcaatttcatggcatggagatgcctttcaccaaggagccccactggctgtttgggaccatggagcggtgagtcaggagcctcctcagggctcctgtactcctgagctgaacctccatgccagcggatgtgtcgggggctctatccagccctccacttgagtggatctgatgtcatgggtgacagagcaagactccatttcaaaagaaaaaaagaaatgattgccggacaagtcacacagtgataggagcaggggtgcagtagtctggcctgaggggtagataggcgaggggtgggaaagaatagcagagccagtgtatcctattctttgggcttcaggtacctaaaacagatccaggacctgcccccaactggcctccctgagatgaacctgctggagatgtacagcctgaaggatgagatgggcaacctcaggaagttactagagtctaccccatcgccagtcgtcttctgccacaatgacatccaggaaggtaggagaaggcatctgagtctcctaacccaagatggaagagccagagggctctggagtgagcagaacctcaccccattcccccagggaacatcttgctgctctcagagccagaaaatgctgacagcctcatgctggtggacttcgagtacagcagttataactataggggctttgacattgggaaccatttttgtgagtgggtttatgattatactcacgaggaatggcctttctacaaagcaaggcccacagactaccccactcaagaacagcagttgcattttattcgtcattacctggcagaggcaaagaaaggtgagaccctctcccaagaggagcagagaaaactggaagaagatttgctggtagaagtcagtcgtgtatgtaacacaataaacaagcttcttcttcccaccctgt

SEQ ID NO: 350201 - DNA, 696 bp, Homo sapiens
ctccctcagactgtcttttgcgtaccctcctcctgaagatgtcttggccggctgtgccctttctccaccagctaaacgtcatgcctcctagacatgacccagagtcctgcttggagagccctaccctcagctgacccttcccatgtcttggcagtgccaggcggtcatcgagagttcctaccaggtggccaaggcgttggcagacgacgtggagttgtactgcttccagttcctgccctttggcaaaggcctcatcaagaagtgccggaccagccctgatgcctttgtgcagatcgcgctgcagctggctcacttccgggtaggagccccgcctcccgctgctgagagggcagggtggtaccagggtccacctgccagattcacccctctgtatatcccaggacaggggtaagttctgcctgacctatgaggcctcaatgaccagaatgttccgggagggacggactgagactgtgcgttcctgtaccagcgagtccacagcctttgtgcaggccatgatggaggggtcccacacagtaagtgtcctctgcccatgtgggggtcacagtcgtcgggtgaggtgccccctctgcctcctgtctgcctggagggccagggctactcttcacccctttacttctgccccgcagaaagcagacctgcgagatctcttccagaaggctgctaagaagcacc

SEQ ID NO: 350202 - DNA, 522 bp, Homo sapiens
cggacgcgtgggtcgacccacgcgtcgcccacgcgtcgaaataccctaaactgcctttttttcttttttgaggtggggggagggaggaggtatattggaactcttctaacctccttgggctatattttctctcctcgagttgctcctcatggctgggctcatttcggtccctttctccttggtcccagaccttgggggaaaggaaggaagtgcatgtttgggaactggcattactggaactaatggttttaacctccttaaccaccagcatccctcctctccccaaggtgaagtggagggtgctgtggtgagctggccactccagagctgcagtgccactggaggagtcagactaccatgacatcgtagggaaggaggggagatttttttgtagtttttaattggggtgtgggaggggcggggaggttttctataaactgtatcattttctgctgagggtggagtgtcccatccttttaatcaaggtgattgtgattttgactaataaaaaagaatttgtaa

SEQ ID NO: 350203 - DNA, 1004 bp, Homo sapiens
ttggtaccggccgcgagtcgtaaggatcagttctggacagtgcaggttgccaagaaaagggacctagtttagccattgccctggagatgaaattaatggaggctcaaggatagatgagctctgagtttctcagtactccctcaagactggacatcttggtctttttctcaggcctgagggggaaccatttttggtgtgataaataccctaaactgcctttttttcttttttgaggtggggggagggaggaggtatattggaactcttctaacctccttgggctatattttctctcctcgagttgctcctcatggctgggctcatttcggtccctttctccttggtcccagaccttgggggaaaggaaggaagtgcatgtttgggaactggcattactggaactaatggttttaacctccttaaccaccagcatccctcctctccccaaggtgaagtggagggtgctgtggtgagctggccactccagagctgcagtgccactggaggagtcagactaccatgacatcgtagggaaggaggggagatttttttgtagtttttaattggggtgtgggaggggcggggaggttttctataaactgtatcattttctgctgagggtggagtgtcccatccttttaatcaaggtgattgtgattttgactaataaaaaagaatttgtaattgtaattgtgggggaacttggcttttaagggaggggatagcatgttaattgagatttctgtcctcagatctctcatccagccactttcctaacctggcaaccactgatttccaagcatagccttggtgcaagggcagaaatctgggctagtggtttaacatgtctgaaactttgggttaagtgtcttcccagaagcttatctttccttccaggggtgggataaaaggagttaatcacccatgcttcttttccccatcctttgcccatctttaccacctgagggattcaggaacttgcccaccctcaagagcctcaaagg

SEQ ID NO: 350204 - DNA, 2383 bp, Homo sapiens
ggtctggtacggtccggaagttagggatagcccttcaagaagaggtatgattgctaccacttttccccacaaagtgacgaaaggaaacagcgacggaagcgcaaccgaaccctggaattggtgtctcgactggtccattcccggcccacccccattaaccggctcgagccactcccaggacgaagtcaaggcctcggaaggcgactacaactcccagcaggtcgagcagctccgcccgcgctgattctccattggccttccgggggtggggattagatgggaggtggccgtggggctgcggccgggatttgtcccctcttcggcttccgtagaggaagtggcgcggaccttcatttggggtttcggttcccccccttccccttccccggggtctgggggtgacattgcaccgcgcccctcgtggggtcgcgttgccaccccacgcggactccccagctggcgcgcccctcccatttgcctgtcctggtcaggcccccaccccccttcccacctgaccagccatgggggctgcggtgtttttcggctgcactttcgtcgcgttcggcccggccttcgcgcttttcttgatcactgtggctggggacccgcttcgcgttatcatcctggtcgcaggggcatttttctggctggtctccctgctcctggcctctgtggtctggttcatcttggtccatgtgaccgaccggtcagatgcccggctccagtacggcctcctgatttttggtgctgctgtctctgtccttctacaggaggtgttccgctttgcctactacaagctgcttaagaaggcagatgaggggttagcatcgctgagtgaggacggaagatcacccatctccatccgccagatggcctatgtttctggtctctccttcggtatcatcagtggtgtcttctctgttatcaatattttggctgatgcacttgggccaggtgtggttgggatccatggagactcaccctattacttcctgacttcagcctttctgacagcagccattatcctgctccataccttttggggagttgtgttctttgatgcctgtgagaggagacggtactgggctttgggcctggtggttgggagtcacctactgacatcgggactgacattcctgaacccctggtatgaggccagcctgctgcccatctatgcagtcactgtttccatggggctctgggccttcatcacagctggagggtccctccgaagtattcagcgcagcctcttgtgtaaggactgactacctggactgatcgcctgacagatcccacctgcctgtccactgcccatgactgagcccagccccagcccgggtccattgcccacattctctgtctccttctcgtcggtctaccccactacctccagggttttgctttgtccttttgtgaccgttagtctctaagctttaccaggagcagcctgggttcagccagtcagtgactggtgggtttgaatctgcacttatccccaccacctggggacccccttgttgtgtccaggactccccctgtgtcagtgctctgctctcaccctgcccaagactcacctcccttcccctctgcaggccgacggcaggaggacagtcgggtgatggtgtattctgccctgcgcatcccacccgaggactgagggaacctaggggggacccctgggcctggggtgccctcctgatgtcctcgccctgtatttctccatctccagttctggacagtgcaggttgccaagaaaagggacctagtttagccattgccctggagatgaaattaatggaggctcaaggatagatgagctctgagtttctcagtactccctcaagactggacatcttggtctttttctcaggcctgagggggaaccatttttggtgtgataaataccctaaactgcctttttttcttttttgaggtggggggagggaggaggtatattggaactcttctaacctccttgggctatattttctctcctcgagttgctcctcatggctgggctcatttcggtccctttctccttggtcccagaccttgggggaaaggaaggaagtgcatgtttgggaactggcattactggaactaatggttttaacctccttaaccaccagcatccctcctctccccaaggtgaagtggagggtgctgtggtgagctggccactccagagctgcagtgccactggaggagtcagactaccatgacatcgtagggaaggaggggagatttttttgtagtttttaattggggtgtgggaggggcggggaggttttctataaactgtatcattttctgctgagggtggagtgtcccatccttttaatcaaggtgattgtgattttgactaataaaaaagaatttgtaa

SEQ ID NO: 350205 - DNA, 2566 bp, Homo sapiens
atgcggctgctggagaggacccggtgatgagaaaaggaggaggatggaaaaagagtggaaaagaagggaggggaggaaaagggcggagcccgtggccttaaataggatggtgatgcgccagagatgcgcggtttgagtgttcagagattggttgtgctactgaaggcggcggacgtgggacccccggttccgtctcgggaagtaactcatctgccccctctttgaacacctccgctcacgagcgcagcacgtggaaaccgtcagtgatttgtgtctgcaacgtgtgtgagagaatggagattcaaacaggatctaccccctctgcagcccttcaagaagaggtatgattgctaccacttttccccacaaagtgacgaaaggaaacagcgacggaagcgcaaccgaaccctggaattggtgtctcgactggtccattcccggcccacccccattaaccggctcgagccactcccaggacgaagtcaaggcctcggaaggcgactacaactcccagcaggtcgagcagctccgcccgcgctgattctccattggccttccgggggtggggattagatgggaggtggccgtggggctgcggccgggatttgtcccctcttcggcttccgtagaggaagtggcgcggaccttcatttggggtttcggttcccccccttccccttccccggggtctgggggtgacattgcaccgcgcccctcgtggggtcgcgttgccaccccacgcggactccccagctggcgcgcccctcccatttgcctgtcctggtcaggcccccaccccccttcccacctgaccagccatgggggctgcggtgtttttcggctgcactttcgtcgcgttcggcccggccttcgcgcttttcttgatcactgtggctggggacccgcttcgcgttatcatcctggtcgcaggggcatttttctggctggtctccctgctcctggcctctgtggtctggttcatcttggtccatgtgaccgaccggtcagatgcccggctccagtacggcctcctgatttttggtgctgctgtctctgtccttctacaggaggtgttccgctttgcctactacaagctgcttaagaaggcagatgaggggttagcatcgctgagtgaggacggaagatcacccatctccatccgccagatggcctatgtttctggtctctccttcggtatcatcagtggtgtcttctctgttatcaatattttggctgatgcacttgggccaggtgtggttgggatccatggagactcaccctattacttcctgacttcagcctttctgacagcagccattatcctgctccataccttttggggagttgtgttctttgatgcctgtgagaggagacggtactgggctttgggcctggtggttgggagtcacctactgacatcgggactgacattcctgaacccctggtatgaggccagcctgctgcccatctatgcagtcactgtttccatggggctctgggccttcatcacagctggagggtccctccgaagtattcagcgcagcctcttgtgtaaggactgactacctggactgatcgcctgacagatcccacctgcctgtccactgcccatgactgagcccagccccagcccgggtccattgcccacattctctgtctccttctcgtcggtctaccccactacctccagggttttgctttgtccttttgtgaccgttagtctctaatgctctgctctcaccctgcccaagactcacctcccttcccctctgcaggccgacggcaggaggacagtcgggtgatggtgtattctgccctgcgcatcccacccgaggactgagggaacctaggggggacccctgggcctggggtgccctcctgatgtcctcgccctgtatttctccatctccagttctggacagtgcaggttgccaagaaaagggacctagtttagccattgccctggagatgaaattaatggaggctcaaggatagatgagctctgagtttctcagtactccctcaagactggacatcttggtctttttctcaggcctgagggggaaccatttttggtgtgataaataccctaaactgcctttttttcttttttgaggtggggggagggaggaggtatattggaactcttctaacctccttgggctatattttctctcctcgagttgctcctcatggctgggctcatttcggtccctttctccttggtcccagaccttgggggaaaggaaggaagtgcatgtttgggaactggcattactggaactaatggttttaacctccttaaccaccagcatccctcctctccccaaggtgaagtggagggtgctgtggtgagctggccactccagagctgcagtgccactggaggagtcagactaccatgacatcgtagggaaggaggggagatttttttgtagtttttaattggggtgtgggaggggcggggaggttttctataaactgtatcattttctgctgagggtggagtgtcccatccttttaatcaaggtgattgtgattttgactaataaaaaagaatttgtaa

SEQ ID NO: 350206 - DNA, 2188 bp, Homo sapiens
ggggttgggtctgggagatttgtcctttcccgcagttggtttccaccttccaaggatctcacagattcctcctatattcctcccagcgacgtcagagaaggcccaaggccgagactcgtgagggggctgtgctgacctaggcaggccgagtcaggtgccttaggggaggatccaggaacggatacctcgcccttccgtgctcgcacactctggctgtcatcgctctgaagactctttaattagatttctcccctttccagtgcgttcacttttctacagatgagtctcttggtggagacagttaccctacctggtccatgtctccctaaccatccggaaggctaacttccacttttcaagcagctttggctggtttccctccttgatttctctggctcccactactattgcttgtctcactgcccctgtcttttctcagggcatttttctggctggtctccctgctcctggcctctgtggtctggttcatcttggtccatgtgaccgaccggtcagatgcccggctccagtacggcctcctgatttttggtgctgctgtctctgtccttctacaggaggtgttccgctttgcctactacaagctgcttaagaaggcagatgaggggttagcatcgctgagtgaggacggaagatcacccatctccatccgccagatggcctatgtttctggtctctccttcggtatcatcagtggtgtcttctctgttatcaatattttggctgatgcacttgggccaggtgtggttgggatccatggagactcaccctattacttcctgacttcagcctttctgacagcagccattatcctgctccataccttttggggagttgtgttctttgatgcctgtgagaggagacggtactgggctttgggcctggtggttgggagtcacctactgacatcgggactgacattcctgaacccctggtatgaggccagcctgctgcccatctatgcagtcactgtttccatggggctctgggccttcatcacagctggagggtccctccgaagtattcagcgcagcctcttgtgtaaggactgactacctggactgatcgcctgacagatcccacctgcctgtccactgcccatgactgagcccagccccagcccgggtccattgcccacattctctgtctccttctcgtcggtctaccccactacctccagggttttgctttgtccttttgtgaccgttagtctctaagctttaccaggagcagcctgggttcagccagtcagtgactggtgggtttgaatctgcacttatccccaccacctggggacccccttgttgtgtccaggactccccctgtgtcagtgctctgctctcaccctgcccaagactcacctcccttcccctctgcaggccgacggcaggaggacagtcgggtgatggtgtattctgccctgcgcatcccacccgaggactgagggaacctaggggggacccctgggcctggggtgccctcctgatgtcctcgccctgtatttctccatctccagttctggacagtgcaggttgccaagaaaagggacctagtttagccattgccctggagatgaaattaatggaggctcaaggatagatgagctctgagtttctcagtactccctcaagactggacatcttggtctttttctcaggcctgagggggaaccatttttggtgtgataaataccctaaactgcctttttttcttttttgaggtggggggagggaggaggtatattggaactcttctaacctccttgggctatattttctctcctcgagttgctcctcatggctgggctcatttcggtccctttctccttggtcccagaccttgggggaaaggaaggaagtgcatgtttgggaactggcattactggaactaatggttttaacctccttaaccaccagcatccctcctctccccaaggtgaagtggagggtgctgtggtgagctggccactccagagctgcagtgccactggaggagtcagactaccatgacatcgtagggaaggaggggagatttttttgtagtttttaattggggtgtgggaggggcggggaggttttctataaactgtatcattttctgctgagggtggagtgtcccatccttttaatcaaggtgattgtgattttgactaataaaaaagaatttgtaa

SEQ ID NO: 350207 - DNA, 1912 bp, Homo sapiens
cccgggagtaccaggagcaccagcaggaccatcagcaccaggggatcctttctcgccagcagggccagggggaccagggggaccaacttcaccaggacgtccatctgacccatcttaagatgggtcagatggacccgcttcgcgttatcatcctgttcgcaggggcatttttctggctggtctccctgctcctggcctctgtggtctggttcatcttggtccatgtgaccgaccggtcagatgcccggctccagtacggcctcctgatttttggtgctgctgtctctgtccttctacaggaggtgttccgctttgcctactacaagctgcttaagaaggcagatgaggggttagcatcgctgagtgaggacggaagatcacccatctccatccgccagatggcctatgtttctggtctctccttcggtatcatcagtggtgtcttctctgttatcaatattttggctgatgcacttgggccaggtgtggttgggatccatggagactcaccctattacttcctgacttcagcctttctgacagcagccattatcctgctccataccttttggggagttgtgttctttgatgcctgtgagaggagacggtactgggctttgggcctggtggttgggagtcacctactgacatcgggactgacattcctgaacccctggtatgaggccagcctgctgcccatctatgcagtcactgtttccatggggctctgggccttcatcacagctggagggtccctccgaagtattcagcgcagcctcttgtgtaaggactgactacctggactgatcgcctgacagatcccacctgcctgtccactgcccatgactgagcccagccccagcccgggtccattgcccacattctctgtctccttctcgtcggtctaccccactacctccagggttttgctttgtccttttgtgaccgttagtctctaagctttaccaggagcagcctgggttcagccagtcagtgactggtgggtttgaatctgcacttatccccaccacctggggacccccttgttgtgtccaggactccccctgtgtcagtgctctgctctcaccctgcccaagactcacctcccttcccctctgcaggccgacggcaggaggacagtcgggtgatggtgtattctgccctgcgcatcccacccgaggactgagggaacctaggggggacccctgggcctggggtgccctcctgatgtcctcgccctgtatttctccatctccagttctggacagtgcaggttgccaagaaaagggacctagtttagccattgccctggagatgaaattaatggaggctcaaggatagatgagctctgagtttctcagtactccctcaagactggacatcttggtctttttctcaggcctgagggggaaccatttttggtgtgataaataccctaaactgcctttttttcttttttgaggtggggggagggaggaggtatattggaactcttctaacctccttgggctatattttctctcctcgagttgctcctcatggctgggctcatttcggtccctttctccttggtcccagaccttgggggaaaggaaggaagtgcatgtttgggaactggcattactggaactaatggttttaacctccttaaccaccagcatccctcctctccccaaggtgaagtggagggtgctgtggtgagctggccactccagagctgcagtgccactggaggagtcagactaccatgacatcgtagggaaggaggggagatttttttgtagtttttaattggggtgtgggaggggcggggaggttttctataaactgtatcattttctgctgagggtggagtgtcccatccttttaatcaaggtgattgtgattttgactaataaaaaagaatttgtaa

SEQ ID NO: 350208 - DNA, 2605 bp, Homo sapiens
atgcggctgctggagaggacccggtgatgagaaaaggaggaggatggaaaaagagtggaaaagaagggaggggaggaaaagggcggagcccgtggccttaaataggatggtgatgcgccagagatgcgcggtttgagtgttcagagattggttgtgctactgaaggcggcggacgtgggacccccggttccgtctcgggaagtaactcatctgccccctctttgaacacctccgctcacgagcgcagcacgtggaaaccgtcagtgatttgtgtctgcaacgtgtgtgagagaatggagattcaaacaggatctaccccctctgcagcccttcaagaagaggtatgattgctaccacttttccccacaaagtgacgaaaggaaacagcgacggaagcgcaaccgaaccctggaattggtgtctcgactggtccattcccggcccacccccattaaccggctcgagccactcccaggacgaagtcaaggcctcggaaggcgactacaactcccagcaggtcgagcagctccgcccgcgctgattctccattggccttccgggggtggggattagatgggaggtggccgtggggctgcggccgggatttgtcccctcttcggcttccgtagaggaagtggcgcggaccttcatttggggtttcggttcccccccttccccttccccggggtctgggggtgacattgcaccgcgcccctcgtggggtcgcgttgccaccccacgcggactccccagctggcgcgcccctcccatttgcctgtcctggtcaggcccccaccccccttcccacctgaccagccatgggggctgcggtgtttttcggctgcactttcgtcgcgttcggcccggccttcgcgcttttcttgatcactgtggctggggacccgcttcgcgttatcatcctggtcgcaggggcatttttctggctggtctccctgctcctggcctctgtggtctggttcatcttggtccatgtgaccgaccggtcagatgcccggctccagtacggcctcctgatttttggtgctgctgtctctgtccttctacaggaggtgttccgctttgcctactacaagctgcttaagaaggcagatgaggggttagcatcgctgagtgaggacggaagatcacccatctccatccgccagatggcctatggtgtggttgggatccatggagactcaccctattacttcctgacttcagcctttctgacagcagccattatcctgctccataccttttggggagttgtgttctttgatgcctgtgagaggagacggtactgggctttgggcctggtggttgggagtcacctactgacatcgggactgacattcctgaacccctggtatgaggccagcctgctgcccatctatgcagtcactgtttccatggggctctgggccttcatcacagctggagggtccctccgaagtattcagcgcagcctcttgtgtaaggactgactacctggactgatcgcctgacagatcccacctgcctgtccactgcccatgactgagcccagccccagcccgggtccattgcccacattctctgtctccttctcgtcggtctaccccactacctccagggttttgctttgtccttttgtgaccgttagtctctaagctttaccaggagcagcctgggttcagccagtcagtgactggtgggtttgaatctgcacttatccccaccacctggggacccccttgttgtgtccaggactccccctgtgtcagtgctctgctctcaccctgcccaagactcacctcccttcccctctgcaggccgacggcaggaggacagtcgggtgatggtgtattctgccctgcgcatcccacccgaggactgagggaacctaggggggacccctgggcctggggtgccctcctgatgtcctcgccctgtatttctccatctccagttctggacagtgcaggttgccaagaaaagggacctagtttagccattgccctggagatgaaattaatggaggctcaaggatagatgagctctgagtttctcagtactccctcaagactggacatcttggtctttttctcaggcctgagggggaaccatttttggtgtgataaataccctaaactgcctttttttcttttttgaggtggggggagggaggaggtatattggaactcttctaacctccttgggctatattttctctcctcgagttgctcctcatggctgggctcatttcggtccctttctccttggtcccagaccttgggggaaaggaaggaagtgcatgtttgggaactggcattactggaactaatggttttaacctccttaaccaccagcatccctcctctccccaaggtgaagtggagggtgctgtggtgagctggccactccagagctgcagtgccactggaggagtcagactaccatgacatcgtagggaaggaggggagatttttttgtagtttttaattggggtgtgggaggggcggggaggttttctataaactgtatcattttctgctgagggtggagtgtcccatccttttaatcaaggtgattgtgattttgactaataaaaaagaatttgtaa

SEQ ID NO: 350209 - DNA, 1677 bp, Homo sapiens
agcgtgatgctgcggtcgttatagaggatccccagcgctgaccaataccttgatcactgtggctggggacccgcttcgcgttatcatcctggtcgcagggaaggcagatgaggggttagcatcgctgagtgaggacggaagatcacccatctccatccgccagatggcctatgtttctggtctctccttcggtatcatcagtggtgtcttctctgttatcaatattttggctgatgcacttgggccaggtgtggttgggatccatggagactcaccctattacttcctgacttcagcctttctgacagcagccattatcctgctccataccttttggggagttgtgttctttgatgcctgtgagaggagacggtactgggctttgggcctggtggttgggagtcacctactgacatcgggactgacattcctgaacccctggtatgaggccagcctgctgcccatctatgcagtcactgtttccatggggctctgggccttcatcacagctggagggtccctccgaagtattcagcgcagcctcttgtgtaaggactgactacctggactgatcgcctgacagatcccacctgcctgtccactgcccatgactgagcccagccccagcccgggtccattgcccacattctctgtctccttctcgtcggtctaccccactacctccagggttttgctttgtccttttgtgaccgttagtctctaagctttaccaggagcagcctgggttcagccagtcagtgactggtgggtttgaatctgcacttatccccaccacctggggacccccttgttgtgtccaggactccccctgtgtcagtgctctgctctcaccctgcccaagactcacctcccttcccctctgcaggccgacggcaggaggacagtcgggtgatggtgtattctgccctgcgcatcccacccgaggactgagggaacctaggggggacccctgggcctggggtgccctcctgatgtcctcgccctgtatttctccatctccagttctggacagtgcaggttgccaagaaaagggacctagtttagccattgccctggagatgaaattaatggaggctcaaggatagatgagctctgagtttctcagtactccctcaagactggacatcttggtctttttctcaggcctgagggggaaccatttttggtgtgataaataccctaaactgcctttttttcttttttgaggtggggggagggaggaggtatattggaactcttctaacctccttgggctatattttctctcctcgagttgctcctcatggctgggctcatttcggtccctttctccttggtcccagaccttgggggaaaggaaggaagtgcatgtttgggaactggcattactggaactaatggttttaacctccttaaccaccagcatccctcctctccccaaggtgaagtggagggtgctgtggtgagctggccactccagagctgcagtgccactggaggagtcagactaccatgacatcgtagggaaggaggggagatttttttgtagtttttaattggggtgtgggaggggcggggaggttttctataaactgtatcattttctgctgagggtggagtgtcccatccttttaatcaaggtgattgtgattttgactaataaaaaagaatttgtaa

SEQ ID NO: 350210 - DNA, 1591 bp, Homo sapiens
agaattgtaaccgggaatggggaggggtcagtggtgaacaggcaatagtgtgatctctgacattgatgagatcctcccttcccccagtttctggtctctccttcggtatcatcagtggtgtcttctctgttatcaatattttggctgatgcacttgggccaggtgtggttgggatccatggagactcaccctattacttcctgacttcagcctttctgacagcagccattatcctgctccataccttttggggagttgtgttctttgatgcctgtgagaggagacggtactgggctttgggcctggtggttgggagtcacctactgacatcgggactgacattcctgaacccctggtatgaggccagcctgctgcccatctatgcagtcactgtttccatggggctctgggccttcatcacagctggagggtccctccgaagtattcagcgcagcctcttgtgtaaggactgactacctggactgatcgcctgacagatcccacctgcctgtccactgcccatgactgagcccagccccagcccgggtccattgcccacattctctgtctccttctcgtcggtctaccccactacctccagggttttgctttgtccttttgtgaccgttagtctctaagctttaccaggagcagcctgggttcagccagtcagtgactggtgggtttgaatctgcacttatccccaccacctggggacccccttgttgtgtccaggactccccctgtgtcagtgctctgctctcaccctgcccaagactcacctcccttcccctctgcaggccgacggcaggaggacagtcgggtgatggtgtattctgccctgcgcatcccacccgaggactgagggaacctaggggggacccctgggcctggggtgccctcctgatgtcctcgccctgtatttctccatctccagttctggacagtgcaggttgccaagaaaagggacctagtttagccattgccctggagatgaaattaatggaggctcaaggatagatgagctctgagtttctcagtactccctcaagactggacatcttggtctttttctcaggcctgagggggaaccatttttggtgtgataaataccctaaactgcctttttttcttttttgaggtggggggagggaggaggtatattggaactcttctaacctccttgggctatattttctctcctcgagttgctcctcatggctgggctcatttcggtccctttctccttggtcccagaccttgggggaaaggaaggaagtgcatgtttgggaactggcattactggaactaatggttttaacctccttaaccaccagcatccctcctctccccaaggtgaagtggagggtgctgtggtgagctggccactccagagctgcagtgccactggaggagtcagactaccatgacatcgtagggaaggaggggagatttttttgtagtttttaattggggtgtgggaggggcggggaggttttctataaactgtatcattttctgctgagggtggagtgtcccatccttttaatcaaggtgattgtgattttgactaataaaaaagaatttgtaa

SEQ ID NO: 350211 - DNA, 1439 bp, Homo sapiens
ctgagctcggaccctatgaagggcgatgagactcaccctataacttcctgacgttcagcctttctgacagcagccattatcctgctccataccttttggggagttgtgttctttgatgcctgtgagaggagacggtactgggctttgggcctggtggttgggagtcacctactgacatcgggactgacattcctgaacccctggtatgaggccagcctgctgcccatctatgcagtcactgtttccatggggctctgggccttcatcacagctggagggtccctccgaagtattcagcgcagcctcttgtgtaaggactgactacctggactgatcgcctgacagatcccacctgcctgtccactgcccatgactgagcccagccccagcccgggtccattgcccacattctctgtctccttctcgtcggtctaccccactacctccagggttttgctttgtccttttgtgaccgttagtctctaagctttaccaggagcagcctgggttcagccagtcagtgactggtgggtttgaatctgcacttatccccaccacctggggacccccttgttgtgtccaggactccccctgtgtcagtgctctgctctcaccctgcccaagactcacctcccttcccctctgcaggccgacggcaggaggacagtcgggtgatggtgtattctgccctgcgcatcccacccgaggactgagggaacctaggggggacccctgggcctggggtgccctcctgatgtcctcgccctgtatttctccatctccagttctggacagtgcaggttgccaagaaaagggacctagtttagccattgccctggagatgaaattaatggaggctcaaggatagatgagctctgagtttctcagtactccctcaagactggacatcttggtctttttctcaggcctgagggggaaccatttttggtgtgataaataccctaaactgcctttttttcttttttgaggtggggggagggaggaggtatattggaactcttctaacctccttgggctatattttctctcctcgagttgctcctcatggctgggctcatttcggtccctttctccttggtcccagaccttgggggaaaggaaggaagtgcatgtttgggaactggcattactggaactaatggttttaacctccttaaccaccagcatccctcctctccccaaggtgaagtggagggtgctgtggtgagctggccactccagagctgcagtgccactggaggagtcagactaccatgacatcgtagggaaggaggggagatttttttgtagtttttaattggggtgtgggaggggcggggaggttttctataaactgtatcattttctgctgagggtggagtgtcccatccttttaatcaaggtgattgtgattttgactaataaaaaagaatttgtaa

SEQ ID NO: 350212 - DNA, 1246 bp, Homo sapiens
tgggtgtctagaggatcccttacgacgaagcgtagaatgcagtcactgtttccatggggctctgggccttcatcacagctggagggtccctccgaagtattcagcgcagcctcttgtgtaaggactgactacctggactgatcgcctgacagatcccacctgcctgtccactgcccatgactgagcccagccccagcccgggtccattgcccacattctctgtctccttctcgtcggtctaccccactacctccagggttttgctttgtccttttgtgaccgttagtctctaagctttaccaggagcagcctgggttcagccagtcagtgactggtgggtttgaatctgcacttatccccaccacctggggacccccttgttgtgtccaggactccccctgtgtcagtgctctgctctcaccctgcccaagactcacctcccttcccctctgcaggccgacggcaggaggacagtcgggtgatggtgtattctgccctgcgcatcccacccgaggactgagggaacctaggggggacccctgggcctggggtgccctcctgatgtcctcgccctgtatttctccatctccagttctggacagtgcaggttgccaagaaaagggacctagtttagccattgccctggagatgaaattaatggaggctcaaggatagatgagctctgagtttctcagtactccctcaagactggacatcttggtctttttctcaggcctgagggggaaccatttttggtgtgataaataccctaaactgcctttttttcttttttgaggtggggggagggaggaggtatattggaactcttctaacctccttgggctatattttctctcctcgagttgctcctcatggctgggctcatttcggtccctttctccttggtcccagaccttgggggaaaggaaggaagtgcatgtttgggaactggcattactggaactaatggttttaacctccttaaccaccagcatccctcctctccccaaggtgaagtggagggtgctgtggtgagctggccactccagagctgcagtgccactggaggagtcagactaccatgacatcgtagggaaggaggggagatttttttgtagtttttaattggggtgtgggaggggcggggaggttttctataaactgtatcattttctgctgagggtggagtgtcccatccttttaatcaaggtgattgtgattttgactaataaaaaagaatttgtaa

SEQ ID NO: 350213 - DNA, 1137 bp, Homo sapiens
  misc_feature (50)..(50): n is a, c, g, or t
catcttggtctttttctcaggcctgagggggaaccatttttggtgtgatnaataccctaaactgcccatgactgagcccagccccagcccgggtccattgcccacattctctgtctccttctcgtcggtctaccccactacctccagggttttgctttgtccttttgtgaccgttagtctctaagctttaccaggagcagcctgggttcagccagtcagtgactggtgggtttgaatctgcacttatccccaccacctggggacccccttgttgtgtccaggactccccctgtgtcagtgctctgctctcaccctgcccaagactcacctcccttcccctctgcaggccgacggcaggaggacagtcgggtgatggtgtattctgccctgcgcatcccacccgaggactgagggaacctaggggggacccctgggcctggggtgccctcctgatgtcctcgccctgtatttctccatctccagttctggacagtgcaggttgccaagaaaagggacctagtttagccattgccctggagatgaaattaatggaggctcaaggatagatgagctctgagtttctcagtactccctcaagactggacatcttggtctttttctcaggcctgagggggaaccatttttggtgtgataaataccctaaactgcctttttttcttttttgaggtggggggagggaggaggtatattggaactcttctaacctccttgggctatattttctctcctcgagttgctcctcatggctgggctcatttcggtccctttctccttggtcccagaccttgggggaaaggaaggaagtgcatgtttgggaactggcattactggaactaatggttttaacctccttaaccaccagcatccctcctctccccaaggtgaagtggagggtgctgtggtgagctggccactccagagctgcagtgccactggaggagtcagactaccatgacatcgtagggaaggaggggagatttttttgtagtttttaattggggtgtgggaggggcggggaggttttctataaactgtatcattttctgctgagggtggagtgtcccatccttttaatcaaggtgattgtgattttgactaataaaaaagaatttgtaa

SEQ ID NO: 350214 - DNA, 1231 bp, Homo sapiens
gggctcgggggcttgatctcacagtgtagcgcgtgcctcagaatgtaggttgaagcagcgagatcttgatctgggcgacgtgtgtacctgtgagacctgtatcgtcatgactacaactgcctagcctggtcctgtacgagcatgtgctcgatgaataagccaatgtctgcagcaccgggatccaaatgttgcgacatactctgttatctattctgtgttgggtttagcccactacctccagggttttgctttgtccttttgtgaccgttagtctctaagctttaccaggagcagcctgggttcagccagtcagtgactggtgggtttgaatctgcacttatccccaccacctggggacccccttgttgtgtccaggactccccctgtgtcagtgctctgctctcaccctgcccaagactcacctcccttcccctctgcaggccgacggcaggaggacagtcgggtgatggtgtattctgccctgcgcatcccacccgaggactgagggaacctaggggggacccctgggcctggggtgccctcctgatgtcctcgccctgtatttctccatctccagttctggacagtgcaggttgccaagaaaagggacctagtttagccattgccctggagatgaaattaatggaggctcaaggatagatgagctctgagtttctcagtactccctcaagactggacatcttggtctttttctcaggcctgagggggaaccatttttggtgtgataaataccctaaactgcctttttttcttttttgaggtggggggagggaggaggtatattggaactcttctaacctccttgggctatattttctctcctcgagttgctcctcatggctgggctcatttcggtccctttctccttggtcccagaccttgggggaaaggaaggaagtgcatgtttgggaactggcattactggaactaatggttttaacctccttaaccaccagcatccctcctctccccaaggtgaagtggagggtgctgtggtgagctggccactccagagctgcagtgccactggaggagtcagactaccatgacatcgtagggaaggaggggagatttttttgtagtttttaattggggtgtgggaggggcggggaggttttctataaactgtatcattttctgctgagggtggagtgtcccatccttttaatcaaggtgattgtgattttgactaataaaaaagaatttgtaa

SEQ ID NO: 350215 - DNA, 614 bp, Homo sapiens
attgcgagcgtcggtacccatctatagagtgcccacgtgatagatgagctctgagtttctcagtactccctcaagactggacatcttggtctttttctcaggcctgagggggaaccatttttggtgtgataaataccctaaactgcctttttttcttttttgaggtggggggagggaggaggtatattggaactcttctaacctccttgggctatattttctctcctcgagttgctcctcatggctgggctcatttcggtccctttctccttggtcccagaccttgggggaaaggaaggaagtgcatgtttgggaactggcattactggaactaatggttttaacctccttaaccaccagcatccctcctctccccaaggtgaagtggagggtgctgtggtgagctggccactccagagctgcagtgccactggaggagtcagactaccatgacatcgtagggaaggaggggagatttttttgtagtttttaattggggtgtgggaggggcggggaggttttctataaactgtatcattttctgctgagggtggagtgtcccatccttttaatcaaggtgattgtgattttgactaataaaaaagaatttgtaa

SEQ ID NO: 350216 - DNA, 1838 bp, Homo sapiens
atgcggctgctggagaggacccggtgatgagaaaaggaggaggatggaaaaagagtggaaaagaagggaggggaggaaaagggcggagcccgtggccttaaataggatggtgatgcgccagagatgcgcggtttgagtgttcagagattggttgtgctactgaaggcggcggacgtgggacccccggttccgtctcgggaagtaactcatctgccccctctttgaacacctccgctcacgagcgcagcacgtggaaaccgtcagtgatttgtgtctgcaacgtgtgtgagagaatggagattcaaacaggatctaccccctctgcagcccttcaagaagaggtatgattgctaccacttttccccacaaagtgacgaaaggaaacagcgacggaagcgcaaccgaaccctggaattggtgtctcgactggtccattcccggcccacccccattaaccggctcgagccactcccaggacgaagtcaaggcctcggaaggcgactacaactcccagcaggtcgagcagctccgcccgcgctgattctccattggccttccgggggtggggattagatgggaggtggccgtggggctgcggccgggatttgtcccctcttcggcttccgtagaggaagtggcgcggaccttcatttggggtttcggttcccccccttccccttccccggggtctgggggtgacattgcaccgcgcccctcgtggggtcgcgttgccaccccacgcggactccccagctggcgcgcccctcccatttgcctgtcctggtcaggcccccaccccccttcccacctgaccagccatgggggctgcggtgtttttcggctgcactttcgtcgcgttcggcccggccttcgcgcttttcttgatcactgtggctggggacccgcttcgcgttatcatcctggtcgcaggggcatttttctggctggtctccctgctcctggcctctgtggtctggttcatcttggtccatgtgaccgaccggtcagatgcccggctccagtacggcctcctgatttttggtgctgctgtctctgtccttctacaggaggtgttccgctttgcctactacaagctgcttaagaaggcagatgaggggttagcatcgctgagtgaggacggaagatcacccatctccatccgccagatggcctatgtttctggtctctccttcggtatcatcagtggtgtcttctctgttatcaatattttggctgatgcacttgggccaggtgtggttgggatccatggagactcaccctattacttcctgacttcagcctttctgacagcagccattatcctgctccataccttttggggagttgtgttctttgatgcctgtgagaggagacggtactgggctttgggcctggtggttgggagtcacctactgacatcgggactgacattcctgaacccctggtatgaggccagcctgctgcccatctatgcagtcactgtttccatggggctctgggccttcatcacagctggagggtccctccgaagtattcagcgcaggctccgccctagccctgagcatactgtctcctttcttgtcttgccgtgaagcttgcccttaggaccaagctccactgcatgccatagtctcacaccctctgtgacctgtgaccatgaggagataagcctcattttaaaggtaagtatctgaaagcatatcatctgctctattggtaataaaggtgcgattctggccctgctctgccttgctccctcaccctgtcaattgcttcagaagctggacagggaaagagggtgttatttactgggctttcaaaagaacctgccaggccag

SEQ ID NO: 350217 - DNA, 469 bp, Homo sapiens
gcggccgactactactactaaattcgcggccgcgtcgtatattggaactcttctaacctccttgggctatattttctctcctcgagttgctcctcatggctgggctcatttcggtccctttctccttggtcccagaccttgggggaaaggaaggaagtgcatgtttgggaactggcattactggaactaatggttttaacctccttaaccaccagcatccctcctctccccaaggtgaagtggagggtgctgtggtgagctggccactccagagctgcagtgccactggaggagtcagactaccatgacatcgtagggaaggaggggagatttttttgtagtttttaattggggtgtgggaggggcggggaggttttctataaactgtatcattttctgctgagggtggagtgtcccatccttttaatcaaggtgattgtgattttgactaataaaaaagaatttgtaa

SEQ ID NO: 350218 - DNA, 1591 bp, Homo sapiens
  misc_feature (1453)..(1453): n is a, c, g, or t
  misc_feature (1459)..(1459): n is a, c, g, or t
  misc_feature (1490)..(1490): n is a, c, g, or t
  misc_feature (1557)..(1557): n is a, c, g, or t
  misc_feature (1584)..(1584): n is a, c, g, or t
atgcggctgctggagaggacccggtgatgagaaaaggaggaggatggaaaaagagtggaaaagaagggaggggaggaaaagggcggagcccgtggccttaaataggatggtgatgcgccagagatgcgcggtttgagtgttcagagattggttgtgctactgaaggcggcggacgtgggacccccggttccgtctcgggaagtaactcatctgccccctctttgaacacctccgctcacgagcgcagcacgtggaaaccgtcagtgatttgtgtctgcaacgtgtgtgagagaatggagattcaaacaggatctaccccctctgcagcccttcaagaagaggtatgattgctaccacttttccccacaaagtgacgaaaggaaacagcgacggaagcgcaaccgaaccctggaattggtgtctcgactggtccattcccggcccacccccattaaccggctcgagccactcccaggacgaagtcaaggcctcggaaggcgactacaactcccagcaggtcgagcagctccgcccgcgctgattctccattggccttccgggggtggggattagatgggaggtggccgtggggctgcggccgggatttgtcccctcttcggcttccgtagaggaagtggcgcggaccttcatttggggtttcggttcccccccttccccttccccggggtctgggggtgacattgcaccgcgcccctcgtggggtcgcgttgccaccccacgcggactccccagctggcgcgcccctcccatttgcctgtcctggtcaggcccccaccccccttcccacctgaccagccatgggggctgcggtgtttttcggctgcactttcgtcgcgttcggcccggccttcgcgcttttcttgatcactgtggctggggacccgcttcgcgttatcatcctggtcgcaggggcatttttctggctggtctccctgctcctggcctctgtggtctggttcatcttggtccatgtgaccgaccggtcagatgcccggctccagtacggcctcctgatttttggtgctgctgtctctgtccttctacaggaggtgttccgctttgcctactacaagctgcttaagaaggcagatgaggggttagcatcgctgagtgaggacggaagatcacccatctccatccgccagatggcctatgtttctggtctctccttcggtatcatcagtggtgtcttctctgttatcaatattttggctgatgcacttgggccaggtgtggttgggatccatggagactcaccctattacttcctgacttcagcctttctgacagcagccattatcctgctccataccttttggggagttgtgttctttgatgcctgtgagaggagacggtactgggctttgggcctggtggttgggagtcacctactgacatcgggactgacattcctgaaccccctggtaatganggcaangcctggctgcccaatctaatggcaagtcaantggttttccaatgggggctcctggggcctttcaatcaacaagctgggaaggggtcccctcccggaangtaatttcaagcggcaagctccttggntggccga

SEQ ID NO: 350219 - DNA, 1700 bp, Homo sapiens
atgcggctgctggagaggacccggtgatgagaaaaggaggaggatggaaaaagagtggaaaagaagggaggggaggaaaagggcggagcccgtggccttaaataggatggtgatgcgccagagatgcgcggtttgagtgttcagagattggttgtgctactgaaggcggcggacgtgggacccccggttccgtctcgggaagtaactcatctgccccctctttgaacacctccgctcacgagcgcagcacgtggaaaccgtcagtgatttgtgtctgcaacgtgtgtgagagaatggagattcaaacaggatctaccccctctgcagcccttcaagaagaggtatgattgctaccacttttccccacaaagtgacgaaaggaaacagcgacggaagcgcaaccgaaccctggaattggtgtctcgactggtccattcccggcccacccccattaaccggctcgagccactcccaggacgaagtcaaggcctcggaaggcgactacaactcccagcaggtcgagcagctccgcccgcgctgattctccattggccttccgggggtggggattagatgggaggtggccgtggggctgcggccgggatttgtcccctcttcggcttccgtagaggaagtggcgcggaccttcatttggggtttcggttcccccccttccccttccccggggtctgggggtgacattgcaccgcgcccctcgtggggtcgcgttgccaccccacgcggactccccagctggcgcgcccctcccatttgcctgtcctggtcaggcccccaccccccttcccacctgaccagccatgggggctgcggtgtttttcggctgcactttcgtcgcgttcggcccggccttcgcgcttttcttgatcactgtggctggggacccgcttcgcgttatcatcctggtcgcaggggcatttttctggctggtctccctgctcctggcctctgtggtctggttcatcttggtccatgtgaccgaccggtcagatgcccggctccagtacggcctcctgatttttggtgctgctgtctctgtccttctacaggaggtgttccgctttgcctactacaagctgcttaagaaggcagatgaggggttagcatcgctgagtgaggacggaagatcacccatctccatccgccagatggcctatgtttctggtctctccttcggtatcatcagtggtgtcttctctgttatcaatattttggctgatgcacttgggccaggtgtggttgggatccatggagactcaccctattacttcctgacttcagggtaagatccaccttctatctagcctttaccccccatccatccttgtccctgatctgatttattggccttccctgagagacttctttggctcaacatctcaggagcctgggagaagatcagggatgtatctcctccccatctccctccctgcagcctttctgacagcagccattatcctgctccataccttttggggagttgtgttctttgatgcctgtgagaggagacggtactgggctttgggcctggtggttgggagtcacctactgacatcgggactggtgagttggagacaggggcctgagttagggagaaaagcatttaatggtgagtgggatgtgggggaaagggtatcctcacttcttaacatttttaacttacctgggaggaggaggaaagg

SEQ ID NO: 350220 - DNA, 1455 bp, Homo sapiens
  misc_feature (1317)..(1317): n is a, c, g, or t
  misc_feature (1323)..(1323): n is a, c, g, or t
  misc_feature (1354)..(1354): n is a, c, g, or t
  misc_feature (1421)..(1421): n is a, c, g, or t
  misc_feature (1448)..(1448): n is a, c, g, or t
atgcggctgctggagaggacccggtgatgagaaaaggaggaggatggaaaaagagtggaaaagaagggaggggaggaaaagggcggagcccgtggccttaaataggatggtgatgcgccagagatgcgcggtttgagtgttcagagattggttgtgctactgaaggcggcggacgtgggacccccggttccgtctcgggaagtaactcatctgccccctctttgaacacctccgctcacgagcgcagcacgtggaaaccgtcagtgatttgtgtctgcaacgtgtgtgagagaatggagattcaaacaggatctaccccctctgcagcccttcaagaagaggtatgattgctaccacttttccccacaaagtgacgaaaggaaacagcgacggaagcgcaaccgaaccctggaattggtgtctcgactggtccattcccggcccacccccattaaccggctcgagccactcccaggacgaagtcaaggcctcggaaggcgactacaactcccagcaggtcgagcagctccgcccgcgctgattctccattggccttccgggggtggggattagatgggaggtggccgtggggctgcggccgggatttgtcccctcttcggcttccgtagaggaagtggcgcggaccttcatttggggtttcggttcccccccttccccttccccggggtctgggggtgacattgcaccgcgcccctcgtggggtcgcgttgccaccccacgcggactccccagctggcgcgcccctcccatttgcctgtcctggtcaggcccccaccccccttcccacctgaccagccatgggggctgcggtgtttttcggctgcactttcgtcgcgttcggcccggccttcgcgcttttcttgatcactgtggctggggacccgcttcgcgttatcatcctggtcgcagggaggtgttccgctttgcctactacaagctgcttaagaaggcagatgaggggttagcatcgctgagtgaggacggaagatcacccatctccatccgccagatggcctatgtttctggtctctccttcggtatcatcagtggtgtcttctctgttatcaatattttggctgatgcacttgggccaggtgtggttgggatccatggagactcaccctattacttcctgacttcagcctttctgacagcagccattatcctgctccataccttttggggagttgtgttctttgatgcctgtgagaggagacggtactgggctttgggcctggtggttgggagtcacctactgacatcgggactgacattcctgaaccccctggtaatganggcaangcctggctgcccaatctaatggcaagtcaantggttttccaatgggggctcctggggcctttcaatcaacaagctgggaaggggtcccctcccggaangtaatttcaagcggcaagctccttggntggccga

SEQ ID NO: 350221 - DNA, 313 bp, Homo sapiens
tctagagtatcaccggagagcgtgtctataatgcatggtataacctccttaaccaccagcatccctcctctccccaaggtgaagtggagggtgctgtggtgagctggccactccagagctgcagtgccactggaggagtcagactaccatgacatcgtagggaaggaggggagatttttttgtagtttttaattggggtgtgggaggggcggggaggttttctataaactgtatcattttctgctgagggtggagtgtcccatccttttaatcaaggtgattgtgattttgactaataaaaaagaatttgtaa

SEQ ID NO: 350222 - DNA, 2680 bp, Homo sapiens
atgcggctgctggagaggacccggtgatgagaaaaggaggaggatggaaaaagagtggaaaagaagggaggggaggaaaagggcggagcccgtggccttaaataggatggtgatgcgccagagatgcgcggtttgagtgttcagagattggttgtgctactgaaggcggcggacgtgggacccccggttccgtctcgggaagtaactcatctgccccctctttgaacacctccgctcacgagcgcagcacgtggaaaccgtcagtgatttgtgtctgcaacgtgtgtgagagaatggagattcaaacaggatctaccccctctgcagcccttcaagaagaggtatgattgctaccacttttccccacaaagtgacgaaaggaaacagcgacggaagcgcaaccgaaccctggaattggtgtctcgactggtccattcccggcccacccccattaaccggctcgagccactcccaggacgaagtcaaggcctcggaaggcgactacaactcccagcaggtcgagcagctccgcccgcgctgattctccattggccttccgggggtggggattagatgggaggtggccgtggggctgcggccgggatttgtcccctcttcggcttccgtagaggaagtggcgcggaccttcatttggggtttcggttcccccccttccccttccccggggtctgggggtgacattgcaccgcgcccctcgtggggtcgcgttgccaccccacgcggactccccagctggcgcgcccctcccatttgcctgtcctggtcaggcccccaccccccttcccacctgaccagccatgggggctgcggtgtttttcggctgcactttcgtcgcgttcggcccggccttcgcgcttttcttgatcactgtggctggggacccgcttcgcgttatcatcctggtcgcaggggcatttttctggctggtctccctgctcctggcctctgtggtctggttcatcttggtccatgtgaccgaccggtcagatgcccggctccagtacggcctcctgatttttggtgctgctgtctctgtccttctacaggaggtgttccgctttgcctactacaagctgcttaagaaggcagatgaggggttagcatcgctgagtgaggacggaagatcacccatctccatccgccagatggcctatgtttctggtctctccttcggtatcatcagtggtgtcttctctgttatcaatattttggctgatgcacttgggccaggtgtggttgggatccatggagactcaccctattacttcctgacttcagcctttctgacagcagccattatcctgctccataccttttggggagttgtgttctttgatgcctgtgagaggagacggtactgggctttgggcctggtggttgggagtcacctactgacatcgggactgacattcctgaacccctggtatgaggccagcctgctgcccatctatgcagtcactgtttccatggggctctgggccttcatcacagctggagggtccctccgaagtattcagcgcagcctcttgtgtaaggactgactacctggactgatcgcctgacagatcccacctgcctgtccactgcccatgactgagcccagccccagcccgggtccattgcccacattctctgtctccttctcgtcggtctaccccactacctccagggttttgctttgtccttttgtgaccgttagtctctaagctttaccaggagcagcctgggttcagccagtcagtgactggtgggtttgaatctgcacttatccccaccacctggggacccccttgttgtgtccaggactccccctgtgtcagtgctctgctctcaccctgcccaagactcacctcccttcccctctgcaggccgacggcaggaggacagtcgggtgatggtgtattctgccctgcgcatcccacccgaggactgagggaacctaggggggacccctgggcctggggtgccctcctgatgtcctcgccctgtatttctccatctccagttctggacagtgcaggttgccaagaaaagggacctagtttagccattgccctggagatgaaattaatggaggctcaaggatagatgagctctgagtttctcagtactccctcaagactggacatcttggtctttttctcaggcctgagggggaaccatttttggtgtgataaataccctaaactgcctttttttcttttttgaggtggggggagggaggaggtatattggaactcttctaacctccttgggctatattttctctcctcgagttgctcctcatggctgggctcatttcggtccctttctccttggtcccagaccttgggggaaaggaaggaagtgcatgtttgggaactggcattactggaactaatggttttaacctccttaaccaccagcatccctcctctccccaaggtgaagtggagggtgctgtggtgagctggccactccagagctgcagtgccactggaggagtcagactaccatgacatcgtagggaaggaggggagatttttttgtagtttttaattggggtgtgggaggggcggggaggttttctataaactgtatcattttctgctgagggtggagtgtcccatccttttaatcaaggtgattgtgattttgactaataaaaaagaatttgtaa

SEQ ID NO: 350223 - DNA, 2338 bp, Homo sapiens
atgcggctgctggagaggacccggtgatgagaaaaggaggaggatggaaaaagagtggaaaagaagggaggggaggaaaagggcggagcccgtggccttaaataggatggtgatgcgccagagatgcgcggtttgagtgttcagagattggttgtgctactgaaggcggcggacgtgggacccccggttccgtctcgggaagtaactcatctgccccctctttgaacacctccgctcacgagcgcagcacgtggaaaccgtcagtgatttgtgtctgcaacgtgtgtgagagaatggagattcaaacaggatctaccccctctgcagcccttcaagaagaggtatgattgctaccacttttccccacaaagtgacgaaaggaaacagcgacggaagcgcaaccgaaccctggaattggtgtctcgactggtccattcccggcccacccccattaaccggctcgagccactcccaggacgaagtcaaggcctcggaaggcgactacaactcccagcaggtcgagcagctccgcccgcgctgattctccattggccttccgggggtggggattagatgggaggtggccgtggggctgcggccgggatttgtcccctcttcggcttccgtagaggaagtggcgcggaccttcatttggggtttcggttcccccccttccccttccccggggtctgggggtgacattgcaccgcgcccctcgtggggtcgcgttgccaccccacgcggactccccagctggcgcgcccctcccatttgcctgtcctggtcaggcccccaccccccttcccacctgaccagccatgggggctgcggtgtttttcggctgcactttcgtcgcgttcggcccggccttcgcgcttttcttgatcactgtggctggggacccgcttcgcgttatcatcctggtcgcaggggcatttttctggctggtctccctgctcctggcctctgtggtctggttcatcttggtccatgtgaccgaccggtcagatgcccggctccagtacggcctcctgatttttggtgctgctgtctctgtccttctacaggaggtgttccgctttgcctactacaagctgcttaagaaggcagatgaggggttagcatcgctgagtgaggacggaagatcacccatctccatccgccagatggcctatgtttctggtctctccttcggtatcatcagtggtgtcttctctgttatcaatattttggctgatgcacttgggccaggtgtggttgggatccatggagactcaccctattacttcctgacttcagcctttctgacagcagccattatcctgctccataccttttggggagttgtgttctttgatgcctgtgagaggagacggtactgggctttgggcctggtggttgggagtcacctactgacatcgggactgacattcctgaacccctggtatgaggccagcctgctgcccatctatgcagtcactgtttccatggggctctgggccttcatcacagctggagggtccctccgaagtattcagcgcaggcaggccgacggcaggaggacagtcgggtgatggtgtattctgccctgcgcatcccacccgaggactgagggaacctaggggggacccctgggcctggggtgccctcctgatgtcctcgccctgtatttctccatctccagttctggacagtgcaggttgccaagaaaagggacctagtttagccattgccctggagatgaaattaatggaggctcaaggatagatgagctctgagtttctcagtactccctcaagactggacatcttggtctttttctcaggcctgagggggaaccatttttggtgtgataaataccctaaactgcctttttttcttttttgaggtggggggagggaggaggtatattggaactcttctaacctccttgggctatattttctctcctcgagttgctcctcatggctgggctcatttcggtccctttctccttggtcccagaccttgggggaaaggaaggaagtgcatgtttgggaactggcattactggaactaatggttttaacctccttaaccaccagcatccctcctctccccaaggtgaagtggagggtgctgtggtgagctggccactccagagctgcagtgccactggaggagtcagactaccatgacatcgtagggaaggaggggagatttttttgtagtttttaattggggtgtgggaggggcggggaggttttctataaactgtatcattttctgctgagggtggagtgtcccatccttttaatcaaggtgattgtgattttgactaataaaaaagaatttgtaa

SEQ ID NO: 350224 - DNA, 3000 bp, Homo sapiens
atgcggctgctggagaggacccggtgatgagaaaaggaggaggatggaaaaagagtggaaaagaagggaggggaggaaaagggcggagcccgtggccttaaataggatggtgatgcgccagagatgcgcggtttgagtgttcagagattggttgtgctactgaaggcggcggacgtgggacccccggttccgtctcgggaagtaactcatctgccccctctttgaacacctccgctcacgagcgcagcacgtggaaaccgtcagtgatttgtgtctgcaacgtgtgtgagagaatggagattcaaacaggatctaccccctctgcagcccttcaagaagaggtatgattgctaccacttttccccacaaagtgacgaaaggaaacagcgacggaagcgcaaccgaaccctggaattggtgtctcgactggtccattcccggcccacccccattaaccggctcgagccactcccaggacgaagtcaaggcctcggaaggcgactacaactcccagcaggtcgagcagctccgcccgcgctgattctccattggccttccgggggtggggattagatgggaggtggccgtggggctgcggccgggatttgtcccctcttcggcttccgtagaggaagtggcgcggaccttcatttggggtttcggttcccccccttccccttccccggggtctgggggtgacattgcaccgcgcccctcgtggggtcgcgttgccaccccacgcggactccccagctggcgcgcccctcccatttgcctgtcctggtcaggcccccaccccccttcccacctgaccagccatgggggctgcggtgtttttcggctgcactttcgtcgcgttcggcccggccttcgcgcttttcttgatcactgtggctggggacccgcttcgcgttatcatcctggtcgcaggggcatttttctggctggtctccctgctcctggcctctgtggtctggttcatcttggtccatgtgaccgaccggtcagatgcccggctccagtacggcctcctgatttttggtgctgctgtctctgtccttctacaggaggtgttccgctttgcctactacaagctgcttaagaaggcagatgaggggttagcatcgctgagtgaggacggaagatcacccatctccatccgccagatggcctatgtttctggtctctccttcggtatcatcagtggtgtcttctctgttatcaatattttggctgatgcacttgggccaggtgtggttgggatccatggagactcaccctattacttcctgacttcagcctttctgacagcagccattatcctgctccataccttttggggagttgtgttctttgatgcctgtgagaggagacggtactgggctttgggcctggtggttgggagtcacctactgacatcgggactgacattcctgaacccctggtatgaggccagcctgctgcccatctatgcagtcactgtttccatggggctctgggccttcatcacagctggagggtccctccgaagtattcagcgcagcctcttgtgtaaggactgactacctggactgatcgcctgacagatcccacctgcctgtccactgcccatgactgagcccagccccagcccgggtccattgcccacattctctgtctccttctcgtcggtctaccccactacctccagggttttgctttgtccttttgtgaccgttagtctctaagctttaccaggagcagcctgggttcagccagtcagtgactggtgggtttgaatctgcacttatccccaccacctggggacccccttgttgtgtccaggactccccctgtgtcagtgctctgctctcaccctgcccaagactcacctcccttcccctctgcaggccgacggcaggaggacagtcgggtgatggtgtattctgccctgcgcatcccacccgaggactgagggaacctaggggggacccctgggcctggggtgccctcctgatgtcctcgccctgtatttctccatctccagttctggacagtgcaggttgccaagaaaagggacctagtttagccattgccctggagatgaaattaatggaggctcaaggatagatgagctctgagtttctcagtactccctcaagactggacatcttggtctttttctcaggcctgagggggaaccatttttggtgtgataaataccctaaactgcctttttttcttttttgaggtggggggagggaggaggtatattggaactcttctaacctccttgggctatattttctctcctcgagttgctcctcatggctgggctcatttcggtccctttctccttggtcccagaccttgggggaaaggaaggaagtgcatgtttgggaactggcattactggaactaatggttttaacctccttaaccaccagcatccctcctctccccaaggtgaagtggagggtgctgtggtgagctggccactccagagctgcagtgccactggaggagtcagactaccatgacatcgtagggaaggaggggagatttttttgtagtttttaattggggtgtgggaggggcggggaggttttctataaactgtatcattttctgctgagggtggagtgtcccatccttttaatcaaggtgattgtgattttgactaataaaaaagaatttgtaattgtaattgtgggggaacttggcttttaagggaggggatagcatgttaattgagatttctgtcctcagatctctcatccagccactttcctaacctggcaaccactgatttccaagcatagccttggtgcaagggcagaaatctgggctagtggtttaacatgtctgaaactttgggttaagtgtcttcccagaagcttatctttccttccaggggtgggataaaaggagttaatcacccatgcttcttttccccatcctttgcccatctttaccacctgagggattcaggaacttgcccaccctcaagagcctcaaagg

SEQ ID NO: 350225 - DNA, 2509 bp, Homo sapiens
atgcggctgctggagaggacccggtgatgagaaaaggaggaggatggaaaaagagtggaaaagaagggaggggaggaaaagggcggagcccgtggccttaaataggatggtgatgcgccagagatgcgcggtttgagtgttcagagattggttgtgctactgaaggcggcggacgtgggacccccggttccgtctcgggaagtaactcatctgccccctctttgaacacctccgctcacgagcgcagcacgtggaaaccgtcagtgatttgtgtctgcaacgtgtgtgagagaatggagattcaaacaggatctaccccctctgcagcccttcaagaagaggtatgattgctaccacttttccccacaaagtgacgaaaggaaacagcgacggaagcgcaaccgaaccctggaattggtgtctcgactggtccattcccggcccacccccattaaccggctcgagccactcccaggacgaagtcaaggcctcggaaggcgactacaactcccagcaggtcgagcagctccgcccgcgctgattctccattggccttccgggggtggggattagatgggaggtggccgtggggctgcggccgggatttgtcccctcttcggcttccgtagaggaagtggcgcggaccttcatttggggtttcggttcccccccttccccttccccggggtctgggggtgacattgcaccgcgcccctcgtggggtcgcgttgccaccccacgcggactccccagctggcgcgcccctcccatttgcctgtcctggtcaggcccccaccccccttcccacctgaccagccatgggggctgcggtgtttttcggctgcactttcgtcgcgttcggcccggccttcgcgcttttcttgatcactgtggctggggacccgcttcgcgttatcatcctggtcgcagggaaggcagatgaggggttagcatcgctgagtgaggacggaagatcacccatctccatccgccagatggcctatgtttctggtctctccttcggtatcatcagtggtgtcttctctgttatcaatattttggctgatgcacttgggccaggtgtggttgggatccatggagactcaccctattacttcctgacttcagcctttctgacagcagccattatcctgctccataccttttggggagttgtgttctttgatgcctgtgagaggagacggtactgggctttgggcctggtggttgggagtcacctactgacatcgggactgacattcctgaacccctggtatgaggccagcctgctgcccatctatgcagtcactgtttccatggggctctgggccttcatcacagctggagggtccctccgaagtattcagcgcagcctcttgtgtaaggactgactacctggactgatcgcctgacagatcccacctgcctgtccactgcccatgactgagcccagccccagcccgggtccattgcccacattctctgtctccttctcgtcggtctaccccactacctccagggttttgctttgtccttttgtgaccgttagtctctaagctttaccaggagcagcctgggttcagccagtcagtgactggtgggtttgaatctgcacttatccccaccacctggggacccccttgttgtgtccaggactccccctgtgtcagtgctctgctctcaccctgcccaagactcacctcccttcccctctgcaggccgacggcaggaggacagtcgggtgatggtgtattctgccctgcgcatcccacccgaggactgagggaacctaggggggacccctgggcctggggtgccctcctgatgtcctcgccctgtatttctccatctccagttctggacagtgcaggttgccaagaaaagggacctagtttagccattgccctggagatgaaattaatggaggctcaaggatagatgagctctgagtttctcagtactccctcaagactggacatcttggtctttttctcaggcctgagggggaaccatttttggtgtgataaataccctaaactgcctttttttcttttttgaggtggggggagggaggaggtatattggaactcttctaacctccttgggctatattttctctcctcgagttgctcctcatggctgggctcatttcggtccctttctccttggtcccagaccttgggggaaaggaaggaagtgcatgtttgggaactggcattactggaactaatggttttaacctccttaaccaccagcatccctcctctccccaaggtgaagtggagggtgctgtggtgagctggccactccagagctgcagtgccactggaggagtcagactaccatgacatcgtagggaaggaggggagatttttttgtagtttttaattggggtgtgggaggggcggggaggttttctataaactgtatcattttctgctgagggtggagtgtcccatccttttaatcaaggtgattgtgattttgactaataaaaaagaatttgtaa

SEQ ID NO: 350226 - DNA, 1608 bp, Homo sapiens
aacatagcagtaaggccctggtgatcggacgaaggcagatgaggggttagcatcgctgagtgaggacggaagatcacccatctccatccgccagatggcctatgtttctggtctctccttcggtatcatcagtggtgtcttctctgttatcaatattttggctgatgcacttgggccaggtgtggttgggatccatggagactcaccctattacttcctgacttcagcctttctgacagcagccattatcctgctccataccttttggggagttgtgttctttgatgcctgtgagaggagacggtactgggctttgggcctggtggttgggagtcacctactgacatcgggactgacattcctgaacccctggtatgaggccagcctgctgcccatctatgcagtcactgtttccatggggctctgggccttcatcacagctggagggtccctccgaagtattcagcgcagcctcttgtgtaaggactgactacctggactgatcgcctgacagatcccacctgcctgtccactgcccatgactgagcccagccccagcccgggtccattgcccacattctctgtctccttctcgtcggtctaccccactacctccagggttttgctttgtccttttgtgaccgttagtctctaagctttaccaggagcagcctgggttcagccagtcagtgactggtgggtttgaatctgcacttatccccaccacctggggacccccttgttgtgtccaggactccccctgtgtcagtgctctgctctcaccctgcccaagactcacctcccttcccctctgcaggccgacggcaggaggacagtcgggtgatggtgtattctgccctgcgcatcccacccgaggactgagggaacctaggggggacccctgggcctggggtgccctcctgatgtcctcgccctgtatttctccatctccagttctggacagtgcaggttgccaagaaaagggacctagtttagccattgccctggagatgaaattaatggaggctcaaggatagatgagctctgagtttctcagtactccctcaagactggacatcttggtctttttctcaggcctgagggggaaccatttttggtgtgataaataccctaaactgcctttttttcttttttgaggtggggggagggaggaggtatattggaactcttctaacctccttgggctatattttctctcctcgagttgctcctcatggctgggctcatttcggtccctttctccttggtcccagaccttgggggaaaggaaggaagtgcatgtttgggaactggcattactggaactaatggttttaacctccttaaccaccagcatccctcctctccccaaggtgaagtggagggtgctgtggtgagctggccactccagagctgcagtgccactggaggagtcagactaccatgacatcgtagggaaggaggggagatttttttgtagtttttaattggggtgtgggaggggcggggaggttttctataaactgtatcattttctgctgagggtggagtgtcccatccttttaatcaaggtgattgtgattttgactaataaaaaagaatttgtaa

SEQ ID NO: 350227 - DNA, 2552 bp, Homo sapiens
atgcggctgctggagaggacccggtgatgagaaaaggaggaggatggaaaaagagtggaaaagaagggaggggaggaaaagggcggagcccgtggccttaaataggatggtgatgcgccagagatgcgcggtttgagtgttcagagattggttgtgctactgaaggcggcggacgtgggacccccggttccgtctcgggaagtaactcatctgccccctctttgaacacctccgctcacgagcgcagcacgtggaaaccgtcagtgatttgtgtctgcaacgtgtgtgagagaatggagattcaaacaggatctaccccctctgcagcccttcaagaagaggtatgattgctaccacttttccccacaaagtgacgaaaggaaacagcgacggaagcgcaaccgaaccctggaattggtgtctcgactggtccattcccggcccacccccattaaccggctcgagccactcccaggacgaagtcaaggcctcggaaggcgactacaactcccagcaggtcgagcagctccgcccgcgctgattctccattggccttccgggggtggggattagatgggaggtggccgtggggctgcggccgggatttgtcccctcttcggcttccgtagaggaagtggcgcggaccttcatttggggtttcggttcccccccttccccttccccggggtctgggggtgacattgcaccgcgcccctcgtggggtcgcgttgccaccccacgcggactccccagctggcgcgcccctcccatttgcctgtcctggtcaggcccccaccccccttcccacctgaccagccatgggggctgcggtgtttttcggctgcactttcgtcgcgttcggcccggccttcgcgcttttcttgatcactgtggctggggacccgcttcgcgttatcatcctggtcgcaggggcatttttctggctggtctccctgctcctggcctctgtggtctggttcatcttggtccatgtgaccgaccggtcagatgcccggctccagtacggcctcctgatttttggtgctgctgtctctgtccttctacaggaggtgttccgctttgcctactacaagctgcttaagaaggcagatgaggggttagcatcgctgagtgaggacggaagatcacccatctccatccgccagatggcctatgtttctggtctctccttcggtatcatcagtggtgtcttctctgttatcaatattttggctgatgcacttgggccaggtgtggttgggatccatggagactcaccctattacttcctgacttcagacattcctgaacccctggtatgaggccagcctgctgcccatctatgcagtcactgtttccatggggctctgggccttcatcacagctggagggtccctccgaagtattcagcgcagcctcttgtgtaaggactgactacctggactgatcgcctgacagatcccacctgcctgtccactgcccatgactgagcccagccccagcccgggtccattgcccacattctctgtctccttctcgtcggtctaccccactacctccagggttttgctttgtccttttgtgaccgttagtctctaagctttaccaggagcagcctgggttcagccagtcagtgactggtgggtttgaatctgcacttatccccaccacctggggacccccttgttgtgtccaggactccccctgtgtcagtgctctgctctcaccctgcccaagactcacctcccttcccctctgcaggccgacggcaggaggacagtcgggtgatggtgtattctgccctgcgcatcccacccgaggactgagggaacctaggggggacccctgggcctggggtgccctcctgatgtcctcgccctgtatttctccatctccagttctggacagtgcaggttgccaagaaaagggacctagtttagccattgccctggagatgaaattaatggaggctcaaggatagatgagctctgagtttctcagtactccctcaagactggacatcttggtctttttctcaggcctgagggggaaccatttttggtgtgataaataccctaaactgcctttttttcttttttgaggtggggggagggaggaggtatattggaactcttctaacctccttgggctatattttctctcctcgagttgctcctcatggctgggctcatttcggtccctttctccttggtcccagaccttgggggaaaggaaggaagtgcatgtttgggaactggcattactggaactaatggttttaacctccttaaccaccagcatccctcctctccccaaggtgaagtggagggtgctgtggtgagctggccactccagagctgcagtgccactggaggagtcagactaccatgacatcgtagggaaggaggggagatttttttgtagtttttaattggggtgtgggaggggcggggaggttttctataaactgtatcattttctgctgagggtggagtgtcccatccttttaatcaaggtgattgtgattttgactaataaaaaagaatttgtaa

SEQ ID NO: 350228 - DNA, 2237 bp, Homo sapiens
atgcggctgctggagaggacccggtgatgagaaaaggaggaggatggaaaaagagtggaaaagaagggaggggaggaaaagggcggagcccgtggccttaaataggatggtgatgcgccagagatgcgcggtttgagtgttcagagattggttgtgctactgaaggcggcggacgtgggacccccggttccgtctcgggaagtaactcatctgccccctctttgaacacctccgctcacgagcgcagcacgtggaaaccgtcagtgatttgtgtctgcaacgtgtgtgagagaatggagattcaaacaggatctaccccctctgcagcccttcaagaagaggtatgattgctaccacttttccccacaaagtgacgaaaggaaacagcgacggaagcgcaaccgaaccctggaattggtgtctcgactggtccattcccggcccacccccattaaccggctcgagccactcccaggacgaagtcaaggcctcggaaggcgactacaactcccagcaggtcgagcagctccgcccgcgctgattctccattggccttccgggggtggggattagatgggaggtggccgtggggctgcggccgggatttgtcccctcttcggcttccgtagaggaagtggcgcggaccttcatttggggtttcggttcccccccttccccttccccggggtctgggggtgacattgcaccgcgcccctcgtggggtcgcgttgccaccccacgcggactccccagctggcgcgcccctcccatttgcctgtcctggtcaggcccccaccccccttcccacctgaccagccatgggggctgcggtgtttttcggctgcactttcgtcgcgttcggcccggccttcgcgcttttcttgatcactgtggctggggacccgcttcgcgttatcatcctggtcgcaggggcatttttctggctggtctccctgctcctggcctctgtggtctggttcatcttggtccatgtgaccgaccggtcagatgcccggctccagtacggcctcctgatttttggtgctgctgtctctgtccttctacaggaggtgttccgctttgcctactacaagctgcttaagaaggcagatgaggggttagcatcgctgagtgaggacggaagatcacccatctccatccgccagatggcctatgtttctggtctctccttcggtatcatcagtggtgtcttctctgttatcaatattttggctgatgcacttgggccaggtgtggttgggatccatggagactcaccctattacttcctgacttcagcctttctgacagcagccattatcctgctccataccttttggggagttgtgttctttgatgcctgtgagaggagacggtactgggctttgggcctggtggttgggagtcacctactgacatcgggactgacattcctgaacccctggtatgaggccagcctgctgcccatctatgcagtcactgtttccatggggctctgggccttcatcacagctggagggtccctccgaagtattcagcgcagcctcttgtgtaaggactgactacctggactgatcgcctgacagatcccacctgcctgtccactgcccatgactgagcccagccccagcccgggtccattgcccacattctctgtctccttctcgtcggtctaccccactacctccagggttttgctttgtccttttgtgaccgttagtctctaagctttaccaggagcagcctgggttcagccagtcagtgactggtgggtttgaatctgcacttatccccaccacctggggacccccttgttgtgtccaggactccccctgtgtcagtgctctgctctcaccctgcccaagactcacctcccttcccctctctttctccttggtcccagaccttgggggaaaggaaggaagtgcatgtttgggaactggcattactggaactaatggttttaacctccttaaccaccagcatccctcctctccccaaggtgaagtggagggtgctgtggtgagctggccactccagagctgcagtgccactggaggagtcagactaccatgacatcgtagggaaggaggggagatttttttgtagtttttaattggggtgtgggaggggcggggaggttttctataaactgtatcattttctgctgagggtggagtgtcccatccttttaatcaaggtgattgtgattttgactaataaaaaagaatttgtaa

SEQ ID NO: 350229 - DNA, 1359 bp, Homo sapiens
atgcggctgctggagaggacccggtgatgagaaaaggaggaggatggaaaaagagtggaaaagaagggaggggaggaaaagggcggagcccgtggccttaaataggatggtgatgcgccagagatgcgcggtttgagtgttcagagattggttgtgctactgaaggcggcggacgtgggacccccggttccgtctcgggaagtaactcatctgccccctctttgaacacctccgctcacgagcgcagcacgtggaaaccgtcagtgatttgtgtctgcaacgtgtgtgagagaatggagattcaaacaggatctaccccctctgcagcccttcaagaagaggtatgattgctaccacttttccccacaaagtgacgaaaggaaacagcgacggaagcgcaaccgaaccctggaattggtgtctcgactggtccattcccggcccacccccattaaccggctcgagccactcccaggacgaagtcaaggcctcggaaggcgactacaactcccagcaggtcgagcagctccgcccgcgctgattctccattggccttccgggggtggggattagatgggaggtggccgtggggctgcggccgggatttgtcccctcttcggcttccgtagaggaagtggcgcggaccttcatttggggtttcggttcccccccttccccttccccggggtctgggggtgacattgcaccgcgcccctcgtggggtcgcgttgccaccccacgcggactccccagctggcgcgcccctcccatttgcctgtcctggtcaggcccccaccccccttcccacctgaccagccatgggggctgcggtgtttttcggctgcactttcgtcgcgttcggcccggccttcgcgcttttcttgatcactgtggctggggacccgcttcgcgttatcatcctggtcgcaggggcatttttctggctggtctccctgctcctggcctctgtggtctggttcatcttggtccatgtgaccgaccggtcagatgcccggctccagtacggcctcctgatttttggtgctgctgtctctgtccttctacaggaggtgttccgctttgcctactacaagctgcttaagaaggcagatgaggggttagcatcgctgagtgaggacggaagatcacccatctccatccgccagatggcctatgtttctggtctctccttcggtatcatcagtggtgtcttctctgttatcaatattttggctgatgcacttgggccaggtgtggttgggatccatggagactcaccctattacttcctgacttcagtatagctttctgacagagcaatatcatgtcaaacttggggagtggacatgatctgtaaga

SEQ ID NO: 350230 - DNA, 1667 bp, Homo sapiens
atgcggctgctggagaggacccggtgatgagaaaaggaggaggatggaaaaagagtggaaaagaagggaggggaggaaaagggcggagcccgtggccttaaataggatggtgatgcgccagagatgcgcggtttgagtgttcagagattggttgtgctactgaaggcggcggacgtgggacccccggttccgtctcgggaagtaactcatctgccccctctttgaacacctccgctcacgagcgcagcacgtggaaaccgtcagtgatttgtgtctgcaacgtgtgtgagagaatggagattcaaacaggatctaccccctctgcagcccttcaagaagaggtatgattgctaccacttttccccacaaagtgacgaaaggaaacagcgacggaagcgcaaccgaaccctggaattggtgtctcgactggtccattcccggcccacccccattaaccggctcgagccactcccaggacgaagtcaaggcctcggaaggcgactacaactcccagcaggtcgagcagctccgcccgcgctgattctccattggccttccgggggtggggattagatgggaggtggccgtggggctgcggccgggatttgtcccctcttcggcttccgtagaggaagtggcgcggaccttcatttggggtttcggttcccccccttccccttccccggggtctgggggtgacattgcaccgcgcccctcgtggggtcgcgttgccaccccacgcggactccccagctggcgcgcccctcccatttgcctgtcctggtcaggcccccaccccccttcccacctgaccagccatgggggctgcggtgtttttcggctgcactttcgtcgcgttcggcccggccttcgcgcttttcttgatcactgtggctggggacccgcttcgcgttatcatcctggtcgcagggaaggcagatgaggggttagcatcgctgagtgaggacggaagatcacccatctccatccgccagatggcctatgtttctggtctctccttcggtatcatcagtggtgtcttctctgttatcaatattttggctgatgcacttgggccaggtgtggttgggatccatggagactcaccctattacttcctgacttcagcctttctgacagcagccattatcctgctccataccttttggggagttgtgttctttgatgcctgtgagaggagacggtactgggctttgggcctggtggttgggagtcacctactgacatcgggactgacattcctgaacccctggtatgaggccagcctgctgcccatctatgcagtcactgtttccatggggctctgggccttcatcacagctggagggtccctccgaagtattcagcgcaggctccgccctagccctgagcatactgtctcctttcttgtcttgccgtgaagcttgcccttaggaccaagctccactgcatgccatagtctcacaccctctgtgacctgtgaccatgaggagataagcctcattttaaaggtaagtatctgaaagcatatcatctgctctattggtaataaaggtgcgattctggccctgctctgccttgctccctcaccctgtcaattgcttcagaagctggacagggaaagagggtgttatttactgggctttcaaaagaacctgccaggccag

SEQ ID NO: 350231 - DNA, 2584 bp, Homo sapiens
gccctgcgcgttttgggctgcggttggagggccgcagttgcagtcagggtccgccagctcggggccagcgcatggggctgctgagaccgctccggacgtgcgaagcgttcgcggtgcggtaggaagctgaagtcttcagcagaaccctgacctaggtagggagtctcaatggccctgggtgaagaaaaggcagaagcggaagcatctgaagacacaaaggcccagtcctatgggagagggagctgcagggagcgggagctggacatcccagggcccatgagtggggagcagcccccacgcctggaagctgagggagggctcatctcccctgtatggggggcagaagggatacctgcccctacttgctggattgggactgaccctggcagcccctctagagcccaccagccacaggccagtgatgccaacagagagcccgtagctgagaggtctgagcctgcactcagtggcctgcctcctgccaccatggggtctggagaccttctgctctccggggaaagccaggtggagaagaccaagctttcttcctccgaggagttccctcagactctgagccttcccagaacaacaactatttgctcaggacatgatgctgataccgaagatgatccatccctagcagatttgccccaggcactggacctcagccagcagcctcacagctcaggtctctcttgcctgtcacagtggaagtccgtgctgagcccaggttccgcagctcagccttccagctgcagcatctctgcttcctccacaggcagcagtctccagggtcaccaggagagggcggagcctcgtggtggttctctggccaaggtctcctcctccctggagccggtcgtcccccaggaaccttcctctgtggtggggctaggacctcggccccagtggtcaccacagcctgtgttctctgggggtgatgcttctgggctaggcaggagacgcctctccttccaggctgagtactgggcctgtgtgctgccagattccctgcctccatcacccgaccgccactcccctctctggaacccaaataaagagtatgaagatctgcttgactatacttacccactgaggcccgggcctcagctcccaaagcaccttgatagccgtgtgccagctgaccctgtcctgcaggactccggggtagacctggatagcttctctgtctctccagcaagcaccctcaaatcacctactaatgtctcccccaactgcccaccagcagaggccactgccctgccattttctgggcccagagagccaagccttaagcagtggccctccagagtaccccagaaacagggtggcatgggcttggcatcttggagccaacttgcatctacccccagagccccaggcagtagggatgctcgttgggagcgcagagagccagccctgaggggtgcgaaggaccggctgactataggcaagcaccttgatatgggctctccccagctaaggacacgggacagagggtggccctcgcccaggccagagagggagaagaggaccagccagagtgcccggcgccctacctgcacagagtctaggtggaaatcagaagaggaagtggaaagtgatgacgagtatcttgccctccccgctcggctgacacaggtttctagcctggtttcgtatctaggatccatttctaccttggttaccctgcccactggggatatcaaagggcagagccccttggaagtgtcagacagtgatgggccagcttccttcccttcaagctccagccaaagccagcttccccctggagctgccctccaaggatctggggatcctgagggccagaatccctgtttcctgcgctccttcgtccgtgcccacgactccgcaggggaaggcagtctggggagcagccaggccctcggggtctcctctggactgctgaaaacacgcccctccttgccagctaggttggaccggtggccattctcagacccagatgttgaagggcagcttcccaggaaaggaggagaacagggaaaagaatcactggtgcaatgtgtgaagacattttgctgtcagctggaagagctgatctgctggctgtataatgttgcagatgttactgaccacgggactgcagccaggtccaatcttacaagtctcaagtcttctctgcagctttaccggcaatttaagaaagatatagatgaacatcagtctctgacggagagtgtcttacagaagggggagattcttcttcagtgcctgttggagaacaccccagttttagaggatgtccttgggaggatcgcaaagcagtctggtgagctggagagccacgcagatcgcctgtatgactctatcttggcctctctggacatgctggctggctgcacccttatccctgacaaaaagcccatggcggcaatggagcacccatgtgaaggggtttaacctggcatcttctcaggcagaggtgcaacctgtcggccaaacactggctagtgagaaaaaaatccttcaagaagtccttgcaagagccattcaacactgaagtcaagggggaaaccttcaatatactagctttaaaatgcct

SEQ ID NO: 350232 - DNA, 543 bp, Homo sapiens
gaatggaataaattctgagactcccatagccctgaattaaaagagaaccccatgaggtgagggcgctagaaggagaccctaactccaagctgtttgtgagccagcctctgtcagggaagatgcttctgatgtcaaactaaacaggaaaaactactgactctatttaccttgggttcaaagaagctgaagttaaactgttgcactgtttacttggggaattctgcagacctgatggggtgaatcttacacattagaggggaataaggcttccctacatgctgtgcttttcaaataacgtttacaaaacaatagtaacgaagcttctgccttttctttttctgatacgccttaagcaatttaagaaagatatagatgaacatcagtctctgacggagagtgtcttacagaagggggagattcttcttcagtgcctgttggagaacaccccaggtgagatgcttaaggttttggatttagccagagcttaatccctgtcagcagcaggcccagggaccgcactatccctggtaaggagctggtacc

SEQ ID NO: 350233 - DNA, 729 bp, Homo sapiens
  misc_feature (282)..(282): n is a, c, g, or t
gccctgcgcgttttgggctgcggttggagggccgcagttgcagtcagggtccgccagctcggggccagcgcatggggctgctgagaccgctccggacgtgcgaagcgttcgcggtgcggtaggaagctgaagtcttcagcagaaccctgacctaggtagggagtctcaatggccctgggtgaagaaaaggcagaagcggaagcatctgaagacacaaaggcccagtcctatgggagagggagctgcagggagctgggggagccttggacattcccatggggncccaatagaggtgggggatgcatgccccctactgccttggaaaggcttgagcgggaggtgctcaatcgttccgcctttgtacttgcgagggggtgccatgacacggggggattaccctttgctcaccattaactatggcctggggacctttgggagaccgttgatcccgccttgggcaatggcccaccctttcgttaaagagaagggcccacaaacgccaaggtcccttaacaagtgttggcccccagtgctttggaatattgccgcggaaagcgtgagtggaaagtgcaattggccccgcgtggtgtaaagggccgtttcgcacgggaaagggggggtgctgtttggcaagcggccccgtgtgggccaaaccgtttcccatagtgggtttgcggggcccccttttatggcacccgaattcccccgttttggtcgacaaaatagacg

SEQ ID NO: 350234 - DNA, 6486 bp, Homo sapiens
gccctgcgcgttttgggctgcggttggagggccgcagttgcagtcagggtccgccagctcggggccagcgcatggggctgctgagaccgctccggacgtgcgaagcgttcgcggtgcggtaggaagctgaagtcttcagcagaaccctgacctaggtagggagtctcaatggccctgggtgaagaaaaggcagaagcggaagcatctgaagacacaaaggcccagtcctatgggagagggagctgcagggagcgggagctggacatcccagggcccatgagtggggagcagcccccacgcctggaagctgagggagggctcatctcccctgtatggggggcagaagggatacctgcccctacttgctggattgggactgaccctggcagcccctctagagcccaccagccacaggccagtgatgccaacagagagcccgtagctgagaggtctgagcctgcactcagtggcctgcctcctgccaccatggggtctggagaccttctgctctccggggaaagccaggtggagaagaccaagctttcttcctccgaggagttccctcagactctgagccttcccagaacaacaactatttgctcaggacatgatgctgataccgaagatgatccatccctagcagatttgccccaggcactggacctcagccagcagcctcacagctcaggtctctcttgcctgtcacagtggaagtccgtgctgagcccaggttccgcagctcagccttccagctgcagcatctctgcttcctccacaggcagcagtctccagggtcaccaggagagggcggagcctcgtggtggttctctggccaaggtctcctcctccctggagccggtcgtcccccaggaaccttcctctgtggtggggctaggacctcggccccagtggtcaccacagcctgtgttctctgggggtgatgcttctgggctaggcaggagacgcctctccttccaggctgagtactgggcctgtgtgctgccagattccctgcctccatcacccgaccgccactcccctctctggaacccaaataaagagtatgaagatctgcttgactatacttacccactgaggcccgggcctcagctcccaaagcaccttgatagccgtgtgccagctgaccctgtcctgcaggactccggggtagacctggatagcttctctgtctctccagcaagcaccctcaaatcacctactaatgtctcccccaactgcccaccagcagaggccactgccctgccattttctgggcccagagagccaagccttaagcagtggccctccagagtaccccagaaacagggtggcatgggcttggcatcttggagccaacttgcatctacccccagagccccaggcagtagggatgctcgttgggagcgcagagagccagccctgaggggtgcgaaggaccggctgactataggcaagcaccttgatatgggctctccccagctaaggacacgggacagagggtggccctcgcccaggccagagagggagaagaggaccagccagagtgcccggcgccctacctgcacagagtctaggtggaaatcagaagaggaagtggaaagtgatgacgagtatcttgccctccccgctcggctgacacaggtttctagcctggtttcgtatctaggatccatttctaccttggttaccctgcccactggggatatcaaagggcagagccccttggaagtgtcagacagtgatgggccagcttccttcccttcaagctccagccaaagccagcttccccctggagctgccctccaaggatctggggatcctgagggccagaatccctgtttcctgcgctccttcgtccgtgcccacgactccgcaggggaaggcagtctggggagcagccaggccctcggggtctcctctggactgctgaaaacacgcccctccttgccagctaggttggaccggtggccattctcagacccagatgttgaagggcagcttcccaggaaaggaggagaacagggaaaagaatcactggtgcaatgtgtgaagacattttgctgtcagctggaagagctgatctgctggctgtataatgttgcagatgttactgaccacgggactgcagccaggtccaatcttacaagtctcaagtcttctctgcagctttaccggcaatttaagaaagatatagatgaacatcagtctctgacggagagtgtcttacagaagggggagattcttcttcagtgcctgttggagaacaccccagttttagaggatgtccttgggaggatcgcaaagcagtctggtgagctggagagccacgcagatcgcctgtatgactctatcttggcctctctggacatgctggctggctgcacccttatccctgacaaaaagcccatggcggcaatggagcacccatgtgaaggggtttaacctggcatcttctcaggcagaggtgcaacctgtcggccaaacactggctagtgagaaaaaaatccttcaagaagtccttgcaagagccattcaacactgaagtcaagggggaaaccttcaatatactagctttaaaatgcctttctcctccctgaatggagggctgagttactatttttatttacaatgaatccttccaaactaaggttttccttttggtgcttctccacaaagagcgtgtagctttgcaatttttgataaaataagacgtgttgccttcccctctatcccattaaaaaagagcagataaagctcaaactattccacctggtagggtcatttaccaagggctggtaggagattccgaatactcaatattctcaggcatgcaagaggacctaagagactgaaaaaagtgaattgttggccagaaaccttgggtcttttcataaaaggaaatttgggcttgtcaatccctctttaaagatataggtagaaagaagagatttttaaccctttgtctgcaaaagaaaaagggttaaatgaagcatctatacagatgactttgggagattatgacaccttttgccatcttcagggcttacgtctttactttcttggctaaccagtttcttagaagaaaatgtgtcagggacttggggatctacagtcatgctttagcatggctatggagctaattatcaagcttaaagggtaactttgggaggactcctcccttcactcctagtctcccttggaagagcagtccaggctcagggaagggaatggataggatgacacagtaagtacagaaactgaagctgtcaatagtgaaggaaaaaggggaattcttcgttgctttggcattgacacataagtactttgattaaaaaaaaaaaaaactatggatcaaccattcaaagcatcaattctatagctttttgcagcaagatgatcagttattgctggtaactgcagattctacagaaaagcacttttaaagttctgttgggccatgaatgaacctggaaggaggaaagcacagtaacaatggaaactaaagtcctattattaatgtgacttttctgcttcagaatttctgagactttatagtcactggaaaatagccattaaattctttaaagattagctcttcaacagtagctacacataaaatgcagtatttcaagtgcctgatgctgctgtggtatgctttatcataatgcttaagggcatgatcaaaattaaaatggcttatgagtttgccatattaatcatcttagttccatacacactgagactttaaaagggaaaaaccactctagcaaataattgtcaattataaacctgtatgtaaaacattcttgaaaacctagagttggttaaaaaggtagagatgtctgacggcctcttcttaaattgatatattttaccttctcttagatgtacatttataagtaggaacatgtccttccactgagtatgttactgaatagcccttaggaaattaaacccatttatttactaatatttgacaggcatagaagtgtattaattagcataaaagttggagatgaaaaccctatagaaacaaattggccaatattatactaattgaatgcagaatgtggcattctattcccattcaactaataatcagcttcaactgacaggaatttgcacagaatgttacacaataccctgtttcccaagaaagtactaccttacctagagatgatctaagatatttttgttcatcctctgaataaggtgagactaaagggtgctaactccctggacctggctgtgaatgctactgaagagtatcaacacaactgttaattataccgccgtgctttaagtttaagacttaccttaaaactcaagctgaaggctgggcacggtggctcatgcctgtaatcccagcactttgggaggccgaggcgggtggatcacaaggtcaggagatcgagaccatcctggctaacacggtgaaaccccatctctactaaaaatacaaaaagaaattagccaggcgtggtgatgggcgcctgtagtcccagctacttgggaggctgaggcatgagaatggcatgaacccgggaggcggagcttgcagtgagctgagatggcaccactgcactccagcctgggcaacagagtgagactcttgtctcaaaaaaaaaaaaatcaagctgaaattgtttcagcctagtaagatgctgccagcagcatttctatgagcaaacatggccaaattagagtcaagtagctgagcttgctaactgcactgtgatgccacactggaataacttagtagtcccttaaaattaatggaagttaaatccacagggaagtgatgatactcaaagctggatcagcagtttcaagatctgggttcttggagatccataggtaagctcagcaaatggaagacgacgtcaacacagggctattttgaagcttaggtgggaatggaacacaaagaaggtttgaggtaagatatgctggaaaggcaagatgtaggctaagggaaattcaatccaaggtcgaagaataggaaattactgctcagaccacaatgactatcattctgaaaggatttcacagagtgtgcagctgcttagatttaagaacactcttcttcactatgtaaactaatttatggcagcaccttatatttagaacaagtggtaattccctttactaagtgaacagattattaaaacctgtagtagctttgaaccgtttgtacttgaaaatgggggtataaaggggtatatattttttccagaaccacatttattggcgtatacatagaagcaaatcttaaggcatgctgaaatttgttgtaaatcccaatctttactgccatggggaaaagaacgctggaattttccaaacttaagtctgtaaatatgctcatcttaagttcatgtaatgtttccgctaactcaccaagaataagctgacaatttaaacaacttttactgtgtaaaaatgaagtgcacggcatggcatcacagtatcttgacatttgttttgtgtcatttagctactttagaaaatagtttctgaactctttccccctttatactgtattaaggcaaaaacaaaacttctgaagcattaaagatcttcaccaaaataactattggtaacttcaggaatttgtcagttgccttatgtgaggatgaatagatccaccaagcacgcctataatacaaagtaaactatgatttttattgtgaaattttcatagatggaaaattgaatattctgtccatttcattttacaattatcttaccacttatttttgtaccatgtatttcaattgcctgtttagtgaaaaataaaaattaaaaaaacctattcatttttggcttgtgtttagcttaaattttatcattaaattaaggagcccacaacaaaatgtgttgccagcagccatatcccaagcccctgcgtgaagaatgttttggctgctatttcaacctaaggaaacaacgtttgacctcagtcaccttaaaatgccagtgtgggcagaagattttttattcctcacaattaaaaaccaaacaaaaccccctaggatcttgaaggtcctatttcagaaaatcttcatatatgcaaaatgtcaccaaaataaatacatttgcctcaattatcattaccacccagtattcatgttttaatttttagggatataatttctaaatttagagcaatcaaatttcctgcttcctatcttaatgcttaaaccctcctccaacaccaagttaagcaactgtggaggataaaatagttgaatctgactgaaagcatggaagaaaaacattagcacacattagtctgatcatttgccaattaggaaaggtgctgctttctacctctaccacagatgcatttatgaaatgttgatcaatgaagctatttcaaatggttttagagaaggatcagagataacgggctagatagcatacattctaaacttgttttacatatagtttgagctccctgaaccactgaagttggttaaatcc

SEQ ID NO: 350235 - DNA, 6432 bp, Homo sapiens
gccctgcgcgttttgggctgcggttggagggccgcagttgcagtcagggtccgccagctcggggccagcgcatggggctgctgagaccgctccggacgtgcgaagcgttcgcggtgcggtaggaagctgaagtcttcagcagaaccctgacctaggtagggagtctcaatggccctgggtgaagaaaaggcagaagcggaagcatctgaagacacaaaggcccagtcctatgggagagggagctgcagggagcgggagctggacatcccagggcccatgagtggggagcagcccccacgcctggaagctgagggagggctcatctcccctgtatggggggcagaagggatacctgcccctacttgctggattgggactgaccctggcagcccctctagagcccaccagccacaggccagtgatgccaacagagagcccgtagctgagaggtctgagcctgcactcagtggcctgcctcctgccaccatggggtctggagaccttctgctctccggggaaagccaggtggagaagaccaagctttcttcctccgaggagttccctcagactctgagccttcccagaacaacaactatttgctcaggacatgatgctgataccgaagatgatccatccctagcagatttgccccaggcactggacctcagccagcagcctcacagctcaggtctctcttgcctgtcacagtggaagtccgtgctgagcccaggttccgcagctcagccttccagctgcagcatctctgcttcctccacaggcagcagtctccagggtcaccaggagagggcggagcctcgtggtggttctctggccaaggtctcctcctccctggagccggtcgtcccccaggaaccttcctctgtggtggggctaggacctcggccccagtggtcaccacagcctgtgttctctgggggtgatgcttctgggctaggcaggagacgcctctccttccaggctgagtactgggcctgtgtgctgccagattccctgcctccatcacccgaccgccactcccctctctggaacccaaataaagagtatgaagatctgcttgactatacttacccactgaggcccgggcctcagctcccaaagcaccttgatagccgtgtgccagctgaccctgtcctgcaggactccggggtagacctggatagcttctctgtctctccagcaagcaccctcaaatcacctactaatgtctcccccaactgcccaccagcagaggccactgccctgccattttctgggcccagagagccaagccttaagcagtggccctccagagtaccccagaaacagggtggcatgggcttggcatcttggagccaacttgcatctacccccagagccccaggcagtagggatgctcgttgggagcgcagagagccagccctgaggggtgcgaaggaccggctgactataggcaagcaccttgatatgggctctccccagctaaggacacgggacagagggtggccctcgcccaggccagagagggagaagaggaccagccagagtgcccggcgccctacctgcacagagtctaggtggaaatcagaagaggaagtggaaagtgatgacgagtatcttgccctccccgctcggctgacacaggtttctagcctggtttcgtatctaggatccatttctaccttggttaccctgcccactggggatatcaaagggcagagccccttggaagtgtcagacagtgatgggccagcttccttcccttcaagctccagccaaagccagcttccccctggagctgccctccaaggatctggggatcctgagggccagaatccctgtttcctgcgctccttcgtccgtgcccacgactccgcaggggaaggcagtctggggagcagccaggccctcggggtctcctctggactgctgaaaacacgcccctccttgccagctaggttggaccggtggccattctcagacccagatgttgaagggcagcttcccaggaaaggaggagaacagggaaaagaatcactggtgcaatgtgtgaagacattttgctgtcagctggaagagctgatctgctggctgtataatgttgcagatgttactgaccacgggactgcagccaggtccaatcttacaagtctcaagtcttctctgcagctttaccggcaatttaagaaagatatagatgaacatcagtctctgacggagagtgtcttacagaagggggagattcttcttcagtgcctgttggagaacaccccagttttagaggatgtccttgggaggatcgcaaagcagtctggtgagctggagagccacgcagatcgcctgtatgactctatcttggcctctctggacatgctggctggctgcacccttatccctgacaaaaagcccatggcggcaatggagcacccatgtgaaggggtttaacctggcatcttctcaggcagaggtgcaacctgtcggccaaacactggctagtgagaaaaaaatccttcaagaagtccttgcaagagccattcaacactgaagtcaagggggaaaccttcaatatactagctttaaaatgcctttctcctccctgaatggagggctgagttactatttttatttacaatgaatccttccaaactaaggttttccttttggtgcttctccacaaagagcgtgtagctttgcaatttttgataaaataagacgtgttgccttcccctctatcccattaaaaaagagcagataaagctcaaactattccacctggtagggtcatttaccaagggctggtaggagattccgaatactcaatattctcaggcatgcaagaggacctaagagactgaaaaaagtgaattgttggccagaaaccttgggtcttttcataaaaggaaatttgggcttgtcaatccctctttaaagatataggtagaaagaagagatttttaaccctttgtctgcaaaagaaaaagggttaaatgaagcatctatacagatgactttgggagattatgacaccttttgccatcttcagggcttacgtctttactttcttggctaaccagtttcttagaagaaaatgtgtcagggacttggggatctacagtcatgctttagcatggctatggagctaattatcaagcttaaagggtaactttgggaggactcctcccttcactcctagtctcccttggaagagcagtccaggctcagggaagggaatggataggatgacacagtaagtacagaaactgaagctgtcaatagtgaaggaaaaaggggaattcttcgttgctttggcattgacacataagtactttgattaaaaaaaaaaaaaactatggatcaaccattcaaagcatcaattctatagctttttgcagcaagatgatcagttattgctggtaactgcagattctacagaaaagcacttttaaagttctgttgggccatgaatgaacctggaaggaggaaagcacagtaacaatggaaactaaagtcctattattaatgtgacttttctgcttcagaatttctgagactttatagtcactggaaaatagccattaaattctttaaagattagctcttcaacagtagctacacataaaatgcagtatttcaagtgcctgatgctgctgtggtatgctttatcataatgcttaagggcatgatcaaaattaaaatggcttatgagtttgccatattaatcatcttagttccatacacactgagactttaaaagggaaaaaccactctagcaaataattgtcaattataaacctgtatgtaaaacattcttgaaaacctagagttggttaaaaaggtagagatgtctgacggcctcttcttaaattgatatattttaccttctcttagatgtacatttataagtaggaacatgtccttccactgagtatgttactgaatagcccttaggaaattaaacccatttatttactaatatttgacaggcatagaagtgtattaattagcataaaagttggagatgaaaaccctatagaaacaaattggccaatattatactaattgaatgcagaatgtggcattctattcccattcaactaataatcagcttcaactgacaggaatttgcacagaatgttacacaataccctgtttcccaagaaagtactaccttacctagagatgatctaagatatttttgttcatcctctgaataaggtgagactaaagggtgctaactccctggacctggctgtgaatgctactgaagagtatcaacacaactgttaattataccgccgtgctttaagtttaagacttaccttaaaactcaagctgaaggctgggcacggtggctcatgcctgtaatcccagcactttgggaggccgaggcgggtggatcacaaggtcaggagatcgagaccatcctggctaacacggtgaaaccccatctctactaaaaatacaaaaagaaattagccaggcgtggtgatgggcgcctgtagtcccagctacttgggaggctgaggcatgagaatggcatgaacccgggaggcggagcttgcagtgagctgagatggcaccactgcactccagcctgggcaacagagtgagactcttgtctcaaaaaaaaaaaaatcaagctgaaattgtttcagcctagtaagatgctgccagcagcatttctatgagcaaacatggccaaattagagtcaagtagctgagcttgctaactgcactgtgatgccacactggaataacttagtagtcccttacagtttcaagatctgggttcttggagatccataggtaagctcagcaaatggaagacgacgtcaacacagggctattttgaagcttaggtgggaatggaacacaaagaaggtttgaggtaagatatgctggaaaggcaagatgtaggctaagggaaattcaatccaaggtcgaagaataggaaattactgctcagaccacaatgactatcattctgaaaggatttcacagagtgtgcagctgcttagatttaagaacactcttcttcactatgtaaactaatttatggcagcaccttatatttagaacaagtggtaattccctttactaagtgaacagattattaaaacctgtagtagctttgaaccgtttgtacttgaaaatgggggtataaaggggtatatattttttccagaaccacatttattggcgtatacatagaagcaaatcttaaggcatgctgaaatttgttgtaaatcccaatctttactgccatggggaaaagaacgctggaattttccaaacttaagtctgtaaatatgctcatcttaagttcatgtaatgtttccgctaactcaccaagaataagctgacaatttaaacaacttttactgtgtaaaaatgaagtgcacggcatggcatcacagtatcttgacatttgttttgtgtcatttagctactttagaaaatagtttctgaactctttccccctttatactgtattaaggcaaaaacaaaacttctgaagcattaaagatcttcaccaaaataactattggtaacttcaggaatttgtcagttgccttatgtgaggatgaatagatccaccaagcacgcctataatacaaagtaaactatgatttttattgtgaaattttcatagatggaaaattgaatattctgtccatttcattttacaattatcttaccacttatttttgtaccatgtatttcaattgcctgtttagtgaaaaataaaaattaaaaaaacctattcatttttggcttgtgtttagcttaaattttatcattaaattaaggagcccacaacaaaatgtgttgccagcagccatatcccaagcccctgcgtgaagaatgttttggctgctatttcaacctaaggaaacaacgtttgacctcagtcaccttaaaatgccagtgtgggcagaagattttttattcctcacaattaaaaaccaaacaaaaccccctaggatcttgaaggtcctatttcagaaaatcttcatatatgcaaaatgtcaccaaaataaatacatttgcctcaattatcattaccacccagtattcatgttttaatttttagggatataatttctaaatttagagcaatcaaatttcctgcttcctatcttaatgcttaaaccctcctccaacaccaagttaagcaactgtggaggataaaatagttgaatctgactgaaagcatggaagaaaaacattagcacacattagtctgatcatttgccaattaggaaaggtgctgctttctacctctaccacagatgcatttatgaaatgttgatcaatgaagctatttcaaatggttttagagaaggatcagagataacgggctagatagcatacattctaaacttgttttacatatagtttgagctccctgaaccactgaagttggttaaatcc

SEQ ID NO: 350236 - DNA, 6269 bp, Homo sapiens
gccctgcgcgttttgggctgcggttggagggccgcagttgcagtcagggtccgccagctcggggccagcgcatggggctgctgagaccgctccggacgtgcgaagcgttcgcggtgcggtaggaagctgaagtcttcagcagaaccctgacctaggtagggagtctcaatggccctgggtgaagaaaaggcagaagcggaagcatctgaagacacaaaggcccagtcctatgggagagggagctgcagggagcgggagctggacatcccagggcccatgagtggggagcagcccccacgcctggaagctgagggagggctcatctcccctgtatggggggcagaagggatacctgcccctacttgctggattgggactgaccctggcagcccctctagagcccaccagccacaggccagtgatgccaacagagagcccgtagctgagaggtctgagcctgcactcagtggcctgcctcctgccaccatggggtctggagaccttctgctctccggggaaagccaggtggagaagaccaagctttcttcctccgaggagttccctcagactctgagccttcccagaacaacaactatttgctcaggacatgatgctgataccgaagatgatccatccctagcagatttgccccaggcactggacctcagccagcagcctcacagctcaggtctctcttgcctgtcacagtggaagtccgtgctgagcccaggttccgcagctcagccttccagctgcagcatctctgcttcctccacaggcagcagtctccagggtcaccaggagagggcggagcctcgtggtggttctctggccaaggtctcctcctccctggagccggtcgtcccccaggaaccttcctctgtggtggggctaggacctcggccccagtggtcaccacagcctgtgttctctgggggtgatgcttctgggctaggcaggagacgcctctccttccaggctgagtactgggcctgtgtgctgccagattccctgcctccatcacccgaccgccactcccctctctggaacccaaataaagagtatgaagatctgcttgactatacttacccactgaggcccgggcctcagctcccaaagcaccttgatagccgtgtgccagctgaccctgtcctgcaggactccggggtagacctggatagcttctctgtctctccagcaagcaccctcaaatcacctactaatgtctcccccaactgcccaccagcagaggccactgccctgccattttctgggcccagagagccaagccttaagcagtggccctccagagtaccccagaaacagggtggcatgggcttggcatcttggagccaacttgcatctacccccagagccccaggcagtagggatgctcgttgggagcgcagagagccagccctgaggggtgcgaaggaccggctgactataggcaagcaccttgatatgggctctccccagctaaggacacgggacagagggtggccctcgcccaggccagagagggagaagaggaccagccagagtgcccggcgccctacctgcacagagtctaggtggaaatcagaagaggaagtggaaagtgatgacgagtatcttgccctccccgctcggctgacacaggtttctagcctggtttcgtatctaggatccatttctaccttggttaccctgcccactggggatatcaaagggcagagccccttggaagtgtcagacagtgatgggccagcttccttcccttcaagctccagccaaagccacttcccaggaaaggaggagaacagggaaaagaatcactggtgcaatgtgtgaagacattttgctgtcagctggaagagctgatctgctggctgtataatgttgcagatgttactgaccacgggactgcagccaggtccaatcttacaagtctcaagtcttctctgcagctttaccggcaatttaagaaagatatagatgaacatcagtctctgacggagagtgtcttacagaagggggagattcttcttcagtgcctgttggagaacaccccagttttagaggatgtccttgggaggatcgcaaagcagtctggtgagctggagagccacgcagatcgcctgtatgactctatcttggcctctctggacatgctggctggctgcacccttatccctgacaaaaagcccatggcggcaatggagcacccatgtgaaggggtttaacctggcatcttctcaggcagaggtgcaacctgtcggccaaacactggctagtgagaaaaaaatccttcaagaagtccttgcaagagccattcaacactgaagtcaagggggaaaccttcaatatactagctttaaaatgcctttctcctccctgaatggagggctgagttactatttttatttacaatgaatccttccaaactaaggttttccttttggtgcttctccacaaagagcgtgtagctttgcaatttttgataaaataagacgtgttgccttcccctctatcccattaaaaaagagcagataaagctcaaactattccacctggtagggtcatttaccaagggctggtaggagattccgaatactcaatattctcaggcatgcaagaggacctaagagactgaaaaaagtgaattgttggccagaaaccttgggtcttttcataaaaggaaatttgggcttgtcaatccctctttaaagatataggtagaaagaagagatttttaaccctttgtctgcaaaagaaaaagggttaaatgaagcatctatacagatgactttgggagattatgacaccttttgccatcttcagggcttacgtctttactttcttggctaaccagtttcttagaagaaaatgtgtcagggacttggggatctacagtcatgctttagcatggctatggagctaattatcaagcttaaagggtaactttgggaggactcctcccttcactcctagtctcccttggaagagcagtccaggctcagggaagggaatggataggatgacacagtaagtacagaaactgaagctgtcaatagtgaaggaaaaaggggaattcttcgttgctttggcattgacacataagtactttgattaaaaaaaaaaaaaactatggatcaaccattcaaagcatcaattctatagctttttgcagcaagatgatcagttattgctggtaactgcagattctacagaaaagcacttttaaagttctgttgggccatgaatgaacctggaaggaggaaagcacagtaacaatggaaactaaagtcctattattaatgtgacttttctgcttcagaatttctgagactttatagtcactggaaaatagccattaaattctttaaagattagctcttcaacagtagctacacataaaatgcagtatttcaagtgcctgatgctgctgtggtatgctttatcataatgcttaagggcatgatcaaaattaaaatggcttatgagtttgccatattaatcatcttagttccatacacactgagactttaaaagggaaaaaccactctagcaaataattgtcaattataaacctgtatgtaaaacattcttgaaaacctagagttggttaaaaaggtagagatgtctgacggcctcttcttaaattgatatattttaccttctcttagatgtacatttataagtaggaacatgtccttccactgagtatgttactgaatagcccttaggaaattaaacccatttatttactaatatttgacaggcatagaagtgtattaattagcataaaagttggagatgaaaaccctatagaaacaaattggccaatattatactaattgaatgcagaatgtggcattctattcccattcaactaataatcagcttcaactgacaggaatttgcacagaatgttacacaataccctgtttcccaagaaagtactaccttacctagagatgatctaagatatttttgttcatcctctgaataaggtgagactaaagggtgctaactccctggacctggctgtgaatgctactgaagagtatcaacacaactgttaattataccgccgtgctttaagtttaagacttaccttaaaactcaagctgaaggctgggcacggtggctcatgcctgtaatcccagcactttgggaggccgaggcgggtggatcacaaggtcaggagatcgagaccatcctggctaacacggtgaaaccccatctctactaaaaatacaaaaagaaattagccaggcgtggtgatgggcgcctgtagtcccagctacttgggaggctgaggcatgagaatggcatgaacccgggaggcggagcttgcagtgagctgagatggcaccactgcactccagcctgggcaacagagtgagactcttgtctcaaaaaaaaaaaaatcaagctgaaattgtttcagcctagtaagatgctgccagcagcatttctatgagcaaacatggccaaattagagtcaagtagctgagcttgctaactgcactgtgatgccacactggaataacttagtagtcccttaaaattaatggaagttaaatccacagggaagtgatgatactcaaagctggatcagcagtttcaagatctgggttcttggagatccataggtaagctcagcaaatggaagacgacgtcaacacagggctattttgaagcttaggtgggaatggaacacaaagaaggtttgaggtaagatatgctggaaaggcaagatgtaggctaagggaaattcaatccaaggtcgaagaataggaaattactgctcagaccacaatgactatcattctgaaaggatttcacagagtgtgcagctgcttagatttaagaacactcttcttcactatgtaaactaatttatggcagcaccttatatttagaacaagtggtaattccctttactaagtgaacagattattaaaacctgtagtagctttgaaccgtttgtacttgaaaatgggggtataaaggggtatatattttttccagaaccacatttattggcgtatacatagaagcaaatcttaaggcatgctgaaatttgttgtaaatcccaatctttactgccatggggaaaagaacgctggaattttccaaacttaagtctgtaaatatgctcatcttaagttcatgtaatgtttccgctaactcaccaagaataagctgacaatttaaacaacttttactgtgtaaaaatgaagtgcacggcatggcatcacagtatcttgacatttgttttgtgtcatttagctactttagaaaatagtttctgaactctttccccctttatactgtattaaggcaaaaacaaaacttctgaagcattaaagatcttcaccaaaataactattggtaacttcaggaatttgtcagttgccttatgtgaggatgaatagatccaccaagcacgcctataatacaaagtaaactatgatttttattgtgaaattttcatagatggaaaattgaatattctgtccatttcattttacaattatcttaccacttatttttgtaccatgtatttcaattgcctgtttagtgaaaaataaaaattaaaaaaacctattcatttttggcttgtgtttagcttaaattttatcattaaattaaggagcccacaacaaaatgtgttgccagcagccatatcccaagcccctgcgtgaagaatgttttggctgctatttcaacctaaggaaacaacgtttgacctcagtcaccttaaaatgccagtgtgggcagaagattttttattcctcacaattaaaaaccaaacaaaaccccctaggatcttgaaggtcctatttcagaaaatcttcatatatgcaaaatgtcaccaaaataaatacatttgcctcaattatcattaccacccagtattcatgttttaatttttagggatataatttctaaatttagagcaatcaaatttcctgcttcctatcttaatgcttaaaccctcctccaacaccaagttaagcaactgtggaggataaaatagttgaatctgactgaaagcatggaagaaaaacattagcacacattagtctgatcatttgccaattaggaaaggtgctgctttctacctctaccacagatgcatttatgaaatgttgatcaatgaagctatttcaaatggttttagagaaggatcagagataacgggctagatagcatacattctaaacttgttttacatatagtttgagctccctgaaccactgaagttggttaaatcc

SEQ ID NO: 350237 - DNA, 7415 bp, Homo sapiens
  misc_feature (2490)..(2490): n is a, c, g, or t
  misc_feature (2591)..(2591): n is a, c, g, or t
  misc_feature (2596)..(2596): n is a, c, g, or t
gccctgcgcgttttgggctgcggttggagggccgcagttgcagtcagggtccgccagctcggggccagcgcatggggctgctgagaccgctccggacgtgcgaagcgttcgcggtgcggtaggaagctgaagtcttcagcagaaccctgacctaggtagggagtctcaatggccctgggtgaagaaaaggcagaagcggaagcatctgaagacacaaaggcccagtcctatgggagagggagctgcagggagcgggagctggacatcccagggcccatgagtggggagcagcccccacgcctggaagctgagggagggctcatctcccctgtatggggggcagaagggatacctgcccctacttgctggattgggactgaccctggcagcccctctagagcccaccagccacaggccagtgatgccaacagagagcccgtagctgagaggtctgagcctgcactcagtggcctgcctcctgccaccatggggtctggagaccttctgctctccggggaaagccaggtggagaagaccaagctttcttcctccgaggagttccctcagactctgagccttcccagaacaacaactatttgctcaggacatgatgctgataccgaagatgatccatccctagcagatttgccccaggcactggacctcagccagcagcctcacagctcaggtctctcttgcctgtcacagtggaagtccgtgctgagcccaggttccgcagctcagccttccagctgcagcatctctgcttcctccacaggcagcagtctccagggtcaccaggagagggcggagcctcgtggtggttctctggccaaggtctcctcctccctggagccggtcgtcccccaggaaccttcctctgtggtggggctaggacctcggccccagtggtcaccacagcctgtgttctctgggggtgatgcttctgggctaggcaggagacgcctctccttccaggctgagtactgggcctgtgtgctgccagattccctgcctccatcacccgaccgccactcccctctctggaacccaaataaagagtatgaagatctgcttgactatacttacccactgaggcccgggcctcagctcccaaagcaccttgatagccgtgtgccagctgaccctgtcctgcaggactccggggtagacctggatagcttctctgtctctccagcaagcaccctcaaatcacctactaatgtctcccccaactgcccaccagcagaggccactgccctgccattttctgggcccagagagccaagccttaagcagtggccctccagagtaccccagaaacagggtggcatgggcttggcatcttggagccaacttgcatctacccccagagccccaggcagtagggatgctcgttgggagcgcagagagccagccctgaggggtgcgaaggaccggctgactataggcaagcaccttgatatgggctctccccagctaaggacacgggacagagggtggccctcgcccaggccagagagggagaagaggaccagccagagtgcccggcgccctacctgcacagagtctaggtggaaatcagaagaggaagtggaaagtgatgacgagtatcttgccctccccgctcggctgacacaggtttctagcctggtttcgtatctaggatccatttctaccttggttaccctgcccactggggatatcaaagggcagagccccttggaagtgtcagacagtgatgggccagcttccttcccttcaagctccagccaaagccagcttccccctggagctgccctccaaggatctggggatcctgagggccagaatccctgtttcctgcgctccttcgtccgtgcccacgactccgcaggggaaggcagtctggggagcagccaggccctcggggtctcctctggactgctgaaaacacgcccctccttgccagctaggttggaccggtggccattctcagacccagatgttgaagggcagcttcccaggaaaggaggagaacagggaaaagaatcactggtgcaatgtgtgaagacattttgctgtcagctggaagagctgatctgctggctgtataatgttgcagatgttactgaccacgggactgcagccaggtccaatcttacaagtctcaagtcttctctgcagctttaccggcaatttaagaaagatatagatgaacatcagtctctgacggagagtgtcttacagaagggggagattcttcttcagtgcctgttggagaacaccccagttttagaggatgtccttgggaggatcgcaaagcagtctggtgagctggagagccacgcagatcgcctgtatgactctatcttggcctctctggacatgctggctggctgcacccttatccctgacaaaaagcccatggcggcaatggagcacccatgtgaaggggtttaacctggtaagtggaggaactcaaaaagaaaatttgcccaccaaccctgntgtaacagttggccactacttagaagcttgttgagccaagaactattatttaaacaaatgagatactggaagaagacagccaatggtactaaaaaaggagntgctngtcttcctatgatgatgaaggctcactgcggtgctttccattactgttcacccctgctgcctgctgaggatgagggtgcctctgtgctgccatttctatggcactttcttcaccaccaaccctgccatcccaagacaagagcagcacaacttatctgtacacctactttatttctgcacaggtacacttttccagtatggggccatgacctggccacccctgttctgcaggatcttctccccagctcatttggtactccatctccaagcatctctgacagcaccaagtgcttagagaaacccagagttactgataactttgcaccaccacccctgccctgcacaaagggtctccacatatctcccacaccactcccttccaaaaaggctagggggatggaggggttaaagacaccttggagacttaactggtagtacaactttcttttgctcccttgagaaagtcaaacagaatgacagaaaaggagctaggagagcaaaggtgggtgtgtccaccacagagttgctactgccaatgcttttcataattctgcaattggactgtcgtacgtcgctcctacaacaaaatgtttgtagtgcttaactcatagattttctaggtgagcactataggtatgctaagagcagggagtccctgtgtttttatcagagcaactgtgagacgtcatcttggttctaaaatgaatgcaggggactgctgttgtcgtttcttcctctacaacattatgcctgtaacaaatgctgccttttctctttcaggcatcttctcaggcagaggtgcaacctgtcggccaaacactggctagtgagaaaaaaatccttcaagaagtccttgcaagagccattcaacactgaagtcaagggggaaaccttcaatatactagctttaaaatgcctttctcctccctgaatggagggctgagttactatttttatttacaatgaatccttccaaactaaggttttccttttggtgcttctccacaaagagcgtgtagctttgcaatttttgataaaataagacgtgttgccttcccctctatcccattaaaaaagagcagataaagctcaaactattccacctggtagggtcatttaccaagggctggtaggagattccgaatactcaatattctcaggcatgcaagaggacctaagagactgaaaaaagtgaattgttggccagaaaccttgggtcttttcataaaaggaaatttgggcttgtcaatccctctttaaagatataggtagaaagaagagatttttaaccctttgtctgcaaaagaaaaagggttaaatgaagcatctatacagatgactttgggagattatgacaccttttgccatcttcagggcttacgtctttactttcttggctaaccagtttcttagaagaaaatgtgtcagggacttggggatctacagtcatgctttagcatggctatggagctaattatcaagcttaaagggtaactttgggaggactcctcccttcactcctagtctcccttggaagagcagtccaggctcagggaagggaatggataggatgacacagtaagtacagaaactgaagctgtcaatagtgaaggaaaaaggggaattcttcgttgctttggcattgacacataagtactttgattaaaaaaaaaaaaaactatggatcaaccattcaaagcatcaattctatagctttttgcagcaagatgatcagttattgctggtaactgcagattctacagaaaagcacttttaaagttctgttgggccatgaatgaacctggaaggaggaaagcacagtaacaatggaaactaaagtcctattattaatgtgacttttctgcttcagaatttctgagactttatagtcactggaaaatagccattaaattctttaaagattagctcttcaacagtagctacacataaaatgcagtatttcaagtgcctgatgctgctgtggtatgctttatcataatgcttaagggcatgatcaaaattaaaatggcttatgagtttgccatattaatcatcttagttccatacacactgagactttaaaagggaaaaaccactctagcaaataattgtcaattataaacctgtatgtaaaacattcttgaaaacctagagttggttaaaaaggtagagatgtctgacggcctcttcttaaattgatatattttaccttctcttagatgtacatttataagtaggaacatgtccttccactgagtatgttactgaatagcccttaggaaattaaacccatttatttactaatatttgacaggcatagaagtgtattaattagcataaaagttggagatgaaaaccctatagaaacaaattggccaatattatactaattgaatgcagaatgtggcattctattcccattcaactaataatcagcttcaactgacaggaatttgcacagaatgttacacaataccctgtttcccaagaaagtactaccttacctagagatgatctaagatatttttgttcatcctctgaataaggtgagactaaagggtgctaactccctggacctggctgtgaatgctactgaagagtatcaacacaactgttaattataccgccgtgctttaagtttaagacttaccttaaaactcaagctgaaggctgggcacggtggctcatgcctgtaatcccagcactttgggaggccgaggcgggtggatcacaaggtcaggagatcgagaccatcctggctaacacggtgaaaccccatctctactaaaaatacaaaaagaaattagccaggcgtggtgatgggcgcctgtagtcccagctacttgggaggctgaggcatgagaatggcatgaacccgggaggcggagcttgcagtgagctgagatggcaccactgcactccagcctgggcaacagagtgagactcttgtctcaaaaaaaaaaaaatcaagctgaaattgtttcagcctagtaagatgctgccagcagcatttctatgagcaaacatggccaaattagagtcaagtagctgagcttgctaactgcactgtgatgccacactggaataacttagtagtcccttaaaattaatggaagttaaatccacagggaagtgatgatactcaaagctggatcagcagtttcaagatctgggttcttggagatccataggtaagctcagcaaatggaagacgacgtcaacacagggctattttgaagcttaggtgggaatggaacacaaagaaggtttgaggtaagatatgctggaaaggcaagatgtaggctaagggaaattcaatccaaggtcgaagaataggaaattactgctcagaccacaatgactatcattctgaaaggatttcacagagtgtgcagctgcttagatttaagaacactcttcttcactatgtaaactaatttatggcagcaccttatatttagaacaagtggtaattccctttactaagtgaacagattattaaaacctgtagtagctttgaaccgtttgtacttgaaaatgggggtataaaggggtatatattttttccagaaccacatttattggcgtatacatagaagcaaatcttaaggcatgctgaaatttgttgtaaatcccaatctttactgccatggggaaaagaacgctggaattttccaaacttaagtctgtaaatatgctcatcttaagttcatgtaatgtttccgctaactcaccaagaataagctgacaatttaaacaacttttactgtgtaaaaatgaagtgcacggcatggcatcacagtatcttgacatttgttttgtgtcatttagctactttagaaaatagtttctgaactctttccccctttatactgtattaaggcaaaaacaaaacttctgaagcattaaagatcttcaccaaaataactattggtaacttcaggaatttgtcagttgccttatgtgaggatgaatagatccaccaagcacgcctataatacaaagtaaactatgatttttattgtgaaattttcatagatggaaaattgaatattctgtccatttcattttacaattatcttaccacttatttttgtaccatgtatttcaattgcctgtttagtgaaaaataaaaattaaaaaaacctattcatttttggcttgtgtttagcttaaattttatcattaaattaaggagcccacaacaaaatgtgttgccagcagccatatcccaagcccctgcgtgaagaatgttttggctgctatttcaacctaaggaaacaacgtttgacctcagtcaccttaaaatgccagtgtgggcagaagattttttattcctcacaattaaaaaccaaacaaaaccccctaggatcttgaaggtcctatttcagaaaatcttcatatatgcaaaatgtcaccaaaataaatacatttgcctcaattatcattaccacccagtattcatgttttaatttttagggatataatttctaaatttagagcaatcaaatttcctgcttcctatcttaatgcttaaaccctcctccaacaccaagttaagcaactgtggaggataaaatagttgaatctgactgaaagcatggaagaaaaacattagcacacattagtctgatcatttgccaattaggaaaggtgctgctttctacctctaccacagatgcatttatgaaatgttgatcaatgaagctatttcaaatggttttagagaaggatcagagataacgggctagatagcatacattctaaacttgttttacatatagtttgagctccctgaaccactgaagttggttaaatcc

SEQ ID NO: 350238 - DNA, 5141 bp, Homo sapiens
gccctgcgcgttttgggctgcggttggagggccgcagttgcagtcagggtccgccagctcggggccagcgcatggggctgctgagaccgctccggacgtgcgaagcgttcgcggtgcggtaggaagctgaagtcttcagcagaaccctgacctaggtagggagtctcaatggccctgggtgaagaaaaggcagaagcggaagcatctgaagacacaaaggcccagtcctatgggagagggagctgcagggagcgggagctggacatcccagggcccatgagtggggagcagcccccacgcctggaagctgagggagggctcatctcccctgtatggggggcagaagggatacctgcccctacttgctggattgggactgaccctggcagcccctctagagcccaccagccacaggccagtgatgccaacagagagcccgtagctgagaggtctgagcctgcactcagtggcctgcctcctgccaccatggggtctggagaccttctgctctccggggaaagccaggtggagaagaccaagctttcttcctccgaggagttccctcagactctgagccttcccagaacaacaactatttgctcaggacatgatgctgataccgaagatgatccatccctagcagatttgccccaggcactggacctcagccagcagcctcacagctcaggtctctcttgcctgtcacaacattttgctgtcagctggaagagctgatctgctggctgtataatgttgcagatgttactgaccacgggactgcagccaggtccaatcttacaagtctcaagtcttctctgcagctttaccggcaatttaagaaagatatagatgaacatcagtctctgacggagagtgtcttacagaagggggagattcttcttcagtgcctgttggagaacaccccagttttagaggatgtccttgggaggatcgcaaagcagtctggtgagctggagagccacgcagatcgcctgtatgactctatcttggcctctctggacatgctggctggctgcacccttatccctgacaaaaagcccatggcggcaatggagcacccatgtgaaggggtttaacctggcatcttctcaggcagaggtgcaacctgtcggccaaacactggctagtgagaaaaaaatccttcaagaagtccttgcaagagccattcaacactgaagtcaagggggaaaccttcaatatactagctttaaaatgcctttctcctccctgaatggagggctgagttactatttttatttacaatgaatccttccaaactaaggttttccttttggtgcttctccacaaagagcgtgtagctttgcaatttttgataaaataagacgtgttgccttcccctctatcccattaaaaaagagcagataaagctcaaactattccacctggtagggtcatttaccaagggctggtaggagattccgaatactcaatattctcaggcatgcaagaggacctaagagactgaaaaaagtgaattgttggccagaaaccttgggtcttttcataaaaggaaatttgggcttgtcaatccctctttaaagatataggtagaaagaagagatttttaaccctttgtctgcaaaagaaaaagggttaaatgaagcatctatacagatgactttgggagattatgacaccttttgccatcttcagggcttacgtctttactttcttggctaaccagtttcttagaagaaaatgtgtcagggacttggggatctacagtcatgctttagcatggctatggagctaattatcaagcttaaagggtaactttgggaggactcctcccttcactcctagtctcccttggaagagcagtccaggctcagggaagggaatggataggatgacacagtaagtacagaaactgaagctgtcaatagtgaaggaaaaaggggaattcttcgttgctttggcattgacacataagtactttgattaaaaaaaaaaaaaactatggatcaaccattcaaagcatcaattctatagctttttgcagcaagatgatcagttattgctggtaactgcagattctacagaaaagcacttttaaagttctgttgggccatgaatgaacctggaaggaggaaagcacagtaacaatggaaactaaagtcctattattaatgtgacttttctgcttcagaatttctgagactttatagtcactggaaaatagccattaaattctttaaagattagctcttcaacagtagctacacataaaatgcagtatttcaagtgcctgatgctgctgtggtatgctttatcataatgcttaagggcatgatcaaaattaaaatggcttatgagtttgccatattaatcatcttagttccatacacactgagactttaaaagggaaaaaccactctagcaaataattgtcaattataaacctgtatgtaaaacattcttgaaaacctagagttggttaaaaaggtagagatgtctgacggcctcttcttaaattgatatattttaccttctcttagatgtacatttataagtaggaacatgtccttccactgagtatgttactgaatagcccttaggaaattaaacccatttatttactaatatttgacaggcatagaagtgtattaattagcataaaagttggagatgaaaaccctatagaaacaaattggccaatattatactaattgaatgcagaatgtggcattctattcccattcaactaataatcagcttcaactgacaggaatttgcacagaatgttacacaataccctgtttcccaagaaagtactaccttacctagagatgatctaagatatttttgttcatcctctgaataaggtgagactaaagggtgctaactccctggacctggctgtgaatgctactgaagagtatcaacacaactgttaattataccgccgtgctttaagtttaagacttaccttaaaactcaagctgaaggctgggcacggtggctcatgcctgtaatcccagcactttgggaggccgaggcgggtggatcacaaggtcaggagatcgagaccatcctggctaacacggtgaaaccccatctctactaaaaatacaaaaagaaattagccaggcgtggtgatgggcgcctgtagtcccagctacttgggaggctgaggcatgagaatggcatgaacccgggaggcggagcttgcagtgagctgagatggcaccactgcactccagcctgggcaacagagtgagactcttgtctcaaaaaaaaaaaaatcaagctgaaattgtttcagcctagtaagatgctgccagcagcatttctatgagcaaacatggccaaattagagtcaagtagctgagcttgctaactgcactgtgatgccacactggaataacttagtagtcccttaaaattaatggaagttaaatccacagggaagtgatgatactcaaagctggatcagcagtttcaagatctgggttcttggagatccataggtaagctcagcaaatggaagacgacgtcaacacagggctattttgaagcttaggtgggaatggaacacaaagaaggtttgaggtaagatatgctggaaaggcaagatgtaggctaagggaaattcaatccaaggtcgaagaataggaaattactgctcagaccacaatgactatcattctgaaaggatttcacagagtgtgcagctgcttagatttaagaacactcttcttcactatgtaaactaatttatggcagcaccttatatttagaacaagtggtaattccctttactaagtgaacagattattaaaacctgtagtagctttgaaccgtttgtacttgaaaatgggggtataaaggggtatatattttttccagaaccacatttattggcgtatacatagaagcaaatcttaaggcatgctgaaatttgttgtaaatcccaatctttactgccatggggaaaagaacgctggaattttccaaacttaagtctgtaaatatgctcatcttaagttcatgtaatgtttccgctaactcaccaagaataagctgacaatttaaacaacttttactgtgtaaaaatgaagtgcacggcatggcatcacagtatcttgacatttgttttgtgtcatttagctactttagaaaatagtttctgaactctttccccctttatactgtattaaggcaaaaacaaaacttctgaagcattaaagatcttcaccaaaataactattggtaacttcaggaatttgtcagttgccttatgtgaggatgaatagatccaccaagcacgcctataatacaaagtaaactatgatttttattgtgaaattttcatagatggaaaattgaatattctgtccatttcattttacaattatcttaccacttatttttgtaccatgtatttcaattgcctgtttagtgaaaaataaaaattaaaaaaacctattcatttttggcttgtgtttagcttaaattttatcattaaattaaggagcccacaacaaaatgtgttgccagcagccatatcccaagcccctgcgtgaagaatgttttggctgctatttcaacctaaggaaacaacgtttgacctcagtcaccttaaaatgccagtgtgggcagaagattttttattcctcacaattaaaaaccaaacaaaaccccctaggatcttgaaggtcctatttcagaaaatcttcatatatgcaaaatgtcaccaaaataaatacatttgcctcaattatcattaccacccagtattcatgttttaatttttagggatataatttctaaatttagagcaatcaaatttcctgcttcctatcttaatgcttaaaccctcctccaacaccaagttaagcaactgtggaggataaaatagttgaatctgactgaaagcatggaagaaaaacattagcacacattagtctgatcatttgccaattaggaaaggtgctgctttctacctctaccacagatgcatttatgaaatgttgatcaatgaagctatttcaaatggttttagagaaggatcagagataacgggctagatagcatacattctaaacttgttttacatatagtttgagctccctgaaccactgaagttggttaaatcc

SEQ ID NO: 350239 - DNA, 4770 bp, Homo sapiens
ggcgtgagccactgcgcctggccaggtcattttctttttcagtctgttcactgaggcccacaaaacaaagggtctcaagcactcccaaatctattacagaccacccatgtgaaataacattcttcccagccaatagaaactgatagacctggtagcaggggtaagcatctgaaccttggcatgtcattttatttaagccttatgcccaagaggatctggatgtgcccttacagagatacctgtcttacctctaaagtcaggtaataccagccatcagaaaaccataatatctctgtgcccttctgtgaattacgtaatttcaaagtggagtcagtgagttcttttcttagctttaatcagaagttaacaacataggttctccagtgcaacagaagtccctggagaatcactgttaaaaaagggcagacattcagaaactactgccaggtcctactttgtgtaaaatactatacccttgtatgttcttttgaaaatgcttactggacaacacttgcatgggttttatttctggtttaatttctttgaacctcattgtttttagaggatgtccttgggaggatcgcaaagcagtctggtgagctggagagccacgcagatcgcctgtatgactctatcttggcctctctggacatgctggctggctgcacccttatccctgacaaaaagcccatggcggcaatggagcacccatgtgaaggggtttaacctggcatcttctcaggcagaggtgcaacctgtcggccaaacactggctagtgagaaaaaaatccttcaagaagtccttgcaagagccattcaacactgaagtcaagggggaaaccttcaatatactagctttaaaatgcctttctcctccctgaatggagggctgagttactatttttatttacaatgaatccttccaaactaaggttttccttttggtgcttctccacaaagagcgtgtagctttgcaatttttgataaaataagacgtgttgccttcccctctatcccattaaaaaagagcagataaagctcaaactattccacctggtagggtcatttaccaagggctggtaggagattccgaatactcaatattctcaggcatgcaagaggacctaagagactgaaaaaagtgaattgttggccagaaaccttgggtcttttcataaaaggaaatttgggcttgtcaatccctctttaaagatataggtagaaagaagagatttttaaccctttgtctgcaaaagaaaaagggttaaatgaagcatctatacagatgactttgggagattatgacaccttttgccatcttcagggcttacgtctttactttcttggctaaccagtttcttagaagaaaatgtgtcagggacttggggatctacagtcatgctttagcatggctatggagctaattatcaagcttaaagggtaactttgggaggactcctcccttcactcctagtctcccttggaagagcagtccaggctcagggaagggaatggataggatgacacagtaagtacagaaactgaagctgtcaatagtgaaggaaaaaggggaattcttcgttgctttggcattgacacataagtactttgattaaaaaaaaaaaaaactatggatcaaccattcaaagcatcaattctatagctttttgcagcaagatgatcagttattgctggtaactgcagattctacagaaaagcacttttaaagttctgttgggccatgaatgaacctggaaggaggaaagcacagtaacaatggaaactaaagtcctattattaatgtgacttttctgcttcagaatttctgagactttatagtcactggaaaatagccattaaattctttaaagattagctcttcaacagtagctacacataaaatgcagtatttcaagtgcctgatgctgctgtggtatgctttatcataatgcttaagggcatgatcaaaattaaaatggcttatgagtttgccatattaatcatcttagttccatacacactgagactttaaaagggaaaaaccactctagcaaataattgtcaattataaacctgtatgtaaaacattcttgaaaacctagagttggttaaaaaggtagagatgtctgacggcctcttcttaaattgatatattttaccttctcttagatgtacatttataagtaggaacatgtccttccactgagtatgttactgaatagcccttaggaaattaaacccatttatttactaatatttgacaggcatagaagtgtattaattagcataaaagttggagatgaaaaccctatagaaacaaattggccaatattatactaattgaatgcagaatgtggcattctattcccattcaactaataatcagcttcaactgacaggaatttgcacagaatgttacacaataccctgtttcccaagaaagtactaccttacctagagatgatctaagatatttttgttcatcctctgaataaggtgagactaaagggtgctaactccctggacctggctgtgaatgctactgaagagtatcaacacaactgttaattataccgccgtgctttaagtttaagacttaccttaaaactcaagctgaaggctgggcacggtggctcatgcctgtaatcccagcactttgggaggccgaggcgggtggatcacaaggtcaggagatcgagaccatcctggctaacacggtgaaaccccatctctactaaaaatacaaaaagaaattagccaggcgtggtgatgggcgcctgtagtcccagctacttgggaggctgaggcatgagaatggcatgaacccgggaggcggagcttgcagtgagctgagatggcaccactgcactccagcctgggcaacagagtgagactcttgtctcaaaaaaaaaaaaatcaagctgaaattgtttcagcctagtaagatgctgccagcagcatttctatgagcaaacatggccaaattagagtcaagtagctgagcttgctaactgcactgtgatgccacactggaataacttagtagtcccttaaaattaatggaagttaaatccacagggaagtgatgatactcaaagctggatcagcagtttcaagatctgggttcttggagatccataggtaagctcagcaaatggaagacgacgtcaacacagggctattttgaagcttaggtgggaatggaacacaaagaaggtttgaggtaagatatgctggaaaggcaagatgtaggctaagggaaattcaatccaaggtcgaagaataggaaattactgctcagaccacaatgactatcattctgaaaggatttcacagagtgtgcagctgcttagatttaagaacactcttcttcactatgtaaactaatttatggcagcaccttatatttagaacaagtggtaattccctttactaagtgaacagattattaaaacctgtagtagctttgaaccgtttgtacttgaaaatgggggtataaaggggtatatattttttccagaaccacatttattggcgtatacatagaagcaaatcttaaggcatgctgaaatttgttgtaaatcccaatctttactgccatggggaaaagaacgctggaattttccaaacttaagtctgtaaatatgctcatcttaagttcatgtaatgtttccgctaactcaccaagaataagctgacaatttaaacaacttttactgtgtaaaaatgaagtgcacggcatggcatcacagtatcttgacatttgttttgtgtcatttagctactttagaaaatagtttctgaactctttccccctttatactgtattaaggcaaaaacaaaacttctgaagcattaaagatcttcaccaaaataactattggtaacttcaggaatttgtcagttgccttatgtgaggatgaatagatccaccaagcacgcctataatacaaagtaaactatgatttttattgtgaaattttcatagatggaaaattgaatattctgtccatttcattttacaattatcttaccacttatttttgtaccatgtatttcaattgcctgtttagtgaaaaataaaaattaaaaaaacctattcatttttggcttgtgtttagcttaaattttatcattaaattaaggagcccacaacaaaatgtgttgccagcagccatatcccaagcccctgcgtgaagaatgttttggctgctatttcaacctaaggaaacaacgtttgacctcagtcaccttaaaatgccagtgtgggcagaagattttttattcctcacaattaaaaaccaaacaaaaccccctaggatcttgaaggtcctatttcagaaaatcttcatatatgcaaaatgtcaccaaaataaatacatttgcctcaattatcattaccacccagtattcatgttttaatttttagggatataatttctaaatttagagcaatcaaatttcctgcttcctatcttaatgcttaaaccctcctccaacaccaagttaagcaactgtggaggataaaatagttgaatctgactgaaagcatggaagaaaaacattagcacacattagtctgatcatttgccaattaggaaaggtgctgctttctacctctaccacagatgcatttatgaaatgttgatcaatgaagctatttcaaatggttttagagaaggatcagagataacgggctagatagcatacattctaaacttgttttacatatagtttgagctccctgaaccactgaagttggttaaatcc

SEQ ID NO: 350240 - DNA, 5635 bp, Homo sapiens
  misc_feature (710)..(710): n is a, c, g, or t
  misc_feature (811)..(811): n is a, c, g, or t
  misc_feature (816)..(816): n is a, c, g, or t
ggcgtgagccactgcgcctggccaggtcattttctttttcagtctgttcactgaggcccacaaaacaaagggtctcaagcactcccaaatctattacagaccacccatgtgaaataacattcttcccagccaatagaaactgatagacctggtagcaggggtaagcatctgaaccttggcatgtcattttatttaagccttatgcccaagaggatctggatgtgcccttacagagatacctgtcttacctctaaagtcaggtaataccagccatcagaaaaccataatatctctgtgcccttctgtgaattacgtaatttcaaagtggagtcagtgagttcttttcttagctttaatcagaagttaacaacataggttctccagtgcaacagaagtccctggagaatcactgttaaaaaagggcagacattcagaaactactgccaggtcctactttgtgtaaaatactatacccttgtatgttcttttgaattttagaggatgtccttgggaggatcgcaaagcagtctggtgagctggagagccacgcagatcgcctgtatgactctatcttggcctctctggacatgctggctggctgcacccttatccctgacaaaaagcccatggcggcaatggagcacccatgtgaaggggtttaacctggtaagtggaggaactcaaaaagaaaatttgcccaccaaccctgntgtaacagttggccactacttagaagcttgttgagccaagaactattatttaaacaaatgagatactggaagaagacagccaatggtactaaaaaaggagntgctngtcttcctatgatgatgaaggctcactgcggtgctttccattactgttcacccctgctgcctgctgaggatgagggtgcctctgtgctgccatttctatggcactttcttcaccaccaaccctgccatcccaagacaagagcagcacaacttatctgtacacctactttatttctgcacaggtacacttttccagtatggggccatgacctggccacccctgttctgcaggatcttctccccagctcatttggtactccatctccaagcatctctgacagcaccaagtgcttagagaaacccagagttactgataactttgcaccaccacccctgccctgcacaaagggtctccacatatctcccacaccactcccttccaaaaaggctagggggatggaggggttaaagacaccttggagacttaactggtagtacaactttcttttgctcccttgagaaagtcaaacagaatgacagaaaaggagctaggagagcaaaggtgggtgtgtccaccacagagttgctactgccaatgcttttcataattctgcaattggactgtcgtacgtcgctcctacaacaaaatgtttgtagtgcttaactcatagattttctaggtgagcactataggtatgctaagagcagggagtccctgtgtttttatcagagcaactgtgagacgtcatcttggttctaaaatgaatgcaggggactgctgttgtcgtttcttcctctacaacattatgcctgtaacaaatgctgccttttctctttcaggcatcttctcaggcagaggtgcaacctgtcggccaaacactggctagtgagaaaaaaatccttcaagaagtccttgcaagagccattcaacactgaagtcaagggggaaaccttcaatatactagctttaaaatgcctttctcctccctgaatggagggctgagttactatttttatttacaatgaatccttccaaactaaggttttccttttggtgcttctccacaaagagcgtgtagctttgcaatttttgataaaataagacgtgttgccttcccctctatcccattaaaaaagagcagataaagctcaaactattccacctggtagggtcatttaccaagggctggtaggagattccgaatactcaatattctcaggcatgcaagaggacctaagagactgaaaaaagtgaattgttggccagaaaccttgggtcttttcataaaaggaaatttgggcttgtcaatccctctttaaagatataggtagaaagaagagatttttaaccctttgtctgcaaaagaaaaagggttaaatgaagcatctatacagatgactttgggagattatgacaccttttgccatcttcagggcttacgtctttactttcttggctaaccagtttcttagaagaaaatgtgtcagggacttggggatctacagtcatgctttagcatggctatggagctaattatcaagcttaaagggtaactttgggaggactcctcccttcactcctagtctcccttggaagagcagtccaggctcagggaagggaatggataggatgacacagtaagtacagaaactgaagctgtcaatagtgaaggaaaaaggggaattcttcgttgctttggcattgacacataagtactttgattaaaaaaaaaaaaaactatggatcaaccattcaaagcatcaattctatagctttttgcagcaagatgatcagttattgctggtaactgcagattctacagaaaagcacttttaaagttctgttgggccatgaatgaacctggaaggaggaaagcacagtaacaatggaaactaaagtcctattattaatgtgacttttctgcttcagaatttctgagactttatagtcactggaaaatagccattaaattctttaaagattagctcttcaacagtagctacacataaaatgcagtatttcaagtgcctgatgctgctgtggtatgctttatcataatgcttaagggcatgatcaaaattaaaatggcttatgagtttgccatattaatcatcttagttccatacacactgagactttaaaagggaaaaaccactctagcaaataattgtcaattataaacctgtatgtaaaacattcttgaaaacctagagttggttaaaaaggtagagatgtctgacggcctcttcttaaattgatatattttaccttctcttagatgtacatttataagtaggaacatgtccttccactgagtatgttactgaatagcccttaggaaattaaacccatttatttactaatatttgacaggcatagaagtgtattaattagcataaaagttggagatgaaaaccctatagaaacaaattggccaatattatactaattgaatgcagaatgtggcattctattcccattcaactaataatcagcttcaactgacaggaatttgcacagaatgttacacaataccctgtttcccaagaaagtactaccttacctagagatgatctaagatatttttgttcatcctctgaataaggtgagactaaagggtgctaactccctggacctggctgtgaatgctactgaagagtatcaacacaactgttaattataccgccgtgctttaagtttaagacttaccttaaaactcaagctgaaggctgggcacggtggctcatgcctgtaatcccagcactttgggaggccgaggcgggtggatcacaaggtcaggagatcgagaccatcctggctaacacggtgaaaccccatctctactaaaaatacaaaaagaaattagccaggcgtggtgatgggcgcctgtagtcccagctacttgggaggctgaggcatgagaatggcatgaacccgggaggcggagcttgcagtgagctgagatggcaccactgcactccagcctgggcaacagagtgagactcttgtctcaaaaaaaaaaaaatcaagctgaaattgtttcagcctagtaagatgctgccagcagcatttctatgagcaaacatggccaaattagagtcaagtagctgagcttgctaactgcactgtgatgccacactggaataacttagtagtcccttaaaattaatggaagttaaatccacagggaagtgatgatactcaaagctggatcagcagtttcaagatctgggttcttggagatccataggtaagctcagcaaatggaagacgacgtcaacacagggctattttgaagcttaggtgggaatggaacacaaagaaggtttgaggtaagatatgctggaaaggcaagatgtaggctaagggaaattcaatccaaggtcgaagaataggaaattactgctcagaccacaatgactatcattctgaaaggatttcacagagtgtgcagctgcttagatttaagaacactcttcttcactatgtaaactaatttatggcagcaccttatatttagaacaagtggtaattccctttactaagtgaacagattattaaaacctgtagtagctttgaaccgtttgtacttgaaaatgggggtataaaggggtatatattttttccagaaccacatttattggcgtatacatagaagcaaatcttaaggcatgctgaaatttgttgtaaatcccaatctttactgccatggggaaaagaacgctggaattttccaaacttaagtctgtaaatatgctcatcttaagttcatgtaatgtttccgctaactcaccaagaataagctgacaatttaaacaacttttactgtgtaaaaatgaagtgcacggcatggcatcacagtatcttgacatttgttttgtgtcatttagctactttagaaaatagtttctgaactctttccccctttatactgtattaaggcaaaaacaaaacttctgaagcattaaagatcttcaccaaaataactattggtaacttcaggaatttgtcagttgccttatgtgaggatgaatagatccaccaagcacgcctataatacaaagtaaactatgatttttattgtgaaattttcatagatggaaaattgaatattctgtccatttcattttacaattatcttaccacttatttttgtaccatgtatttcaattgcctgtttagtgaaaaataaaaattaaaaaaacctattcatttttggcttgtgtttagcttaaattttatcattaaattaaggagcccacaacaaaatgtgttgccagcagccatatcccaagcccctgcgtgaagaatgttttggctgctatttcaacctaaggaaacaacgtttgacctcagtcaccttaaaatgccagtgtgggcagaagattttttattcctcacaattaaaaaccaaacaaaaccccctaggatcttgaaggtcctatttcagaaaatcttcatatatgcaaaatgtcaccaaaataaatacatttgcctcaattatcattaccacccagtattcatgttttaatttttagggatataatttctaaatttagagcaatcaaatttcctgcttcctatcttaatgcttaaaccctcctccaacaccaagttaagcaactgtggaggataaaatagttgaatctgactgaaagcatggaagaaaaacattagcacacattagtctgatcatttgccaattaggaaaggtgctgctttctacctctaccacagatgcatttatgaaatgttgatcaatgaagctatttcaaatggttttagagaaggatcagagataacgggctagatagcatacattctaaacttgttttacatatagtttgagctccctgaaccactgaagttggttaaatcc

SEQ ID NO: 350241 - DNA, 2268 bp, Homo sapiens
gccctgcgcgttttgggctgcggttggagggccgcagttgcagtcagggtccgccagctcggggccagcgcatggggctgctgagaccgctccggacgtgcgaagcgttcgcggtgcggtaggaagctgaagtcttcagcagaaccctgacctaggtagggagtctcaatggccctgggtgaagaaaaggcagaagcggaagcatctgaagacacaaaggcccagtcctatgggagagggagctgcagggagcgggagctggacatcccagggcccatgagtggggagcagcccccacgcctggaagctgagggagggctcatctcccctgtatggggggcagaagggatacctgcccctacttgctggattgggactgaccctggcagcccctctagagcccaccagccacaggccagtgatgccaacagagagcccgtagctgagaggtctgagcctgcactcagtggcctgcctcctgccaccatggggtctggagaccttctgctctccggggaaagccaggtggagaagaccaagctttcttcctccgaggagttccctcagactctgagccttcccagaacaacaactatttgctcaggacatgatgctgataccgaagatgatccatccctagcagatttgccccaggcactggacctcagccagcagcctcacagctcaggtctctcttgcctgtcacagtggaagtccgtgctgagcccaggttccgcagctcagccttccagctgcagcatctctgcttcctccacaggcagcagtctccagggtcaccaggagagggcggagcctcgtggtggttctctggccaaggtctcctcctccctggagccggtcgtcccccaggaaccttcctctgtggtggggctaggacctcggccccagtggtcaccacagcctgtgttctctgggggtgatgcttctgggctaggcaggagacgcctctccttccaggctgagtactgggcctgtgtgctgccagattccctgcctccatcacccgaccgccactcccctctctggaacccaaataaagagtatgaagatctgcttgactatacttacccactgaggcccgggcctcagctcccaaagcaccttgatagccgtgtgccagctgaccctgtcctgcaggactccggggtagacctggatagcttctctgtctctccagcaagcaccctcaaatcacctactaatgtctcccccaactgcccaccagcagaggccactgccctgccattttctgggcccagagagccaagccttaagcagtggccctccagagtaccccagaaacagggtggcatgggcttggcatcttggagccaacttgcatctacccccagagccccaggcagtagggatgctcgttgggagcgcagagagccagccctgaggggtgcgaaggaccggctgactataggcaagcaccttgatatgggctctccccagctaaggacacgggacagagggtggccctcgcccaggccagagagggagaagaggaccagccagagtgcccggcgccctacctgcacagagtctaggtggaaatcagaagaggaagtggaaagtgatgacgagtatcttgccctccccgctcggctgacacaggtttctagcctggtttcgtatctaggatccatttctaccttggttaccctgcccactggggatatcaaagggcagagccccttggaagtgtcagacagtgatgggccagcttccttcccttcaagctccagccaaagccagcttccccctggagctgccctccaaggatctggggatcctgagggccagaatccctgtttcctgcgctccttcgtccgtgcccacgactccgcaggggaaggcagtctggggagcagccaggccctcggggtctcctctggactgctgaaaacacgcccctccttgccagctaggttggaccggtggccattctcagacccagatgttgaagggcagcttcccaggaaaggaggagaacagggaaaagaatcactggtgcaatgtgtgaagacattttgctgtcagctggaagagctgatctgctggctgtataatgttgcagatgttactgaccacgggactgcagccaggtccaatcttacaagtctcaagtcttctctgcagctttaccgggtaatatgcggtcctggctctggcttgttccctcacaagagtgtggctaaattactcgattacaaagtaaaatctcaaataaccaaaatctgg

SEQ ID NO: 350242 - DNA, 3575 bp, Homo sapiens
  misc_feature (2490)..(2490): n is a, c, g, or t
  misc_feature (2591)..(2591): n is a, c, g, or t
  misc_feature (2596)..(2596): n is a, c, g, or t
gccctgcgcgttttgggctgcggttggagggccgcagttgcagtcagggtccgccagctcggggccagcgcatggggctgctgagaccgctccggacgtgcgaagcgttcgcggtgcggtaggaagctgaagtcttcagcagaaccctgacctaggtagggagtctcaatggccctgggtgaagaaaaggcagaagcggaagcatctgaagacacaaaggcccagtcctatgggagagggagctgcagggagcgggagctggacatcccagggcccatgagtggggagcagcccccacgcctggaagctgagggagggctcatctcccctgtatggggggcagaagggatacctgcccctacttgctggattgggactgaccctggcagcccctctagagcccaccagccacaggccagtgatgccaacagagagcccgtagctgagaggtctgagcctgcactcagtggcctgcctcctgccaccatggggtctggagaccttctgctctccggggaaagccaggtggagaagaccaagctttcttcctccgaggagttccctcagactctgagccttcccagaacaacaactatttgctcaggacatgatgctgataccgaagatgatccatccctagcagatttgccccaggcactggacctcagccagcagcctcacagctcaggtctctcttgcctgtcacagtggaagtccgtgctgagcccaggttccgcagctcagccttccagctgcagcatctctgcttcctccacaggcagcagtctccagggtcaccaggagagggcggagcctcgtggtggttctctggccaaggtctcctcctccctggagccggtcgtcccccaggaaccttcctctgtggtggggctaggacctcggccccagtggtcaccacagcctgtgttctctgggggtgatgcttctgggctaggcaggagacgcctctccttccaggctgagtactgggcctgtgtgctgccagattccctgcctccatcacccgaccgccactcccctctctggaacccaaataaagagtatgaagatctgcttgactatacttacccactgaggcccgggcctcagctcccaaagcaccttgatagccgtgtgccagctgaccctgtcctgcaggactccggggtagacctggatagcttctctgtctctccagcaagcaccctcaaatcacctactaatgtctcccccaactgcccaccagcagaggccactgccctgccattttctgggcccagagagccaagccttaagcagtggccctccagagtaccccagaaacagggtggcatgggcttggcatcttggagccaacttgcatctacccccagagccccaggcagtagggatgctcgttgggagcgcagagagccagccctgaggggtgcgaaggaccggctgactataggcaagcaccttgatatgggctctccccagctaaggacacgggacagagggtggccctcgcccaggccagagagggagaagaggaccagccagagtgcccggcgccctacctgcacagagtctaggtggaaatcagaagaggaagtggaaagtgatgacgagtatcttgccctccccgctcggctgacacaggtttctagcctggtttcgtatctaggatccatttctaccttggttaccctgcccactggggatatcaaagggcagagccccttggaagtgtcagacagtgatgggccagcttccttcccttcaagctccagccaaagccagcttccccctggagctgccctccaaggatctggggatcctgagggccagaatccctgtttcctgcgctccttcgtccgtgcccacgactccgcaggggaaggcagtctggggagcagccaggccctcggggtctcctctggactgctgaaaacacgcccctccttgccagctaggttggaccggtggccattctcagacccagatgttgaagggcagcttcccaggaaaggaggagaacagggaaaagaatcactggtgcaatgtgtgaagacattttgctgtcagctggaagagctgatctgctggctgtataatgttgcagatgttactgaccacgggactgcagccaggtccaatcttacaagtctcaagtcttctctgcagctttaccggcaatttaagaaagatatagatgaacatcagtctctgacggagagtgtcttacagaagggggagattcttcttcagtgcctgttggagaacaccccagttttagaggatgtccttgggaggatcgcaaagcagtctggtgagctggagagccacgcagatcgcctgtatgactctatcttggcctctctggacatgctggctggctgcacccttatccctgacaaaaagcccatggcggcaatggagcacccatgtgaaggggtttaacctggtaagtggaggaactcaaaaagaaaatttgcccaccaaccctgntgtaacagttggccactacttagaagcttgttgagccaagaactattatttaaacaaatgagatactggaagaagacagccaatggtactaaaaaaggagntgctngtcttcctatgatgatgaaggctcactgcggtgctttccattactgttcacccctgctgcctgctgaggatgagggtgcctctgtgctgccatttctatggcactttcttcaccaccaaccctgccatcccaagacaagagcagcacaacttatctgtacacctactttatttctgcacaggtacacttttccagtatggggccatgacctggccacccctgttctgcaggatcttctccccagctcatttggtactccatctccaagcatctctgacagcaccaagtgcttagagaaacccagagttactgataactttgcaccaccacccctgccctgcacaaagggtctccacatatctcccacaccactcccttccaaaaaggctagggggatggaggggttaaagacaccttggagacttaactggtagtacaactttcttttgctcccttgagaaagtcaaacagaatgacagaaaaggagctaggagagcaaaggtgggtgtgtccaccacagagttgctactgccaatgcttttcataattctgcaattggactgtcgtacgtcgctcctacaacaaaatgtttgtagtgcttaactcatagattttctaggtgagcactataggtatgctaagagcagggagtccctgtgtttttatcagagcaactgtgagacgtcatcttggttctaaaatgaatgcaggggactgctgttgtcgtttcttcctctacaacattatgcctgtaacaaatgctgccttttctctttcaggcatcttctcaggcagaggtgcaacctgtcggccaaacactggctagtgagaaaaaaatccttcaagaagtccttgcaagagccattcaacactgaagtcaagggggaaaccttcaatatactagctttaaaatgcctttctcctccctgaatggagggctgagttactatttttatttacaatgaatccttccaaacta

SEQ ID NO: 350243 - DNA, 2168 bp, Homo sapiens
gccctgcgcgttttgggctgcggttggagggccgcagttgcagtcagggtccgccagctcggggccagcgcatggggctgctgagaccgctccggacgtgcgaagcgttcgcggtgcggtaggaagctgaagtcttcagcagaaccctgacctaggtagggagtctcaatggccctgggtgaagaaaaggcagaagcggaagcatctgaagacacaaaggcccagtcctatgggagagggagctgcagggagcgggagctggacatcccagggcccatgagtggggagcagcccccacgcctggaagctgagggagggctcatctcccctgtatggggggcagaagggatacctgcccctacttgctggattgggactgaccctggcagcccctctagagcccaccagccacaggccagtgatgccaacagagagcccgtagctgagaggtctgagcctgcactcagtggcctgcctcctgccaccatggggtctggagaccttctgctctccggggaaagccaggtggagaagaccaagctttcttcctccgaggagttccctcagactctgagccttcccagaacaacaactatttgctcaggacatgatgctgataccgaagatgatccatccctagcagatttgccccaggcactggacctcagccagcagcctcacagctcaggtctctcttgcctgtcacagtggaagtccgtgctgagcccaggttccgcagctcagccttccagctgcagcatctctgcttcctccacaggcagcagtctccagggtcaccaggagagggcggagcctcgtggtggttctctggccaaggtctcctcctccctggagccggtcgtcccccaggaaccttcctctgtggtggggctaggacctcggccccagtggtcaccacagcctgtgttctctgggggtgatgcttctgggctaggcaggagacgcctctccttccaggctgagtactgggcctgtgtgctgccagattccctgcctccatcacccgaccgccactcccctctctggaacccaaataaagagtatgaagatctgcttgactatacttacccactgaggcccgggcctcagctcccaaagcaccttgatagccgtgtgccagctgaccctgtcctgcaggactccggggtagacctggatagcttctctgtctctccagcaagcaccctcaaatcacctactaatgtctcccccaactgcccaccagcagaggccactgccctgccattttctgggcccagagagccaagccttaagcagtggccctccagagtaccccagaaacagggtggcatgggcttggcatcttggagccaacttgcatctacccccagagccccaggcagtagggatgctcgttgggagcgcagagagccagccctgaggggtgcgaaggaccggctgactataggcaagcaccttgatatgggctctccccagctaaggacacgggacagagggtggccctcgcccaggccagagagggagaagaggaccagccagagtgcccggcgccctacctgcacagagtctaggtggaaatcagaagaggaagtggaaagtgatgacgagtatcttgccctccccgctcggctgacacaggttggaccggtggccattctcagacccagatgttgaagggcagcttcccaggaaaggaggagaacagggaaaagaatcactggtgcaatgtgtgaagagaaacatggacgtatctggctccaagatgctgattctagttagtaatggtgctgatccaagaattggtttccatggcaggcacgcctcttctgggctgctccattcctacctgcaaggctgggttttctcagcctgtcatttttgatgtcacaccaggctgtggttttcattgctttggcagagggaggtacagagtcgtggagtcgggacagacattttgctgtcagctggaagagctgatctgctggctgtataatgttgcagatgttactgaccacgggactgcagccaggtccaatcttacaagtctcaagtcttctctgcagctttaccgggtaatatgcggtcctggctctggcttgttccctcacaagagtgtggctaaattactcgattacaaagtaaaatctcaaataaccaaaatctgg

SEQ ID NO: 350244 - DNA, 2235 bp, Homo sapiens
gccctgcgcgttttgggctgcggttggagggccgcagttgcagtcagggtccgccagctcggggccagcgcatggggctgctgagaccgctccggacgtgcgaagcgttcgcggtgcggtaggaagctgaagtcttcagcagaaccctgacctaggtagggagtctcaatggccctgggtgaagaaaaggcagaagcggaagcatctgaagacacaaaggcccagtcctatgggagagggagctgcagggagcgggagctggacatcccagggcccatgagtggggagcagcccccacgcctggaagctgagggagggctcatctcccctgtatggggggcagaagggatacctgcccctacttgctggattgggactgaccctggcagcccctctagagcccaccagccacaggccagtgatgccaacagagagcccgtagctgagaggtctgagcctgcactcagtggcctgcctcctgccaccatggggtctggagaccttctgctctccggggaaagccaggtggagaagaccaagctttcttcctccgaggagttccctcagactctgagccttcccagaacaacaactatttgctcaggacatgatgctgataccgaagatgatccatccctagcagatttgccccaggcactggacctcagccagcagcctcacagctcaggtctctcttgcctgtcacagtggaagtccgtgctgagcccaggttccgcagctcagccttccagctgcagcatctctgcttcctccacaggcagcagtctccagggtcaccaggagagggcggagcctcgtggtggttctctggccaaggtctcctcctccctggagccggtcgtcccccaggaaccttcctctgtggtggggctaggacctcggccccagtggtcaccacagcctgtgttctctgggggtgatgcttctgggctaggcaggagacgcctctccttccaggctgagtactgggcctgtgtgctgccagattccctgcctccatcacccgaccgccactcccctctctggaacccaaataaagagtatgaagatctgcttgactatacttacccactgaggcccgggcctcagctcccaaagcaccttgatagccgtgtgccagctgaccctgtcctgcaggactccggggtagacctggatagcttctctgtctctccagcaagcaccctcaaatcacctactaatgtctcccccaactgcccaccagcagaggccactgccctgccattttctgggcccagagagccaagccttaagcagtggccctccagagtaccccagaaacagggtggcatgggcttggcatcttggagccaacttgcatctacccccagagccccaggcagtagggatgctcgttgggagcgcagagagccagccctgaggggtgcgaaggaccggctgactataggcaagcaccttgatatgggctctccccagctaaggacacgggacagagggtggccctcgcccaggccagagagggagaagaggaccagccagagtgcccggcgccctacctgcacagagtctaggtggaaatcagaagaggaagtggaaagtgatgacgagtatcttgccctccccgctcggctgacacagacattttgctgtcagctggaagagctgatctgctggctgtataatgttgcagatgttactgaccacgggactgcagccaggtccaatcttacaagtctcaagtcttctctgcagctttaccggcaatttaagaaagatatagatgaacatcagtctctgacggagagtgtcttacagaagggggagattcttcttcagtgcctgttggagaacaccccagttttagaggatgtccttgggaggatcgcaaagcagtctggtgagctggagagccacgcagatcgcctgtatgactctatcttggcctctctggacatgctggctggctgcacccttatccctgacaaaaagcccatggcggcaatggagcacccatgtgaaggggtttaacctggcatcttctcaggcagaggtgcaacctgtcggccaaacactggctagtgagaaaaaaatccttcaagaagtccttgcaagagccattcaacactgaagtcaagggggaaaccttcaatatactagctttaaaatgcctttctcctccctgaatggagggctgagttactatttttatttacaatgaatccttccaaacta

SEQ ID NO: 350245 - DNA, 460 bp, Homo sapiens
agagtgctgatggcagagattggtgaggatttggataaatctgatgtgtcctcattaattttcctcatgaaggattacatgggccgaggcaagataagcaaggagaagagtttcttggaccttgtggttgagttggagaaactaaatctggttgccccagatcaactggatttattagaaaaatgcctaaagaacatccacagaatagacctgaagacaaaaatccagaagtacaagcagtctgacattttgctgtcagctggaagagctgatctgctggctgtataatgttgcagatgttactgaccacgggactgcagccaggtccaatcttacaagtctcaagtcttctctgcagctttaccgggtaatatgcggtcctggctctggcttgttccctcacaagagtgtggctaaattactcgattacaaagtaaaatctcaaataaccaaaatctgg

SEQ ID NO: 350246 - DNA, 6067 bp, Homo sapiens
gttctgctctccggggaaagccaggtggagaagaaggtctccagaccccatggtggcaggaggcaggccactgagtgcaggctcagacctctcaggggaaagccaggtggagaagaccaagctttcttcctccgaggagttccctcagactctgagccttcccagaacaacaactatttgctcaggacatgatgctgataccgaagatgatccatccctagcagatttgccccaggcactggacctcagccagcagcctcacagctcaggtctctcttgcctgtcacagtggaagtccgtgctgagcccaggttccgcagctcagccttccagctgcagcatctctgcttcctccacaggcagcagtctccagggtcaccaggagagggcggagcctcgtggtggttctctggccaaggtctcctcctccctggagccggtcgtcccccaggaaccttcctctgtggtggggctaggacctcggccccagtggtcaccacagcctgtgttctctgggggtgatgcttctgggctaggcaggagacgcctctccttccaggctgagtactgggcctgtgtgctgccagattccctgcctccatcacccgaccgccactcccctctctggaacccaaataaagagtatgaagatctgcttgactatacttacccactgaggcccgggcctcagctcccaaagcaccttgatagccgtgtgccagctgaccctgtcctgcaggactccggggtagacctggatagcttctctgtctctccagcaagcaccctcaaatcacctactaatgtctcccccaactgcccaccagcagaggccactgccctgccattttctgggcccagagagccaagccttaagcagtggccctccagagtaccccagaaacagggtggcatgggcttggcatcttggagccaacttgcatctacccccagagccccaggcagtagggatgctcgttgggagcgcagagagccagccctgaggggtgcgaaggaccggctgactataggcaagcaccttgatatgggctctccccagctaaggacacgggacagagggtggccctcgcccaggccagagagggagaagaggaccagccagagtgcccggcgccctacctgcacagagtctaggtggaaatcagaagaggaagtggaaagtgatgacgagtatcttgccctccccgctcggctgacacaggtttctagcctggtttcgtatctaggatccatttctaccttggttaccctgcccactggggatatcaaagggcagagccccttggaagtgtcagacagtgatgggccagcttccttcccttcaagctccagccaaagccagcttccccctggagctgccctccaaggatctggggatcctgagggccagaatccctgtttcctgcgctccttcgtccgtgcccacgactccgcaggggaaggcagtctggggagcagccaggccctcggggtctcctctggactgctgaaaacacgcccctccttgccagctaggttggaccggtggccattctcagacccagatgttgaagggcagcttcccaggaaaggaggagaacagggaaaagaatcactggtgcaatgtgtgaagacattttgctgtcagctggaagagctgatctgctggctgtataatgttgcagatgttactgaccacgggactgcagccaggtccaatcttacaagtctcaagtcttctctgcagctttaccggcaatttaagaaagatatagatgaacatcagtctctgacggagagtgtcttacagaagggggagattcttcttcagtgcctgttggagaacaccccagttttagaggatgtccttgggaggatcgcaaagcagtctggtgagctggagagccacgcagatcgcctgtatgactctatcttggcctctctggacatgctggctggctgcacccttatccctgacaaaaagcccatggcggcaatggagcacccatgtgaaggggtttaacctggcatcttctcaggcagaggtgcaacctgtcggccaaacactggctagtgagaaaaaaatccttcaagaagtccttgcaagagccattcaacactgaagtcaagggggaaaccttcaatatactagctttaaaatgcctttctcctccctgaatggagggctgagttactatttttatttacaatgaatccttccaaactaaggttttccttttggtgcttctccacaaagagcgtgtagctttgcaatttttgataaaataagacgtgttgccttcccctctatcccattaaaaaagagcagataaagctcaaactattccacctggtagggtcatttaccaagggctggtaggagattccgaatactcaatattctcaggcatgcaagaggacctaagagactgaaaaaagtgaattgttggccagaaaccttgggtcttttcataaaaggaaatttgggcttgtcaatccctctttaaagatataggtagaaagaagagatttttaaccctttgtctgcaaaagaaaaagggttaaatgaagcatctatacagatgactttgggagattatgacaccttttgccatcttcagggcttacgtctttactttcttggctaaccagtttcttagaagaaaatgtgtcagggacttggggatctacagtcatgctttagcatggctatggagctaattatcaagcttaaagggtaactttgggaggactcctcccttcactcctagtctcccttggaagagcagtccaggctcagggaagggaatggataggatgacacagtaagtacagaaactgaagctgtcaatagtgaaggaaaaaggggaattcttcgttgctttggcattgacacataagtactttgattaaaaaaaaaaaaaactatggatcaaccattcaaagcatcaattctatagctttttgcagcaagatgatcagttattgctggtaactgcagattctacagaaaagcacttttaaagttctgttgggccatgaatgaacctggaaggaggaaagcacagtaacaatggaaactaaagtcctattattaatgtgacttttctgcttcagaatttctgagactttatagtcactggaaaatagccattaaattctttaaagattagctcttcaacagtagctacacataaaatgcagtatttcaagtgcctgatgctgctgtggtatgctttatcataatgcttaagggcatgatcaaaattaaaatggcttatgagtttgccatattaatcatcttagttccatacacactgagactttaaaagggaaaaaccactctagcaaataattgtcaattataaacctgtatgtaaaacattcttgaaaacctagagttggttaaaaaggtagagatgtctgacggcctcttcttaaattgatatattttaccttctcttagatgtacatttataagtaggaacatgtccttccactgagtatgttactgaatagcccttaggaaattaaacccatttatttactaatatttgacaggcatagaagtgtattaattagcataaaagttggagatgaaaaccctatagaaacaaattggccaatattatactaattgaatgcagaatgtggcattctattcccattcaactaataatcagcttcaactgacaggaatttgcacagaatgttacacaataccctgtttcccaagaaagtactaccttacctagagatgatctaagatatttttgttcatcctctgaataaggtgagactaaagggtgctaactccctggacctggctgtgaatgctactgaagagtatcaacacaactgttaattataccgccgtgctttaagtttaagacttaccttaaaactcaagctgaaggctgggcacggtggctcatgcctgtaatcccagcactttgggaggccgaggcgggtggatcacaaggtcaggagatcgagaccatcctggctaacacggtgaaaccccatctctactaaaaatacaaaaagaaattagccaggcgtggtgatgggcgcctgtagtcccagctacttgggaggctgaggcatgagaatggcatgaacccgggaggcggagcttgcagtgagctgagatggcaccactgcactccagcctgggcaacagagtgagactcttgtctcaaaaaaaaaaaaatcaagctgaaattgtttcagcctagtaagatgctgccagcagcatttctatgagcaaacatggccaaattagagtcaagtagctgagcttgctaactgcactgtgatgccacactggaataacttagtagtcccttaaaattaatggaagttaaatccacagggaagtgatgatactcaaagctggatcagcagtttcaagatctgggttcttggagatccataggtaagctcagcaaatggaagacgacgtcaacacagggctattttgaagcttaggtgggaatggaacacaaagaaggtttgaggtaagatatgctggaaaggcaagatgtaggctaagggaaattcaatccaaggtcgaagaataggaaattactgctcagaccacaatgactatcattctgaaaggatttcacagagtgtgcagctgcttagatttaagaacactcttcttcactatgtaaactaatttatggcagcaccttatatttagaacaagtggtaattccctttactaagtgaacagattattaaaacctgtagtagctttgaaccgtttgtacttgaaaatgggggtataaaggggtatatattttttccagaaccacatttattggcgtatacatagaagcaaatcttaaggcatgctgaaatttgttgtaaatcccaatctttactgccatggggaaaagaacgctggaattttccaaacttaagtctgtaaatatgctcatcttaagttcatgtaatgtttccgctaactcaccaagaataagctgacaatttaaacaacttttactgtgtaaaaatgaagtgcacggcatggcatcacagtatcttgacatttgttttgtgtcatttagctactttagaaaatagtttctgaactctttccccctttatactgtattaaggcaaaaacaaaacttctgaagcattaaagatcttcaccaaaataactattggtaacttcaggaatttgtcagttgccttatgtgaggatgaatagatccaccaagcacgcctataatacaaagtaaactatgatttttattgtgaaattttcatagatggaaaattgaatattctgtccatttcattttacaattatcttaccacttatttttgtaccatgtatttcaattgcctgtttagtgaaaaataaaaattaaaaaaacctattcatttttggcttgtgtttagcttaaattttatcattaaattaaggagcccacaacaaaatgtgttgccagcagccatatcccaagcccctgcgtgaagaatgttttggctgctatttcaacctaaggaaacaacgtttgacctcagtcaccttaaaatgccagtgtgggcagaagattttttattcctcacaattaaaaaccaaacaaaaccccctaggatcttgaaggtcctatttcagaaaatcttcatatatgcaaaatgtcaccaaaataaatacatttgcctcaattatcattaccacccagtattcatgttttaatttttagggatataatttctaaatttagagcaatcaaatttcctgcttcctatcttaatgcttaaaccctcctccaacaccaagttaagcaactgtggaggataaaatagttgaatctgactgaaagcatggaagaaaaacattagcacacattagtctgatcatttgccaattaggaaaggtgctgctttctacctctaccacagatgcatttatgaaatgttgatcaatgaagctatttcaaatggttttagagaaggatcagagataacgggctagatagcatacattctaaacttgttttacatatagtttgagctccctgaaccactgaagttggttaaatcc

SEQ ID NO: 350247 - DNA, 6458 bp, Homo sapiens
gccctgcgcgttttgggctgcggttggagggccgcagttgcagtcagggtccgccagctcggggccagcgcatggggctgctgagaccgctccggacgtgcgaagcgttcgcggtgcggtaggaagctgaagtcttcagcagaaccctgacctaggtagggagtctcaatggccctgggtgaagaaaaggcagaagcggaagcatctgaagacacaaaggcccagtcctatgggagagggagctgcagggagcgggagctggacatcccagggcccatgagtggggagcagcccccacgcctggaagctgagggagggctcatctcccctgtatggggggcagaagggatacctgcccctacttgctggattgggactgaccctggcagcccctctagagcccaccagccacaggccagtgatgccaacagagagcccgtagctgagaggtctgagcctgcactcagtggcctgcctcctgccaccatggggtctggagaccttctgctctccggggaaagccaggtggagaagaccaagctttcttcctccgaggagttccctcagactctgagccttcccagaacaacaactatttgctcaggacatgatgctgataccgaagatgatccatccctagcagatttgccccaggcactggacctcagccagcagcctcacagctcaggtctctcttgcctgtcacagtggaagtccgtgctgagcccaggttccgcagctcagccttccagctgcagcatctctgcttcctccacaggcagcagtctccagggtcaccaggagagggcggagcctcgtggtggttctctggccaaggtctcctcctccctggagccggtcgtcccccaggaaccttcctctgtggtggggctaggacctcggccccagtggtcaccacagcctgtgttctctgggggtgatgcttctgggctaggcaggagacgcctctccttccaggctgagtactgggcctgtgtgctgccagattccctgcctccatcacccgaccgccactcccctctctggaacccaaataaagagtatgaagatctgcttgactatacttacccactgaggcccgggcctcagctcccaaagcaccttgatagccgtgtgccagctgaccctgtcctgcaggactccggggtagacctggatagcttctctgtctctccagcaagcaccctcaaatcacctactaatgtctcccccaactgcccaccagcagaggccactgccctgccattttctgggcccagagagccaagccttaagcagtggccctccagagtaccccagaaacagggtggcatgggcttggcatcttggagccaacttgcatctacccccagagccccaggcagtagggatgctcgttgggagcgcagagagccagccctgaggggtgcgaaggaccggctgactataggcaagcaccttgatatgggctctccccagctaaggacacgggacagagggtggccctcgcccaggccagagagggagaagaggaccagccagagtgcccggcgccctacctgcacagagtctaggtggaaatcagaagaggaagtggaaagtgatgacgagtatcttgccctccccgctcggctgacacaggtttctagcctggtttcgtatctaggatccatttctaccttggttaccctgcccactggggatatcaaagggcagagccccttggaagtgtcagacagtgatgggccagcttccttcccttcaagctccagccaaagccagcttccccctggagctgccctccaaggatctggggatcctgagggccagaatccctgtttcctgcgctccttcgtccgtgcccacgactccgcaggggaaggcagtctggggagcagccaggccctcggggtctcctctggactgctgaaaacacgcccctccttgccagctaggttggaccggtggccattctcagacccagatgttgaagggcagcttcccaggaaaggaggagaacagggacattttgctgtcagctggaagagctgatctgctggctgtataatgttgcagatgttactgaccacgggactgcagccaggtccaatcttacaagtctcaagtcttctctgcagctttaccggcaatttaagaaagatatagatgaacatcagtctctgacggagagtgtcttacagaagggggagattcttcttcagtgcctgttggagaacaccccagttttagaggatgtccttgggaggatcgcaaagcagtctggtgagctggagagccacgcagatcgcctgtatgactctatcttggcctctctggacatgctggctggctgcacccttatccctgacaaaaagcccatggcggcaatggagcacccatgtgaaggggtttaacctggcatcttctcaggcagaggtgcaacctgtcggccaaacactggctagtgagaaaaaaatccttcaagaagtccttgcaagagccattcaacactgaagtcaagggggaaaccttcaatatactagctttaaaatgcctttctcctccctgaatggagggctgagttactatttttatttacaatgaatccttccaaactaaggttttccttttggtgcttctccacaaagagcgtgtagctttgcaatttttgataaaataagacgtgttgccttcccctctatcccattaaaaaagagcagataaagctcaaactattccacctggtagggtcatttaccaagggctggtaggagattccgaatactcaatattctcaggcatgcaagaggacctaagagactgaaaaaagtgaattgttggccagaaaccttgggtcttttcataaaaggaaatttgggcttgtcaatccctctttaaagatataggtagaaagaagagatttttaaccctttgtctgcaaaagaaaaagggttaaatgaagcatctatacagatgactttgggagattatgacaccttttgccatcttcagggcttacgtctttactttcttggctaaccagtttcttagaagaaaatgtgtcagggacttggggatctacagtcatgctttagcatggctatggagctaattatcaagcttaaagggtaactttgggaggactcctcccttcactcctagtctcccttggaagagcagtccaggctcagggaagggaatggataggatgacacagtaagtacagaaactgaagctgtcaatagtgaaggaaaaaggggaattcttcgttgctttggcattgacacataagtactttgattaaaaaaaaaaaaaactatggatcaaccattcaaagcatcaattctatagctttttgcagcaagatgatcagttattgctggtaactgcagattctacagaaaagcacttttaaagttctgttgggccatgaatgaacctggaaggaggaaagcacagtaacaatggaaactaaagtcctattattaatgtgacttttctgcttcagaatttctgagactttatagtcactggaaaatagccattaaattctttaaagattagctcttcaacagtagctacacataaaatgcagtatttcaagtgcctgatgctgctgtggtatgctttatcataatgcttaagggcatgatcaaaattaaaatggcttatgagtttgccatattaatcatcttagttccatacacactgagactttaaaagggaaaaaccactctagcaaataattgtcaattataaacctgtatgtaaaacattcttgaaaacctagagttggttaaaaaggtagagatgtctgacggcctcttcttaaattgatatattttaccttctcttagatgtacatttataagtaggaacatgtccttccactgagtatgttactgaatagcccttaggaaattaaacccatttatttactaatatttgacaggcatagaagtgtattaattagcataaaagttggagatgaaaaccctatagaaacaaattggccaatattatactaattgaatgcagaatgtggcattctattcccattcaactaataatcagcttcaactgacaggaatttgcacagaatgttacacaataccctgtttcccaagaaagtactaccttacctagagatgatctaagatatttttgttcatcctctgaataaggtgagactaaagggtgctaactccctggacctggctgtgaatgctactgaagagtatcaacacaactgttaattataccgccgtgctttaagtttaagacttaccttaaaactcaagctgaaggctgggcacggtggctcatgcctgtaatcccagcactttgggaggccgaggcgggtggatcacaaggtcaggagatcgagaccatcctggctaacacggtgaaaccccatctctactaaaaatacaaaaagaaattagccaggcgtggtgatgggcgcctgtagtcccagctacttgggaggctgaggcatgagaatggcatgaacccgggaggcggagcttgcagtgagctgagatggcaccactgcactccagcctgggcaacagagtgagactcttgtctcaaaaaaaaaaaaatcaagctgaaattgtttcagcctagtaagatgctgccagcagcatttctatgagcaaacatggccaaattagagtcaagtagctgagcttgctaactgcactgtgatgccacactggaataacttagtagtcccttaaaattaatggaagttaaatccacagggaagtgatgatactcaaagctggatcagcagtttcaagatctgggttcttggagatccataggtaagctcagcaaatggaagacgacgtcaacacagggctattttgaagcttaggtgggaatggaacacaaagaaggtttgaggtaagatatgctggaaaggcaagatgtaggctaagggaaattcaatccaaggtcgaagaataggaaattactgctcagaccacaatgactatcattctgaaaggatttcacagagtgtgcagctgcttagatttaagaacactcttcttcactatgtaaactaatttatggcagcaccttatatttagaacaagtggtaattccctttactaagtgaacagattattaaaacctgtagtagctttgaaccgtttgtacttgaaaatgggggtataaaggggtatatattttttccagaaccacatttattggcgtatacatagaagcaaatcttaaggcatgctgaaatttgttgtaaatcccaatctttactgccatggggaaaagaacgctggaattttccaaacttaagtctgtaaatatgctcatcttaagttcatgtaatgtttccgctaactcaccaagaataagctgacaatttaaacaacttttactgtgtaaaaatgaagtgcacggcatggcatcacagtatcttgacatttgttttgtgtcatttagctactttagaaaatagtttctgaactctttccccctttatactgtattaaggcaaaaacaaaacttctgaagcattaaagatcttcaccaaaataactattggtaacttcaggaatttgtcagttgccttatgtgaggatgaatagatccaccaagcacgcctataatacaaagtaaactatgatttttattgtgaaattttcatagatggaaaattgaatattctgtccatttcattttacaattatcttaccacttatttttgtaccatgtatttcaattgcctgtttagtgaaaaataaaaattaaaaaaacctattcatttttggcttgtgtttagcttaaattttatcattaaattaaggagcccacaacaaaatgtgttgccagcagccatatcccaagcccctgcgtgaagaatgttttggctgctatttcaacctaaggaaacaacgtttgacctcagtcaccttaaaatgccagtgtgggcagaagattttttattcctcacaattaaaaaccaaacaaaaccccctaggatcttgaaggtcctatttcagaaaatcttcatatatgcaaaatgtcaccaaaataaatacatttgcctcaattatcattaccacccagtattcatgttttaatttttagggatataatttctaaatttagagcaatcaaatttcctgcttcctatcttaatgcttaaaccctcctccaacaccaagttaagcaactgtggaggataaaatagttgaatctgactgaaagcatggaagaaaaacattagcacacattagtctgatcatttgccaattaggaaaggtgctgctttctacctctaccacagatgcatttatgaaatgttgatcaatgaagctatttcaaatggttttagagaaggatcagagataacgggctagatagcatacattctaaacttgttttacatatagtttgagctccctgaaccactgaagttggttaaatcc

SEQ ID NO: 350248 - DNA, 5699 bp, Homo sapiens
  misc_feature (774)..(774): n is a, c, g, or t
  misc_feature (875)..(875): n is a, c, g, or t
  misc_feature (880)..(880): n is a, c, g, or t
ggcgtgagccactgcgcctggccaggtcattttctttttcagtctgttcactgaggcccacaaaacaaagggtctcaagcactcccaaatctattacagaccacccatgtgaaataacattcttcccagccaatagaaactgatagacctggtagcaggggtaagcatctgaaccttggcatgtcattttatttaagccttatgcccaagaggatctggatgtgcccttacagagatacctgtcttacctctaaagtcaggtaataccagccatcagaaaaccataatatctctgtgcccttctgtgaattacgtaatttcaaagtggagtcagtgagttcttttcttagctttaatcagaagttaacaacataggttctccagtgcaacagaagtccctggagaatcactgttaaaaaagggcagacattcagaaactactgccaggtcctactttgtgtaaaatactatacccttgtatgttcttttgaaaatgcttactggacaacacttgcatgggttttatttctggtttaatttctttgaacctcattgtttttagaggatgtccttgggaggatcgcaaagcagtctggtgagctggagagccacgcagatcgcctgtatgactctatcttggcctctctggacatgctggctggctgcacccttatccctgacaaaaagcccatggcggcaatggagcacccatgtgaaggggtttaacctggtaagtggaggaactcaaaaagaaaatttgcccaccaaccctgntgtaacagttggccactacttagaagcttgttgagccaagaactattatttaaacaaatgagatactggaagaagacagccaatggtactaaaaaaggagntgctngtcttcctatgatgatgaaggctcactgcggtgctttccattactgttcacccctgctgcctgctgaggatgagggtgcctctgtgctgccatttctatggcactttcttcaccaccaaccctgccatcccaagacaagagcagcacaacttatctgtacacctactttatttctgcacaggtacacttttccagtatggggccatgacctggccacccctgttctgcaggatcttctccccagctcatttggtactccatctccaagcatctctgacagcaccaagtgcttagagaaacccagagttactgataactttgcaccaccacccctgccctgcacaaagggtctccacatatctcccacaccactcccttccaaaaaggctagggggatggaggggttaaagacaccttggagacttaactggtagtacaactttcttttgctcccttgagaaagtcaaacagaatgacagaaaaggagctaggagagcaaaggtgggtgtgtccaccacagagttgctactgccaatgcttttcataattctgcaattggactgtcgtacgtcgctcctacaacaaaatgtttgtagtgcttaactcatagattttctaggtgagcactataggtatgctaagagcagggagtccctgtgtttttatcagagcaactgtgagacgtcatcttggttctaaaatgaatgcaggggactgctgttgtcgtttcttcctctacaacattatgcctgtaacaaatgctgccttttctctttcaggcatcttctcaggcagaggtgcaacctgtcggccaaacactggctagtgagaaaaaaatccttcaagaagtccttgcaagagccattcaacactgaagtcaagggggaaaccttcaatatactagctttaaaatgcctttctcctccctgaatggagggctgagttactatttttatttacaatgaatccttccaaactaaggttttccttttggtgcttctccacaaagagcgtgtagctttgcaatttttgataaaataagacgtgttgccttcccctctatcccattaaaaaagagcagataaagctcaaactattccacctggtagggtcatttaccaagggctggtaggagattccgaatactcaatattctcaggcatgcaagaggacctaagagactgaaaaaagtgaattgttggccagaaaccttgggtcttttcataaaaggaaatttgggcttgtcaatccctctttaaagatataggtagaaagaagagatttttaaccctttgtctgcaaaagaaaaagggttaaatgaagcatctatacagatgactttgggagattatgacaccttttgccatcttcagggcttacgtctttactttcttggctaaccagtttcttagaagaaaatgtgtcagggacttggggatctacagtcatgctttagcatggctatggagctaattatcaagcttaaagggtaactttgggaggactcctcccttcactcctagtctcccttggaagagcagtccaggctcagggaagggaatggataggatgacacagtaagtacagaaactgaagctgtcaatagtgaaggaaaaaggggaattcttcgttgctttggcattgacacataagtactttgattaaaaaaaaaaaaaactatggatcaaccattcaaagcatcaattctatagctttttgcagcaagatgatcagttattgctggtaactgcagattctacagaaaagcacttttaaagttctgttgggccatgaatgaacctggaaggaggaaagcacagtaacaatggaaactaaagtcctattattaatgtgacttttctgcttcagaatttctgagactttatagtcactggaaaatagccattaaattctttaaagattagctcttcaacagtagctacacataaaatgcagtatttcaagtgcctgatgctgctgtggtatgctttatcataatgcttaagggcatgatcaaaattaaaatggcttatgagtttgccatattaatcatcttagttccatacacactgagactttaaaagggaaaaaccactctagcaaataattgtcaattataaacctgtatgtaaaacattcttgaaaacctagagttggttaaaaaggtagagatgtctgacggcctcttcttaaattgatatattttaccttctcttagatgtacatttataagtaggaacatgtccttccactgagtatgttactgaatagcccttaggaaattaaacccatttatttactaatatttgacaggcatagaagtgtattaattagcataaaagttggagatgaaaaccctatagaaacaaattggccaatattatactaattgaatgcagaatgtggcattctattcccattcaactaataatcagcttcaactgacaggaatttgcacagaatgttacacaataccctgtttcccaagaaagtactaccttacctagagatgatctaagatatttttgttcatcctctgaataaggtgagactaaagggtgctaactccctggacctggctgtgaatgctactgaagagtatcaacacaactgttaattataccgccgtgctttaagtttaagacttaccttaaaactcaagctgaaggctgggcacggtggctcatgcctgtaatcccagcactttgggaggccgaggcgggtggatcacaaggtcaggagatcgagaccatcctggctaacacggtgaaaccccatctctactaaaaatacaaaaagaaattagccaggcgtggtgatgggcgcctgtagtcccagctacttgggaggctgaggcatgagaatggcatgaacccgggaggcggagcttgcagtgagctgagatggcaccactgcactccagcctgggcaacagagtgagactcttgtctcaaaaaaaaaaaaatcaagctgaaattgtttcagcctagtaagatgctgccagcagcatttctatgagcaaacatggccaaattagagtcaagtagctgagcttgctaactgcactgtgatgccacactggaataacttagtagtcccttaaaattaatggaagttaaatccacagggaagtgatgatactcaaagctggatcagcagtttcaagatctgggttcttggagatccataggtaagctcagcaaatggaagacgacgtcaacacagggctattttgaagcttaggtgggaatggaacacaaagaaggtttgaggtaagatatgctggaaaggcaagatgtaggctaagggaaattcaatccaaggtcgaagaataggaaattactgctcagaccacaatgactatcattctgaaaggatttcacagagtgtgcagctgcttagatttaagaacactcttcttcactatgtaaactaatttatggcagcaccttatatttagaacaagtggtaattccctttactaagtgaacagattattaaaacctgtagtagctttgaaccgtttgtacttgaaaatgggggtataaaggggtatatattttttccagaaccacatttattggcgtatacatagaagcaaatcttaaggcatgctgaaatttgttgtaaatcccaatctttactgccatggggaaaagaacgctggaattttccaaacttaagtctgtaaatatgctcatcttaagttcatgtaatgtttccgctaactcaccaagaataagctgacaatttaaacaacttttactgtgtaaaaatgaagtgcacggcatggcatcacagtatcttgacatttgttttgtgtcatttagctactttagaaaatagtttctgaactctttccccctttatactgtattaaggcaaaaacaaaacttctgaagcattaaagatcttcaccaaaataactattggtaacttcaggaatttgtcagttgccttatgtgaggatgaatagatccaccaagcacgcctataatacaaagtaaactatgatttttattgtgaaattttcatagatggaaaattgaatattctgtccatttcattttacaattatcttaccacttatttttgtaccatgtatttcaattgcctgtttagtgaaaaataaaaattaaaaaaacctattcatttttggcttgtgtttagcttaaattttatcattaaattaaggagcccacaacaaaatgtgttgccagcagccatatcccaagcccctgcgtgaagaatgttttggctgctatttcaacctaaggaaacaacgtttgacctcagtcaccttaaaatgccagtgtgggcagaagattttttattcctcacaattaaaaaccaaacaaaaccccctaggatcttgaaggtcctatttcagaaaatcttcatatatgcaaaatgtcaccaaaataaatacatttgcctcaattatcattaccacccagtattcatgttttaatttttagggatataatttctaaatttagagcaatcaaatttcctgcttcctatcttaatgcttaaaccctcctccaacaccaagttaagcaactgtggaggataaaatagttgaatctgactgaaagcatggaagaaaaacattagcacacattagtctgatcatttgccaattaggaaaggtgctgctttctacctctaccacagatgcatttatgaaatgttgatcaatgaagctatttcaaatggttttagagaaggatcagagataacgggctagatagcatacattctaaacttgttttacatatagtttgagctccctgaaccactgaagttggttaaatcc

SEQ ID NO: 350249 - DNA, 4664 bp, Homo sapiens
gaatggaataaattctgagactcccatagccctgaattaaaagagaaccccatgaggtgagggcgctagaaggagaccctaactccaagctgtttgtgagccagcctctgtcagggaagatgcttctgatgtcaaactaaacaggaaaaactactgactctatttaccttgggttcaaagaagctgaagttaaactgttgcactgtttacttggggaattctgcagacctgatggggtgaatcttacacattagaggggaataaggcttccctacatgctgtgcttttcaaataacgtttacaaaacaatagtaacgaagcttctgccttttctttttctgatacgccttaagcaatttaagaaagatatagatgaacatcagtctctgacggagagtgtcttacagaagggggagattcttcttcagtgcctgttggagaacaccccagttttagaggatgtccttgggaggatcgcaaagcagtctggtgagctggagagccacgcagatcgcctgtatgactctatcttggcctctctggacatgctggctggctgcacccttatccctgacaaaaagcccatggcggcaatggagcacccatgtgaaggggtttaacctggcatcttctcaggcagaggtgcaacctgtcggccaaacactggctagtgagaaaaaaatccttcaagaagtccttgcaagagccattcaacactgaagtcaagggggaaaccttcaatatactagctttaaaatgcctttctcctccctgaatggagggctgagttactatttttatttacaatgaatccttccaaactaaggttttccttttggtgcttctccacaaagagcgtgtagctttgcaatttttgataaaataagacgtgttgccttcccctctatcccattaaaaaagagcagataaagctcaaactattccacctggtagggtcatttaccaagggctggtaggagattccgaatactcaatattctcaggcatgcaagaggacctaagagactgaaaaaagtgaattgttggccagaaaccttgggtcttttcataaaaggaaatttgggcttgtcaatccctctttaaagatataggtagaaagaagagatttttaaccctttgtctgcaaaagaaaaagggttaaatgaagcatctatacagatgactttgggagattatgacaccttttgccatcttcagggcttacgtctttactttcttggctaaccagtttcttagaagaaaatgtgtcagggacttggggatctacagtcatgctttagcatggctatggagctaattatcaagcttaaagggtaactttgggaggactcctcccttcactcctagtctcccttggaagagcagtccaggctcagggaagggaatggataggatgacacagtaagtacagaaactgaagctgtcaatagtgaaggaaaaaggggaattcttcgttgctttggcattgacacataagtactttgattaaaaaaaaaaaaaactatggatcaaccattcaaagcatcaattctatagctttttgcagcaagatgatcagttattgctggtaactgcagattctacagaaaagcacttttaaagttctgttgggccatgaatgaacctggaaggaggaaagcacagtaacaatggaaactaaagtcctattattaatgtgacttttctgcttcagaatttctgagactttatagtcactggaaaatagccattaaattctttaaagattagctcttcaacagtagctacacataaaatgcagtatttcaagtgcctgatgctgctgtggtatgctttatcataatgcttaagggcatgatcaaaattaaaatggcttatgagtttgccatattaatcatcttagttccatacacactgagactttaaaagggaaaaaccactctagcaaataattgtcaattataaacctgtatgtaaaacattcttgaaaacctagagttggttaaaaaggtagagatgtctgacggcctcttcttaaattgatatattttaccttctcttagatgtacatttataagtaggaacatgtccttccactgagtatgttactgaatagcccttaggaaattaaacccatttatttactaatatttgacaggcatagaagtgtattaattagcataaaagttggagatgaaaaccctatagaaacaaattggccaatattatactaattgaatgcagaatgtggcattctattcccattcaactaataatcagcttcaactgacaggaatttgcacagaatgttacacaataccctgtttcccaagaaagtactaccttacctagagatgatctaagatatttttgttcatcctctgaataaggtgagactaaagggtgctaactccctggacctggctgtgaatgctactgaagagtatcaacacaactgttaattataccgccgtgctttaagtttaagacttaccttaaaactcaagctgaaggctgggcacggtggctcatgcctgtaatcccagcactttgggaggccgaggcgggtggatcacaaggtcaggagatcgagaccatcctggctaacacggtgaaaccccatctctactaaaaatacaaaaagaaattagccaggcgtggtgatgggcgcctgtagtcccagctacttgggaggctgaggcatgagaatggcatgaacccgggaggcggagcttgcagtgagctgagatggcaccactgcactccagcctgggcaacagagtgagactcttgtctcaaaaaaaaaaaaatcaagctgaaattgtttcagcctagtaagatgctgccagcagcatttctatgagcaaacatggccaaattagagtcaagtagctgagcttgctaactgcactgtgatgccacactggaataacttagtagtcccttaaaattaatggaagttaaatccacagggaagtgatgatactcaaagctggatcagcagtttcaagatctgggttcttggagatccataggtaagctcagcaaatggaagacgacgtcaacacagggctattttgaagcttaggtgggaatggaacacaaagaaggtttgaggtaagatatgctggaaaggcaagatgtaggctaagggaaattcaatccaaggtcgaagaataggaaattactgctcagaccacaatgactatcattctgaaaggatttcacagagtgtgcagctgcttagatttaagaacactcttcttcactatgtaaactaatttatggcagcaccttatatttagaacaagtggtaattccctttactaagtgaacagattattaaaacctgtagtagctttgaaccgtttgtacttgaaaatgggggtataaaggggtatatattttttccagaaccacatttattggcgtatacatagaagcaaatcttaaggcatgctgaaatttgttgtaaatcccaatctttactgccatggggaaaagaacgctggaattttccaaacttaagtctgtaaatatgctcatcttaagttcatgtaatgtttccgctaactcaccaagaataagctgacaatttaaacaacttttactgtgtaaaaatgaagtgcacggcatggcatcacagtatcttgacatttgttttgtgtcatttagctactttagaaaatagtttctgaactctttccccctttatactgtattaaggcaaaaacaaaacttctgaagcattaaagatcttcaccaaaataactattggtaacttcaggaatttgtcagttgccttatgtgaggatgaatagatccaccaagcacgcctataatacaaagtaaactatgatttttattgtgaaattttcatagatggaaaattgaatattctgtccatttcattttacaattatcttaccacttatttttgtaccatgtatttcaattgcctgtttagtgaaaaataaaaattaaaaaaacctattcatttttggcttgtgtttagcttaaattttatcattaaattaaggagcccacaacaaaatgtgttgccagcagccatatcccaagcccctgcgtgaagaatgttttggctgctatttcaacctaaggaaacaacgtttgacctcagtcaccttaaaatgccagtgtgggcagaagattttttattcctcacaattaaaaaccaaacaaaaccccctaggatcttgaaggtcctatttcagaaaatcttcatatatgcaaaatgtcaccaaaataaatacatttgcctcaattatcattaccacccagtattcatgttttaatttttagggatataatttctaaatttagagcaatcaaatttcctgcttcctatcttaatgcttaaaccctcctccaacaccaagttaagcaactgtggaggataaaatagttgaatctgactgaaagcatggaagaaaaacattagcacacattagtctgatcatttgccaattaggaaaggtgctgctttctacctctaccacagatgcatttatgaaatgttgatcaatgaagctatttcaaatggttttagagaaggatcagagataacgggctagatagcatacattctaaacttgttttacatatagtttgagctccctgaaccactgaagttggttaaatcc

SEQ ID NO: 350250 - DNA, 4365 bp, Homo sapiens
gctctcgcccggctggagctgtttcgatgcggagtacgctctaattctgcggacccgtctccgagagcgggcgccctactactcgcgcgcgctgctccggactgcgcggccggcccggatgtggttgcccccgcgtcgcgtctcccgctatttccgctgtcagaagctcgcgctccgtcgtttgttactgccctcgtcatcaaggaaggtgccgcgtgccatgatggctggcctcgcgacatagccccacttgtgaacttgccattccgggcccgatggacgagcgatgcctcccccggtgatccgggggctcaacgctgcgacatattgtccgggctggagctacaattctgtcggccaaacactggctagtgagaaaaaaatccttcaagaagtccttgcaagagccattcaacactgaagtcaagggggaaaccttcaatatactagctttaaaatgcctttctcctccctgaatggagggctgagttactatttttatttacaatgaatccttccaaactaaggttttccttttggtgcttctccacaaagagcgtgtagctttgcaatttttgataaaataagacgtgttgccttcccctctatcccattaaaaaagagcagataaagctcaaactattccacctggtagggtcatttaccaagggctggtaggagattccgaatactcaatattctcaggcatgcaagaggacctaagagactgaaaaaagtgaattgttggccagaaaccttgggtcttttcataaaaggaaatttgggcttgtcaatccctctttaaagatataggtagaaagaagagatttttaaccctttgtctgcaaaagaaaaagggttaaatgaagcatctatacagatgactttgggagattatgacaccttttgccatcttcagggcttacgtctttactttcttggctaaccagtttcttagaagaaaatgtgtcagggacttggggatctacagtcatgctttagcatggctatggagctaattatcaagcttaaagggtaactttgggaggactcctcccttcactcctagtctcccttggaagagcagtccaggctcagggaagggaatggataggatgacacagtaagtacagaaactgaagctgtcaatagtgaaggaaaaaggggaattcttcgttgctttggcattgacacataagtactttgattaaaaaaaaaaaaaactatggatcaaccattcaaagcatcaattctatagctttttgcagcaagatgatcagttattgctggtaactgcagattctacagaaaagcacttttaaagttctgttgggccatgaatgaacctggaaggaggaaagcacagtaacaatggaaactaaagtcctattattaatgtgacttttctgcttcagaatttctgagactttatagtcactggaaaatagccattaaattctttaaagattagctcttcaacagtagctacacataaaatgcagtatttcaagtgcctgatgctgctgtggtatgctttatcataatgcttaagggcatgatcaaaattaaaatggcttatgagtttgccatattaatcatcttagttccatacacactgagactttaaaagggaaaaaccactctagcaaataattgtcaattataaacctgtatgtaaaacattcttgaaaacctagagttggttaaaaaggtagagatgtctgacggcctcttcttaaattgatatattttaccttctcttagatgtacatttataagtaggaacatgtccttccactgagtatgttactgaatagcccttaggaaattaaacccatttatttactaatatttgacaggcatagaagtgtattaattagcataaaagttggagatgaaaaccctatagaaacaaattggccaatattatactaattgaatgcagaatgtggcattctattcccattcaactaataatcagcttcaactgacaggaatttgcacagaatgttacacaataccctgtttcccaagaaagtactaccttacctagagatgatctaagatatttttgttcatcctctgaataaggtgagactaaagggtgctaactccctggacctggctgtgaatgctactgaagagtatcaacacaactgttaattataccgccgtgctttaagtttaagacttaccttaaaactcaagctgaaggctgggcacggtggctcatgcctgtaatcccagcactttgggaggccgaggcgggtggatcacaaggtcaggagatcgagaccatcctggctaacacggtgaaaccccatctctactaaaaatacaaaaagaaattagccaggcgtggtgatgggcgcctgtagtcccagctacttgggaggctgaggcatgagaatggcatgaacccgggaggcggagcttgcagtgagctgagatggcaccactgcactccagcctgggcaacagagtgagactcttgtctcaaaaaaaaaaaaatcaagctgaaattgtttcagcctagtaagatgctgccagcagcatttctatgagcaaacatggccaaattagagtcaagtagctgagcttgctaactgcactgtgatgccacactggaataacttagtagtcccttaaaattaatggaagttaaatccacagggaagtgatgatactcaaagctggatcagcagtttcaagatctgggttcttggagatccataggtaagctcagcaaatggaagacgacgtcaacacagggctattttgaagcttaggtgggaatggaacacaaagaaggtttgaggtaagatatgctggaaaggcaagatgtaggctaagggaaattcaatccaaggtcgaagaataggaaattactgctcagaccacaatgactatcattctgaaaggatttcacagagtgtgcagctgcttagatttaagaacactcttcttcactatgtaaactaatttatggcagcaccttatatttagaacaagtggtaattccctttactaagtgaacagattattaaaacctgtagtagctttgaaccgtttgtacttgaaaatgggggtataaaggggtatatattttttccagaaccacatttattggcgtatacatagaagcaaatcttaaggcatgctgaaatttgttgtaaatcccaatctttactgccatggggaaaagaacgctggaattttccaaacttaagtctgtaaatatgctcatcttaagttcatgtaatgtttccgctaactcaccaagaataagctgacaatttaaacaacttttactgtgtaaaaatgaagtgcacggcatggcatcacagtatcttgacatttgttttgtgtcatttagctactttagaaaatagtttctgaactctttccccctttatactgtattaaggcaaaaacaaaacttctgaagcattaaagatcttcaccaaaataactattggtaacttcaggaatttgtcagttgccttatgtgaggatgaatagatccaccaagcacgcctataatacaaagtaaactatgatttttattgtgaaattttcatagatggaaaattgaatattctgtccatttcattttacaattatcttaccacttatttttgtaccatgtatttcaattgcctgtttagtgaaaaataaaaattaaaaaaacctattcatttttggcttgtgtttagcttaaattttatcattaaattaaggagcccacaacaaaatgtgttgccagcagccatatcccaagcccctgcgtgaagaatgttttggctgctatttcaacctaaggaaacaacgtttgacctcagtcaccttaaaatgccagtgtgggcagaagattttttattcctcacaattaaaaaccaaacaaaaccccctaggatcttgaaggtcctatttcagaaaatcttcatatatgcaaaatgtcaccaaaataaatacatttgcctcaattatcattaccacccagtattcatgttttaatttttagggatataatttctaaatttagagcaatcaaatttcctgcttcctatcttaatgcttaaaccctcctccaacaccaagttaagcaactgtggaggataaaatagttgaatctgactgaaagcatggaagaaaaacattagcacacattagtctgatcatttgccaattaggaaaggtgctgctttctacctctaccacagatgcatttatgaaatgttgatcaatgaagctatttcaaatggttttagagaaggatcagagataacgggctagatagcatacattctaaacttgttttacatatagtttgagctccctgaaccactgaagttggttaaatcc

SEQ ID NO: 350251 - DNA, 2051 bp, Homo sapiens
gccctgcgcgttttgggctgcggttggagggccgcagttgcagtcagggtccgccagctcggggccagcgcatggggctgctgagaccgctccggacgtgcgaagcgttcgcggtgcggtaggaagctgaagtcttcagcagaaccctgacctaggtagggagtctcaatggccctgggtgaagaaaaggcagaagcggaagcatctgaagacacaaaggcccagtcctatgggagagggagctgcagggagcgggagctggacatcccagggcccatgagtggggagcagcccccacgcctggaagctgagggagggctcatctcccctgtatggggggcagaagggatacctgcccctacttgctggattgggactgaccctggcagcccctctagagcccaccagccacaggccagtgatgccaacagagagcccgtagctgagaggtctgagcctgcactcagtggcctgcctcctgccaccatggggtctggagaccttctgctctccggggaaagccaggtggagaagaccaagctttcttcctccgaggagttccctcagactctgagccttcccagaacaacaactatttgctcaggacatgatgctgataccgaagatgatccatccctagcagatttgccccaggcactggacctcagccagcagcctcacagctcaggtctctcttgcctgtcacagtggaagtccgtgctgagcccaggttccgcagctcagccttccagctgcagcatctctgcttcctccacaggcagcagtctccagggtcaccaggagagggcggagcctcgtggtggttctctggccaaggtctcctcctccctggagccggtcgtcccccaggaaccttcctctgtggtggggctaggacctcggccccagtggtcaccacagcctgtgttctctgggggtgatgcttctgggctaggcaggagacgcctctccttccaggctgagtactgggcctgtgtgctgccagattccctgcctccatcacccgaccgccactcccctctctggaacccaaataaagagtatgaagatctgcttgactatacttacccactgaggcccgggcctcagctcccaaagcaccttgatagccgtgtgccagctgaccctgtcctgcaggactccggggtagacctggatagcttctctgtctctccagcaagcaccctcaaatcacctactaatgtctcccccaactgcccaccagcagaggccactgccctgccattttctgggcccagagagccaagccttaagcagtggccctccagagtaccccagaaacagggtggcatgggcttggcatcttggagccaacttgcatctacccccagagccccaggcagtagggatgctcgttgggagcgcagagagccagccctgaggggtgcgaaggaccggctgactataggcaagcaccttgatatgggctctccccagctaaggacacgggacagagggtggccctcgcccaggccagagagggagaagaggaccagccagagtgcccggcgccctacctgcacagagtctaggtggaaatcagaagaggaagtggaaagtgatgacgagtatcttgccctccccgctcggctgacacaggtttctagcctggtttcgtatctaggatccatttctaccttggttaccctgcccactggggatatcaaagggcagagccccttggaagtgtcagacagtgatgggccagcttccttcccttcaagctccagccaaagccacttcccaggaaaggaggagaacagggaaaagaatcactggtgcaatgtgtgaagacattttgctgtcagctggaagagctgatctgctggctgtataatgttgcagatgttactgaccacgggactgcagccaggtccaatcttacaagtctcaagtcttctctgcagctttaccgggtaatatgcggtcctggctctggcttgttccctcacaagagtgtggctaaattactcgattacaaagtaaaatctcaaataaccaaaatctgg

SEQ ID NO: 350252 - DNA, 923 bp, Homo sapiens
gccctgcgcgttttgggctgcggttggagggccgcagttgcagtcagggtccgccagctcggggccagcgcatggggctgctgagaccgctccggacgtgcgaagcgttcgcggtgcggtaggaagctgaagtcttcagcagaaccctgacctaggtagggagtctcaatggccctgggtgaagaaaaggcagaagcggaagcatctgaagacacaaaggcccagtcctatgggagagggagctgcagggagcgggagctggacatcccagggcccatgagtggggagcagcccccacgcctggaagctgagggagggctcatctcccctgtatggggggcagaagggatacctgcccctacttgctggattgggactgaccctggcagcccctctagagcccaccagccacaggccagtgatgccaacagagagcccgtagctgagaggtctgagcctgcactcagtggcctgcctcctgccaccatggggtctggagaccttctgctctccggggaaagccaggtggagaagaccaagctttcttcctccgaggagttccctcagactctgagccttcccagaacaacaactatttgctcaggacatgatgctgataccgaagatgatccatccctagcagatttgccccaggcactggacctcagccagcagcctcacagctcaggtctctcttgcctgtcacaacattttgctgtcagctggaagagctgatctgctggctgtataatgttgcagatgttactgaccacgggactgcagccaggtccaatcttacaagtctcaagtcttctctgcagctttaccgggtaatatgcggtcctggctctggcttgttccctcacaagagtgtggctaaattactcgattacaaagtaaaatctcaaataaccaaaatctgg

SEQ ID NO: 350253 - DNA, 2111 bp, Homo sapiens
  misc_feature (1598)..(1598): n is a, c, g, or t
gggccttgaacgtccacatctgggacatcaatgtccactttggggtccctgatgtcaacttcggggcccttgaggtcgccttccactttgggcagagaaatgtccatgtcgcccttcacctttggacctttcagattcaggtcaacttcaggcatagagatcttcggtgccttgaggtgtaagtcaggcattttaaatttggggcccttcagtttcccttctggaccatgaatgtcaatatcaggagtgtcaatgcccactttagggcctttgacatccactttgggacctttcagatctccctccagtttaggaacggaaatgtccatatctccttttatcttaggtcctttcaaattcaaatcaatgtcactcatggagatttgtgggcttttgaaatgtacatcaggcatcttaaacttgggacctttgagcttcccttcaggaccttcaatgtctacctctggccctttcagatcactttccaccttaggtagtgaaacatccacatcacccttcaccttgggacctttcaggtgcaaatcaaagtcaggcatagagattttgggagctttgatgttcatctcaggcatcttaaatttgggccccttcaattttccttccggaccttcaatattgacatcaggtgtgtcaatgtccaaactggggccttttatgtcaatttcagggcccttgagatcaccttccactttgggcagagagacatccacatcacctttcactttgggacccttcaagttaaagtcaatgtcaggcatggagattttgggggccttgatgttcatctctggcatcttgaactttggacccttgagttttgcatctggaccttcgatactgacatcaggggcatcaatgtccactttggggccagaaatctcaatgtcagccttaggaagggtaacatccacatctgggccctctcctttgaatcctggcatgctgaatttgggcattttcaccttgggcatcttcaggtgccagtctgggccatgaacatccacatctggggcatcgatgtccactttggggcccttgatgtcaacttctgggcccttgcaggtcaccttccactttaggaagggaaacatccacatcacccttcaccttgggacctttcagatgcaaatcaaagtcaggcatggagatcttgggggctttgatgttcatctcaggcatcttgaatttagggccctttagtttcgcatctggaccttcgatattcacatcaggaacatcaatgtccaccttgggtcctgagacgtcaaggtcagccttgggcaggttcacatccacatctgggccctctcctttgaagccaggcatgctgaacttgggcattttcactttgggcatttttaagtgccagtctgggccttgaacgtccacatctgggacatcaatgtccactttggggcccttgatgtcaacttcagggcactttcatttcaccttctaccttgggcacagacacatccacatcccctttgactttggggcctttcaagtgtaagtccacatcaggcatggagatcttgggggtcttgaaatgcatctcaggcatcttaaacttgggncccttcagcttcccttctggaccttcgaggctcacatctggggcttcgatgtccaccttgggtcctgagacaacaacgtcagccttaggcaagttcacatccacttctgggccctcgcctttgaggctgggcatgctgaacttgggcattttcatcttgggtattttcaggctccagtccaggccttggccttccacatctggtgctttaatatctaccttgggacctctgatgtccacatctggaacctgcatttcaccctctatctttggtgcagagatatctacatttcctttcattttgggtcctttaagatccaggtcaacatctggcaaagacatcttaggagctctgaagtgcatctcaggcatcttaaacttcgggcctttcaacttcccttcaggtccttcaaggctcagatctggagcattagtatctacttttggtgcagaaatgtccacattcgctttggacaggttcacatcaaattctggcccctctcctttgaggctg

SEQ ID NO: 350254 - DNA, 2182 bp, Homo sapiens
gggccttgaacgtccacatctgggacatcaatgtccactttggggtccctgatgtcaacttcggggcccttgaggtcgccttccactttgggcagagaaatgtccatgtcgcccttcacctttggacctttcagattcaggtcaacttcaggcatagagatcttcggtgccttgaggtgtaagtcaggcattttaaatttggggcccttcagtttcccttctggaccatgaatgtcaatatcaggagtgtcaatgcccactttagggcctttgacatccactttgggacctttcagatctccctccagtttaggaacggaaatgtccatatctccttttatcttaggtcctttcaaattcaaatcaatgtcactcatggagatttgtgggcttttgaaatgtacatcaggcatcttaaacttgggacctttgagcttcccttcaggaccttcaatgtctacctctggccctttcagatcactttccaccttaggtagtgaaacatccacatcacccttcaccttgggacctttcaggtgcaaatcaaagtcaggcatagagattttgggagctttgatgttcatctcaggcatcttaaatttgggccccttcaattttccttccggaccttcaatattgacatcaggtgtgtcaatgtccaaactggggccttttatgtcaatttcagggcccttgagatcaccttccactttgggcagagagacatccacatcacctttcactttgggacccttcaagttaaagtcaatgtcaggcatggagattttgggggccttgatgttcatctctggcatcttgaactttggacccttgagttttgcatctggaccttcgatactgacatcaggggcatcaatgtccactttggggccagaaatctcaatgtcagccttaggaagggtaacatccacatctgggccctctcctttgaatcctggcatgctgaatttgggcattttcaccttgggcatcttcaggtgccagtctgggccatgaacatccacatctggggcatcgatgtccactttggggcccttgatgtcaacttctgggcccttgcaggtcaccttccactttaggaagggaaacatccacatcacccttcaccttgggacctttcagatgcaaatcaaagtcaggcatggagatcttgggggctttgatgttcatctcaggcatcttgaatttagggccctttagtttcgcatctggaccttcgatattcacatcaggaacatcaatgtccaccttgggtcctgagacgtcaaggtcagccttgggcaggttcacatccacatctgggccctctcctttgaagccaggcatgctgaacttgggcattttcactttgggcatttttaagtgccagtctgggccttgaacgtccacatctgggacatcaatgtccactttggggcccttgatgtcaacttcagggcaccttgaggtcgccttccactttgggcagagaaacgtccacgtcgcccttcatctttggacctttcagattcaggtcaacttcaggcatagagatcttcggtgccttgaggtgcaggtcaggcattttaaatttggggcccttcagtttcccttctggaccatgaatatcaatatcaggagtgtcaatgtccactttgggtcctgagacatcaatgtcagctttgggcaaattaacatccacttctgggccctctcctttaaatcctggcatgctgaatttgggcattttcaccttgggcatcttcaggtgccagtctgggccatgaacatccacatctggggcatcaatgtccactttggggcccttgatgtcaacttcaggggcctttagatcaccttccatcttaggcagagaaacatccacatctcctttcaccttagggcctttcagatgcaaatcaaagtcaggcatggagatcttgggggctttgatgttcatctctggcatcttgaatttagggcccttcagtttcgcatctggaccttcaatattcacatctggaacatcaacgtccaccttgggtcctgagacgtcaaggtcagccttgggcaggttcacatccacttctggaccttctcctttgaagccaggcatgctgatcttgggcatttttatcttaggcatcttcaggtgaaggtccagaagtgattgttccccgct

SEQ ID NO: 350255 - DNA, 551 bp, Homo sapiens
gtaccgtctataatgacatgctgcatctgacaggtcactggtccgcctttttacaagctgttcgattactgatataagcccggtgctttaaatcctggcatgctgaatttgggcattttcaccttgggcatcttcaggtgccagtctgggccatgaacatccacatctggggcatcaatgtccactttggggcccttgatgtcaacttcaggggcctttagatcaccttccatcttaggcagagaaacatccacatctcctttcaccttagggcctttcagatgcaaatcaaagtcaggcatggagatcttgggggctttgatgttcatctctggcatcttgaatttagggcccttcagtttcgcatctggaccttcaatattcacatctggaacatcaacgtccaccttgggtcctgagacgtcaaggtcagccttgggcaggttcacatccacttctggaccttctcctttgaagccaggcatgctgatcttgggcatttttatcttaggcatcttcaggtgaaggtccagaagtgattgttccccgct

SEQ ID NO: 350256 - DNA, 408 bp, Homo sapiens
atctacatttcctttcattttgggtcctttaagatccaggtcaacatctggcaaagacatcttaggagctctgaagtgcatctcaggcatcttaaacttcgggcctttcaacttcccttcaggtccttcaaggctcagatctggagcattagtatctacttttggtgcagaaatgtccacattcgctttggacaggttcacatcaaattctggcccctctcctttgaggctgggcatgctaaatttgggcattttaatctttggcatcttcaagttccagtctggaccctgcatttcaacatctggggcactgacatctacttttgggcctttcaggtccccttccagctttggcactgtcatatcatattctacctttactttaggacctttcatatgcaagtccac

SEQ ID NO: 350257 - DNA, 764 bp, Homo sapiens
  misc_feature (251)..(251): n is a, c, g, or t
cagttactttaggagcagatatctccagcgatggcatcttcaaagatgggccactgagtttggcatcagggccttcgaaatccagacgtggacctttaagatctacttctgggcctttcaaagtcccttcaaccttagggacagacacatcaaaatctccttttactttgggtcctttcaaatccaggtcaacatcaggcatggagatcttgggggtcttgaaatgcatctcaggcatcttaaacttgggncccttcagcttcccttctggaccttcgaggctcacatctggggcttcgatgtccaccttgggtcctgagacaacaacgtcagccttaggcaagttcacatccacttctgggccctcgcctttgaggctgggcatgctgaacttgggcattttcatcttgggtattttcaggctccagtccaggccttggccttccacatctggtgctttaatatctaccttgggacctctgatgtccacatctggaacctgcatttcaccctctatctttggtgcagagatatctacatttcctttcattttgggtcctttaagatccaggtcaacatctggcaaagacatcttaggagctctgaagtgcatctcaggcatcttaaacttcgggcctttcaacttcccttcaggtccttcaaggctcagatctggagcattagtatctacttttggtgcagaaatgtccacattcgctttggacaggttcacatcaaattctggcccctctcctttgaggctg

SEQ ID NO: 350258 - DNA, 2071 bp, Homo sapiens
gggccttgaacgtccacatctgggacatcaatgtccactttggggtccctgatgtcaacttcggggcccttgaggtcgccttccactttgggcagagaaatgtccatgtcgcccttcacctttggacctttcagattcaggtcaacttcaggcatagagatcttcggtgccttgaggtgtaagtcaggcattttaaatttggggcccttcagtttcccttctggaccatgaatgtcaatatcaggagtgtcaatgcccactttagggcctttgacatccactttgggacctttcagatctccctccagtttaggaacggaaatgtccatatctccttttatcttaggtcctttcaaattcaaatcaatgtcactcatggagatttgtgggcttttgaaatgtacatcaggcatcttaaacttgggacctttgagcttcccttcaggaccttcaatgtctacctctggccctttcagatcactttccaccttaggtagtgaaacatccacatcacccttcaccttgggacctttcaggtgcaaatcaaagtcaggcatagagattttgggagctttgatgttcatctcaggcatcttaaatttgggccccttcaattttccttccggaccttcaatattgacatcaggtgtgtcaatgtccaaactggggccttttatgtcaatttcagggcccttgagatcaccttccactttgggcagagagacatccacatcacctttcactttgggacccttcaagttaaagtcaatgtcaggcatggagattttgggggccttgatgttcatctctggcatcttgaactttggacccttgagttttgcatctggaccttcgatactgacatcaggggcatcaatgtccactttggggccagaaatctcaatgtcagccttaggaagggtaacatccacatctgggccctctcctttgaatcctggcatgctgaatttgggcattttcaccttgggcatcttcaggtgccagtctgggccatgaacatccacatctggggcatcgatgtccactttggggcccttgatgtcaacttctgggcccttgcaggtcaccttccactttaggaagggaaacatccacatcacccttcaccttgggacctttcagatgcaaatcaaagtcaggcatggagatcttgggggctttgatgttcatctcaggcatcttgaatttagggccctttagtttcgcatctggaccttcgatattcacatcaggaacatcaatgtccaccttgggtcctgagacgtcaaggtcagccttgggcaggttcacatccacatctgggccctctcctttgaagccaggcatgctgaacttgggcattttcactttgggcatttttaagtgccagtctgggccttgaacgtccacatctgggacatcaatgtccactttggggcccttgatgtcaacttcagggcaccttgaggtcgccttccactttgggcagagaaacgtccacgtcgcccttcatctttggacctttcagattcaggtcaacttcaggcatagagatcttcggtgccttgaggtgcaggtcaggcattttaaatttggggcccttcagtttcccttctggaccatgaatatcaatatcaggagtgtcaatgtccactttgggtcctgagacatcaatgtcagctttgggcaaattaacatccacttctgggccctctcctttaaatcctggcatgctgaatttgggcattttcaccttgggcatcttcaggtgccagtctgggccatgaacatccacatctggggcatcaatgtccactttggggcccttgatgtcaacttcaggggcctttagatcaccttccatcttaggcagagaaacatccacatctcctttcaccttagggcctttcagatgcaaatcaaagtcaggcatggagatcttgggggctttgatgttcatctctggcatcttgaatttagggcccttcagtttcgcatctggaccttcaatattcacatcagaaggtccaggtatgcctggtagcgctcgggttaagaaggtccaggtatg

SEQ ID NO: 350259 - DNA, 571 bp, Homo sapiens
ctttaaatcctggcatgctgaatttgggcattttcaccttgggcatcttcaggtgccagtctgggccatgaacatccacatctggggcatcaatgtccactttggggcccttgatgtcaacttcaggggcctttagatcaccttccatcttaggcagagaaacatccacatctcctttcaccttagggcctttcagatgcaaatcaaagtcaggcatggagatcttgggggctttgatgttcatctctggcatcttgaatttagggcccttcagtttcgcatctggaccttcaatattcacatctggaacatcaacgtccaccttgggtcctgagacgtcaaggtcagccttgggcaggttcacatccacttctggaccttctcctttgaagccaggcatgctgatcttgggcatttttatcttaggcatcttcaggtgccagtctgggcctcgaacatccacatctggggcattaatatccactttggggcctttaatatccaagtcaggaactttcatgtcaccttccacttttggcagagacacatccatatcacccttcactttggg

SEQ ID NO: 350260 - DNA, 825 bp, Homo sapiens
gtcagcattgagccaatgagtggttggatgagggagtaagttaccatcagcgtctctgcctgcagtaattatgcacggcggcggctgtcctgttgctgtgccagggtatttgcagaagcttcatgattccagaggaacaatgtcacactttgtagaagtgccacacttagcttggcccagtgaattgagtcgttagcgtagccaggctgtctcctgtaatggagtgggaacactggaagggggctgtcttctgtgatggaatggggacactggaagaggcactttcttttggctgcctcagctgcactttctgcctcacttcttggatcatggcctctcacacctggctgatgactgagtctgtgtcccccatttgccgatgacaccagcacctctgagcaccccagggccgcccctcctgctgttgcatctgtttctgagcatcttaaaatcacctttgaaggaaaagtcctcacaggaacacccccccttgtgccttacagacaaagaagtatgccgatgtgatcatcccacgaggagtggacaatatgggtaagaagctggcctgctgggctgtccccccgcccctcccagagcttgaggcagggacagttccaccagtgtgcagttactgagcactcccctgcgcacgcggcctgccagtgttgatctgcggcacagggttaaaatatgcttaaaaatgtatgtagctgggcgcggtggctcacactggtaatcccagcactttgggaggctgaggcagggggatcactggagcccaggagttcaacagcctggggaacatagcaaaaccccatctctaca

SEQ ID NO: 350261 - DNA, 2082 bp, Homo sapiens
atcgctccagtcgcctccgacctcggcgctgggcgggcgcgccgggcctggggaaggggcgggcgcggggacccgatgcgcgggagcggaggccgagatggcttcggcgggaggcgaagactgcgagagccccgcgccggaggccgaccgtccgcaccagcggcccttcctgataggggtgagcggcggcactgccagcgggaagtcgaccgtgtgtgagaagatcatggagttgctgggacagaacgaggtggaacagcggcagcggaaggtggtcatcctgagccaggacaggttctacaaggtcctgacggcagagcagaaggccaaggccttgaaaggacagtacaattttgaccatccagatgcctttgataatgatttgatgcacaggactctgaagaacatcgtggagggcaaaacggtggaggtgccgacctatgattttgtgacacactcaaggttaccagagaccacggtggtctaccctgcggacgtggttctgtttgagggcatcttggtgttctacagccaggagatccgggacatgttccacctgcgcctcttcgtggacaccgactccgacgtcaggctgtctcgaagagacaaagaagtatgccgatgtgatcatcccacgaggagtggacaatatggttgccatcaacctgatcgtgcagcacatccaggacattctgaatggtgacatctgcaaatggcaccgaggagggtccaatgggcggagctacaagcggaccttttctgagccaggggaccaccctgggatgctgacctctggcaaacggtcacatttggagtccagcagcagaccccactgaggggctgccgagcctcagggcaggtctcccgcccggcatgtgtgttcagggactgagcctggggacgcccacccacacccactgcttcctctcggcgcaccccaggggagtgttagcagcgaggccttcctcactcaggagtggaaactcagatgtgtcactcagactcaacttgctgggacactgacaggcgttcctgaggttttcagccacttaggctcgttgcggtttaaagatccctctaggtcactgagaaatgccacagaatgtgcaggaagcctgggaggcttctgtgaggaatgtgaggcacattattggggaaattgaggagacagcctagacactggctggcctgatgttttgttgacagtgaacccacagtgggagagagttttttccagtctgatctggttcttacacactcacacacataactcaaaagttttgtgaacaagtactttccttttttacatgttacatgtcctcatgttttctgttttctgtttcataacacaaggctggttgtggcctacaaacctaatttcatgacccagtggtttgcagtccagcgtggcctacacggatatggggagccactgagggatgttttccccccttgcttgtgccttaaaggcagagaagcgaggcggatgccctggaagcacccagcatcacacccaggcttgtgcggggccaggctgggagcccatgcagtagggcagaaggcagcggaggccaggtctgtcccggctggagaacagcgtccacgcagtcctgcctggggtcaggccctcactgaccctcaggggagcccccaaggtgctgtctgtctagacaggctgtcccaccccagggtggctagtggccatatgcagggaatggtgcttctggctgtggcacgcactggatcacccaggtcccagcagacatggccgcccaaagtcagcaagcctcctttgtgctatgtggagctcacagcctcacatgtgaacacccgtgtctgggttgcctggggtgatcctccctcctgcgtggtggctgtctctggaaagcatcccttgccgctgccacgggcagccccagcccccgtccgtccaggctcacccacagtagtgatgcagacgtgacgtgggggaagggggctgagccctgtggctgggttctgacaactgtaacggttttgtcgagcttaggcccctttggagggagaatcaataaataacaaacaccaactacaaacgccagt

SEQ ID NO: 350262 - DNA, 2145 bp, Homo sapiens
atcgctccagtcgcctccgacctcggcgctgggcgggcgcgccgggcctggggaaggggcgggcgcggggacccgatgcgcgggagcggaggccgagatggcttcggcgggaggcgaagactgcgagagccccgcgccggaggccgaccgtccgcaccagcggcccttcctgatcgaccgtgtgtgagaagatcatggagttgctgggacagaacgaggtggaacagcggcagcggaaggtggtcatcctgagccaggacaggttctacaaggtcctgacggcagagcagaaggccaaggccttgaaaggacagtacaattttgaccatccagatgcctttgataatgatttgatgcacaggactctgaagaacatcgtggagggcaaaacggtggaggtgccgacctatgattttgtgacacactcaaggttaccagagaccacggtggtctaccctgcggacgtggttctgtttgagggcatcttggtgttctacagccaggagatccgggacatgttccacctgcgcctcttcgtggacaccgactccgacgtcaggctgtctcgaagagttctccgggacgtgcgccgagggagggacctggagcagattctgacgcagtacaccaccttcgtgaagccggccttcgaggagttctgcctgccgacaaagaagtatgccgatgtgatcatcccacgaggagtggacaatatggttgccatcaacctgatcgtgcagcacatccaggacattctgaatggtgacatctgcaaatggcaccgaggagggtccaatgggcggagctacaagcggaccttttctgagccaggggaccaccctgggatgctgacctctggcaaacggtcacatttggagtccagcagcagaccccactgaggggctgccgagcctcagggcaggtctcccgcccggcatgtgtgttcagggactgagcctggggacgcccacccacacccactgcttcctctcggcgcaccccaggggagtgttagcagcgaggccttcctcactcaggagtggaaactcagatgtgtcactcagactcaacttgctgggacactgacaggcgttcctgaggttttcagccacttaggctcgttgcggtttaaagatccctctaggtcactgagaaatgccacagaatgtgcaggaagcctgggaggcttctgtgaggaatgtgaggcacattattggggaaattgaggagacagcctagacactggctggcctgatgttttgttgacagtgaacccacagtgggagagagttttttccagtctgatctggttcttacacactcacacacataactcaaaagttttgtgaacaagtactttccttttttacatgttacatgtcctcatgttttctgttttctgtttcataacacaaggctggttgtggcctacaaacctaatttcatgacccagtggtttgcagtccagcgtggcctacacggatatggggagccactgagggatgttttccccccttgcttgtgccttaaaggcagagaagcgaggcggatgccctggaagcacccagcatcacacccaggcttgtgcggggccaggctgggagcccatgcagtagggcagaaggcagcggaggccaggtctgtcccggctggagaacagcgtccacgcagtcctgcctggggtcaggccctcactgaccctcaggggagcccccaaggtgctgtctgtctagacaggctgtcccaccccagggtggctagtggccatatgcagggaatggtgcttctggctgtggcacgcactggatcacccaggtcccagcagacatggccgcccaaagtcagcaagcctcctttgtgctatgtggagctcacagcctcacatgtgaacacccgtgtctgggttgcctggggtgatcctccctcctgcgtggtggctgtctctggaaagcatcccttgccgctgccacgggcagccccagcccccgtccgtccaggctcacccacagtagtgatgcagacgtgacgtgggggaagggggctgagccctgtggctgggttctgacaactgtaacggttttgtcgagcttaggcccctttggagggagaatcaataaataacaaacaccaactacaaacgccagt

SEQ ID NO: 350263 - DNA, 2149 bp, Homo sapiens
atcgctccagtcgcctccgacctcggcgctgggcgggcgcgccgggcctggggaaggggcgggcgcggggacccgatgcgcgggagcggaggccgagatggcttcggcgggaggcgaagactgcgagagccccgcgccggaggccgaccgtccgcaccagcggcccttcctgataggggtgagcggcggcactgccagcgggaagtcgaccgtgtgtgagaagatcatggagttgctgggacagaacgaggtggaacagcggcagcggaaggtggtcatcctgagccaggacaggttctacaaggtcctgacggcagagcagaaggccaaggccttgaaaggacagtacaattttgaccatccaggactctgaagaacatcgtggagggcaaaacggtggaggtgccgacctatgattttgtgacacactcaaggttaccagagaccacggtggtctaccctgcggacgtggttctgtttgagggcatcttggtgttctacagccaggagatccgggacatgttccacctgcgcctcttcgtggacaccgactccgacgtcaggctgtctcgaagagttctccgggacgtgcgccgagggagggacctggagcagattctgacgcagtacaccaccttcgtgaagccggccttcgaggagttctgcctgccgacaaagaagtatgccgatgtgatcatcccacgaggagtggacaatatggttgccatcaacctgatcgtgcagcacatccaggacattctgaatggtgacatctgcaaatggcaccgaggagggtccaatgggcggagctacaagcggaccttttctgagccaggggaccaccctgggatgctgacctctggcaaacggtcacatttggagtccagcagcagaccccactgaggggctgccgagcctcagggcaggtctcccgcccggcatgtgtgttcagggactgagcctggggacgcccacccacacccactgcttcctctcggcgcaccccaggggagtgttagcagcgaggccttcctcactcaggagtggaaactcagatgtgtcactcagactcaacttgctgggacactgacaggcgttcctgaggttttcagccacttaggctcgttgcggtttaaagatccctctaggtcactgagaaatgccacagaatgtgcaggaagcctgggaggcttctgtgaggaatgtgaggcacattattggggaaattgaggagacagcctagacactggctggcctgatgttttgttgacagtgaacccacagtgggagagagttttttccagtctgatctggttcttacacactcacacacataactcaaaagttttgtgaacaagtactttccttttttacatgttacatgtcctcatgttttctgttttctgtttcataacacaaggctggttgtggcctacaaacctaatttcatgacccagtggtttgcagtccagcgtggcctacacggatatggggagccactgagggatgttttccccccttgcttgtgccttaaaggcagagaagcgaggcggatgccctggaagcacccagcatcacacccaggcttgtgcggggccaggctgggagcccatgcagtagggcagaaggcagcggaggccaggtctgtcccggctggagaacagcgtccacgcagtcctgcctggggtcaggccctcactgaccctcaggggagcccccaaggtgctgtctgtctagacaggctgtcccaccccagggtggctagtggccatatgcagggaatggtgcttctggctgtggcacgcactggatcacccaggtcccagcagacatggccgcccaaagtcagcaagcctcctttgtgctatgtggagctcacagcctcacatgtgaacacccgtgtctgggttgcctggggtgatcctccctcctgcgtggtggctgtctctggaaagcatcccttgccgctgccacgggcagccccagcccccgtccgtccaggctcacccacagtagtgatgcagacgtgacgtgggggaagggggctgagccctgtggctgggttctgacaactgtaacggttttgtcgagcttaggcccctttggagggagaatcaataaataacaaacaccaactacaaacgccagt

SEQ ID NO: 350264 - DNA, 1788 bp, Homo sapiens
atcgctccagtcgcctccgacctcggcgctgggcgggcgcgccgggcctggggaaggggcgggcgcggggacccgatgcgcgggagcggaggccgagatggcttcggcgggaggcgaagactgcgagagccccgcgccggaggccgaccgtccgcaccagcggcccttcctgactcttcgtggacaccgactccgacgtcaggctgtctcgaagagttctccgggacgtgcgccgagggagggacctggagcagattctgacgcagtacaccaccttcgtgaagccggccttcgaggagttctgcctgccgacaaagaagtatgccgatgtgatcatcccacgaggagtggacaatatggttgccatcaacctgatcgtgcagcacatccaggacattctgaatggtgacatctgcaaatggcaccgaggagggtccaatgggcggagctacaagcggaccttttctgagccaggggaccaccctgggatgctgacctctggcaaacggtcacatttggagtccagcagcagaccccactgaggggctgccgagcctcagggcaggtctcccgcccggcatgtgtgttcagggactgagcctggggacgcccacccacacccactgcttcctctcggcgcaccccaggggagtgttagcagcgaggccttcctcactcaggagtggaaactcagatgtgtcactcagactcaacttgctgggacactgacaggcgttcctgaggttttcagccacttaggctcgttgcggtttaaagatccctctaggtcactgagaaatgccacagaatgtgcaggaagcctgggaggcttctgtgaggaatgtgaggcacattattggggaaattgaggagacagcctagacactggctggcctgatgttttgttgacagtgaacccacagtgggagagagttttttccagtctgatctggttcttacacactcacacacataactcaaaagttttgtgaacaagtactttccttttttacatgttacatgtcctcatgttttctgttttctgtttcataacacaaggctggttgtggcctacaaacctaatttcatgacccagtggtttgcagtccagcgtggcctacacggatatggggagccactgagggatgttttccccccttgcttgtgccttaaaggcagagaagcgaggcggatgccctggaagcacccagcatcacacccaggcttgtgcggggccaggctgggagcccatgcagtagggcagaaggcagcggaggccaggtctgtcccggctggagaacagcgtccacgcagtcctgcctggggtcaggccctcactgaccctcaggggagcccccaaggtgctgtctgtctagacaggctgtcccaccccagggtggctagtggccatatgcagggaatggtgcttctggctgtggcacgcactggatcacccaggtcccagcagacatggccgcccaaagtcagcaagcctcctttgtgctatgtggagctcacagcctcacatgtgaacacccgtgtctgggttgcctggggtgatcctccctcctgcgtggtggctgtctctggaaagcatcccttgccgctgccacgggcagccccagcccccgtccgtccaggctcacccacagtagtgatgcagacgtgacgtgggggaagggggctgagccctgtggctgggttctgacaactgtaacggttttgtcgagcttaggcccctttggagggagaatcaataaataacaaacaccaactacaaacgccagt

SEQ ID NO: 350265 - DNA, 1299 bp, Homo sapiens
atcgctccagtcgcctccgacctcggcgctgggcgggcgcgccgggcctggggaaggggcgggcgcggggacccgatgcgcgggagcggaggccgagatggcttcggcgggaggcgaagactgcgagagccccgcgccggaggccgaccgtccgcaccagcggcccttcctgataggggtgagcggcggcactgccagcgggaagtcgaccgtgtgtgagaagatcatggagttgctgggacagaacgaggtggaacagcggcagcggaaggtggtcatcctgagccaggacaggttctacaaggtcctgacggcagagcagaaggccaaggccttgaaaggacagtacaattttgaccatccagatgcctttgataatgatttgatgcacaggactctgaagaacatcgtggagggcaaaacggtggaggtgccgacctatgattttgtgacacactcaaggttaccagagaccacggtggtctaccctgcggacgtggttctgtttgagggcatcttggtgttctacagccaggagatccgggacatgttccacctgcgcctcttcgtggacaccgactccgacgtcaggctgtctcgaagagttctccgggacgtgcgccgagggagggacctggagcagattctgacgcagtacaccaccttcgtgaagccggccttcgaggagttctgcctgccgacaaagaagtatgccgatgtgatcatcccacgaggagtggacaatatggttgccatcaacctgatcgtgcagcacatccaggacattctgaatggtgacatctgcaaatggcaccgaggagggtccaatgggcggagctacaagcggaccttttctgagccaggggaccaccctgggatgctgacctctggcaaacggtcacatttggagtccagcagcagaccccactgaggggctgccgagcctcagggcaggtctcccgcccggcatgtgtgttcagggactgagcctggggacgcccacccacacccactgtatgtggagctcacagcctcacatgtgaacacccgtgtctgggttgcctggggtgatcctccctcctgcgtggtggctgtctctggaaagcatcccttgccgctgccacgggcagccccagcccccgtccgtccaggctcacccacagtagtgatgcagacgtgacgtgggggaagggggctgagccctgtggctgggttctgacaactgtaacggttttgtcgagcttaggcccctttggagggagaatcaataaataacaaacaccaactacaaacgccagt

SEQ ID NO: 350266 - DNA, 1980 bp, Homo sapiens
gtcagcattgagccaatgagtggttggatgagggagtaagttaccatcagcgtctctgcctgcagtaattatgcacggcggcggctgtcctgttgctgtgccagggtatttgcagaagcttcatgattccagaggaacaatgtcacactttgtagaagtgccacacttagcttggcccagtgaattgagtcgttagcgtagccaggctgtctcctgtaatggagtgggaacactggaagggggctgtcttctgtgatggaatggggacactggaagaggcactttcttttggctgcctcagctgcactttctgcctcacttcttggatcatggcctctcacacctggctgatgactgagtctgtgtcccccatttgccgatgacaccagcacctctgagcaccccagggccgcccctcctgctgttgcatctgtttctgagcatcttaaaatcacctttgaaggaaaagtcctcacaggaacacccccccttgtgccttacagacaaagaagtatgccgatgtgatcatcccacgaggagtggacaatatggttgccatcaacctgatcgtgcagcacatccaggacattctgaatggtgacatctgcaaatggcaccgaggagggtccaatgggcggagctacaagcggaccttttctgagccaggggaccaccctgggatgctgacctctggcaaacggtcacatttggagtccagcagcagaccccactgaggggctgccgagcctcagggcaggtctcccgcccggcatgtgtgttcagggactgagcctggggacgcccacccacacccactgcttcctctcggcgcaccccaggggagtgttagcagcgaggccttcctcactcaggagtggaaactcagatgtgtcactcagactcaacttgctgggacactgacaggcgttcctgaggttttcagccacttaggctcgttgcggtttaaagatccctctaggtcactgagaaatgccacagaatgtgcaggaagcctgggaggcttctgtgaggaatgtgaggcacattattggggaaattgaggagacagcctagacactggctggcctgatgttttgttgacagtgaacccacagtgggagagagttttttccagtctgatctggttcttacacactcacacacataactcaaaagttttgtgaacaagtactttccttttttacatgttacatgtcctcatgttttctgttttctgtttcataacacaaggctggttgtggcctacaaacctaatttcatgacccagtggtttgcagtccagcgtggcctacacggatatggggagccactgagggatgttttccccccttgcttgtgccttaaaggcagagaagcgaggcggatgccctggaagcacccagcatcacacccaggcttgtgcggggccaggctgggagcccatgcagtagggcagaaggcagcggaggccaggtctgtcccggctggagaacagcgtccacgcagtcctgcctggggtcaggccctcactgaccctcaggggagcccccaaggtgctgtctgtctagacaggctgtcccaccccagggtggctagtggccatatgcagggaatggtgcttctggctgtggcacgcactggatcacccaggtcccagcagacatggccgcccaaagtcagcaagcctcctttgtgctatgtggagctcacagcctcacatgtgaacacccgtgtctgggttgcctggggtgatcctccctcctgcgtggtggctgtctctggaaagcatcccttgccgctgccacgggcagccccagcccccgtccgtccaggctcacccacagtagtgatgcagacgtgacgtgggggaagggggctgagccctgtggctgggttctgacaactgtaacggttttgtcgagcttaggcccctttggagggagaatcaataaataacaaacaccaactacaaacgccagt

SEQ ID NO: 350267 - DNA, 854 bp, Homo sapiens
atcgctccagtcgcctccgacctcggcgctgggcgggcgcgccgggcctggggaaggggcgggcgcggggacccgatgcgcgggagcggaggccgagatggcttcggcgggaggcgaagactgcgagagccccgcgccggaggccgaccgtccgcaccagcggcccttcctgataggggtgagcggcggcactgccagcgggaagtcgaccgtgtgtgagaagatcatggagttgctgggacagaacgaggtggaacagcggcagcggaaggtggtcatcctgagccaggacaggttctacaaggtcctgacggcagagcagaaggccaaggccttgaaaggacagtacaattttgaccatccagatgcctttgataatgatttgatgcacaggactctgaagaacatcgtggagggcaaaacggtggaggtgccgacctatgattttgtgacacactcaaggttaccagagaccacggtggtctaccctgcggacgtggttctgtttgagggcatcttggtgttctacagccaggagatccgggacatgttccacctgcgcctcttcgtggacaccgactccgacgtcaggctgtctcgaagagttctccgggacgtgcgccgagggagggacctggagcagattctgacgcagtacaccaccttcgtgaagccggccttcgaggagttctgcctgccggtacctgtgctcgctgcttcagagcccattttcccctttcacaaggacacatgggacccagtactgtgagagggcttagtgctgggtgacagtgatctgattgaaaaaaaggagaagaatttggctcattatggccacataccctgggagtagt

SEQ ID NO: 350268 - DNA, 2177 bp, Homo sapiens
atcgctccagtcgcctccgacctcggcgctgggcgggcgcgccgggcctggggaaggggcgggcgcggggacccgatgcgcgggagcggaggccgagatggcttcggcgggaggcgaagactgcgagagccccgcgccggaggccgaccgtccgcaccagcggcccttcctgataggggtgagcggcggcactgccagcgggaagtcgaccgtgtgtgagaagatcatggagttgctgggacagaacgaggtggaacagcggcagcggaaggtggtcatcctgagccaggacaggttctacaaggtcctgacggcagagcagaaggccaaggccttgaaaggacagtacaattttgaccatccagatgcctttgataatgatttgatgcacaggactctgaagaacatcgtggagggcaaaacggtggaggtgccgacctatgattttgtgacacactcaaggttaccagagaccacggtggtctaccctgcggacgtggttctgtttgagggcatcttggtgttctacagccaggagatccgggacatgttccacctgcgcctcttcgtggacaccgactccgacgtcaggctgtctcgaagagttctccgggacgtgcgccgagggagggacctggagcagattctgacgcagtacaccaccttcgtgaagccggccttcgaggagttctgcctgccgacaaagaagtatgccgatgtgatcatcccacgaggagtggacaatatggttgccatcaacctgatcgtgcagcacatccaggacattctgaatggtgacatctgcaaatggcaccgaggagggtccaatgggcggagctacaagcggaccttttctgagccaggggaccaccctgggatgctgacctctggcaaacggtcacatttggagtccagcagcagaccccactgaggggctgccgagcctcagggcaggtctcccgcccggcatgtgtgttcagggactgagcctggggacgcccacccacacccactgcttcctctcggcgcaccccaggggagtgttagcagcgaggccttcctcactcaggagtggaaactcagatgtgtcactcagactcaacttgctgggacactgacaggcgttcctgaggttttcagccacttaggctcgttgcggtttaaagatccctctaggtcactgagaaatgccacagaatgtgcaggaagcctgggaggcttctgtgaggaatgtgaggcacattattggggaaattgaggagacagcctagacactggctggcctgatgttttgttgacagtgaacccacagtgggagagagttttttccagtctgatctggttcttacacactcacacacataactcaaaagttttgtgaacaagtactttccttttttacatgttacatgtcctcatgttttctgttttctgtttcataacacaaggctggttgtggcctacaaacctaatttcatgacccagtggtttgcagtccagcgtggcctacacggatatggggagccactgagggatgttttccccccttgcttgtgccttaaaggcagagaagcgaggcggatgccctggaagcacccagcatcacacccaggcttgtgcggggccaggctgggagcccatgcagtagggcagaaggcagcggaggccaggtctgtcccggctggagaacagcgtccacgcagtcctgcctggggtcaggccctcactgaccctcaggggagcccccaaggtgctgtctgtctagacaggctgtcccaccccagggtggctagtggccatatgcagggaatggtgcttctggctgtggcacgcactggatcacccaggtcccagcagacatggccgcccaaagtcagcaagcctcctttgtgctatgtggagctcacagcctcacatgtgaacacccgtgtctgggttgcctggggtgatcctccctcctgcgtggtggctgtctctggaaagcatcccttgccgctgccacgggcagccccagcccccgtccgtccaggctcacccacagtagtgatgcagacgtgacgtgggggaagggggctgagccctgtggctgggttctgacaactgtaacggttttgtcgagcttaggcccctttggagggagaatcaataaataacaaacaccaactacaaacgccagt

SEQ ID NO: 350269 - DNA, 2266 bp, Homo sapiens
atcgctccagtcgcctccgacctcggcgctgggcgggcgcgccgggcctggggaaggggcgggcgcggggacccgatgcgcgggagcggaggccgagatggcttcggcgggaggcgaagactgcgagagccccgcgccggaggccgaccgtccgcaccagcggcccttcctgataggggtgagcggcggcactgccagcgggaagtcgaccgtgtgtgagaagatcatggagttgctgggacagaacgaggtggaacagcggcagcggaaggtggtcatcctgagccaggacaggttctacaaggtcctgacggcagagcagaaggccaaggccttgaaaggacagtacaattttgaccatccagatgcctttgataatgatttgatgcacaggactctgaagaacatcgtggagggcaaaacggtggaggtgccgacctatgattttgtgacacactcaaggttaccagagaccacggtggtctaccctgcggacgtggttctgtttgagggcatcttggtgttctacagccaggagatccgggacatgttccacctgcgcctcttcgtggacaccgactccgacgtcaggctgtctcgaagaggtaaggcggccgcgggcctccgtgcctgcctggccgaggctggcggcaggtcctgaggtctgaagcacgcctgccccttgccgctgcagttctccgggacgtgcgccgagggagggacctggagcagattctgacgcagtacaccaccttcgtgaagccggccttcgaggagttctgcctgccgacaaagaagtatgccgatgtgatcatcccacgaggagtggacaatatggttgccatcaacctgatcgtgcagcacatccaggacattctgaatggtgacatctgcaaatggcaccgaggagggtccaatgggcggagctacaagcggaccttttctgagccaggggaccaccctgggatgctgacctctggcaaacggtcacatttggagtccagcagcagaccccactgaggggctgccgagcctcagggcaggtctcccgcccggcatgtgtgttcagggactgagcctggggacgcccacccacacccactgcttcctctcggcgcaccccaggggagtgttagcagcgaggccttcctcactcaggagtggaaactcagatgtgtcactcagactcaacttgctgggacactgacaggcgttcctgaggttttcagccacttaggctcgttgcggtttaaagatccctctaggtcactgagaaatgccacagaatgtgcaggaagcctgggaggcttctgtgaggaatgtgaggcacattattggggaaattgaggagacagcctagacactggctggcctgatgttttgttgacagtgaacccacagtgggagagagttttttccagtctgatctggttcttacacactcacacacataactcaaaagttttgtgaacaagtactttccttttttacatgttacatgtcctcatgttttctgttttctgtttcataacacaaggctggttgtggcctacaaacctaatttcatgacccagtggtttgcagtccagcgtggcctacacggatatggggagccactgagggatgttttccccccttgcttgtgccttaaaggcagagaagcgaggcggatgccctggaagcacccagcatcacacccaggcttgtgcggggccaggctgggagcccatgcagtagggcagaaggcagcggaggccaggtctgtcccggctggagaacagcgtccacgcagtcctgcctggggtcaggccctcactgaccctcaggggagcccccaaggtgctgtctgtctagacaggctgtcccaccccagggtggctagtggccatatgcagggaatggtgcttctggctgtggcacgcactggatcacccaggtcccagcagacatggccgcccaaagtcagcaagcctcctttgtgctatgtggagctcacagcctcacatgtgaacacccgtgtctgggttgcctggggtgatcctccctcctgcgtggtggctgtctctggaaagcatcccttgccgctgccacgggcagccccagcccccgtccgtccaggctcacccacagtagtgatgcagacgtgacgtgggggaagggggctgagccctgtggctgggttctgacaactgtaacggttttgtcgagcttaggcccctttggagggagaatcaataaataacaaacaccaactacaaacgccagt

SEQ ID NO: 350270 - DNA, 2141 bp, Homo sapiens
atcgctccagtcgcctccgacctcggcgctgggcgggcgcgccgggcctggggaaggggcgggcgcggggacccgatgcgcgggagcggaggccgagatggcttcggcgggaggcgaagactgcgagagccccgcgccggaggccgaccgtccgcaccagcggcccttcctgataggggtgagcggcggcactgccagcgggaagtcgaccgtgtgtgagaagatcatggagttgctgggacagaacgaggtggaacagcggcagcggaaggtggtcatcctgagccaggacaggttctacaaggtcctgacggcagagcagaaggccaaggccttgaaaggacagtacaattttgaccatccagatgcctttgataatgatttgatgcacaggactctgaagaacatcgtggagggcaaaacggtggaggtgccgacctatgattttgtgacacactcaaggttaccagagaccacggtggtctaccctgcggacgtggttctgtttgagggcatcttggtgttctacagccaggagatccgggacatgttccacctgcgcctcttcgtggacaccgactccgacgtcaggctgtctcgaagagttctccgggacgtgcgccgagggagggacctggagcagattctgacgcagtacaccaccttcgtgaagccggccttcgaggagttctgcctgccgacaaagaagtatgccgatgtgatcatcccacgaggagtggacaatatggttgccatcaacctgatcgtgcagcacatccaggacattctgaatggtgacatctgcaaatggcaccgaggagggtccaatgggcggagctacaagcggacctctggcaaacggtcacatttggagtccagcagcagaccccactgaggggctgccgagcctcagggcaggtctcccgcccggcatgtgtgttcagggactgagcctggggacgcccacccacacccactgcttcctctcggcgcaccccaggggagtgttagcagcgaggccttcctcactcaggagtggaaactcagatgtgtcactcagactcaacttgctgggacactgacaggcgttcctgaggttttcagccacttaggctcgttgcggtttaaagatccctctaggtcactgagaaatgccacagaatgtgcaggaagcctgggaggcttctgtgaggaatgtgaggcacattattggggaaattgaggagacagcctagacactggctggcctgatgttttgttgacagtgaacccacagtgggagagagttttttccagtctgatctggttcttacacactcacacacataactcaaaagttttgtgaacaagtactttccttttttacatgttacatgtcctcatgttttctgttttctgtttcataacacaaggctggttgtggcctacaaacctaatttcatgacccagtggtttgcagtccagcgtggcctacacggatatggggagccactgagggatgttttccccccttgcttgtgccttaaaggcagagaagcgaggcggatgccctggaagcacccagcatcacacccaggcttgtgcggggccaggctgggagcccatgcagtagggcagaaggcagcggaggccaggtctgtcccggctggagaacagcgtccacgcagtcctgcctggggtcaggccctcactgaccctcaggggagcccccaaggtgctgtctgtctagacaggctgtcccaccccagggtggctagtggccatatgcagggaatggtgcttctggctgtggcacgcactggatcacccaggtcccagcagacatggccgcccaaagtcagcaagcctcctttgtgctatgtggagctcacagcctcacatgtgaacacccgtgtctgggttgcctggggtgatcctccctcctgcgtggtggctgtctctggaaagcatcccttgccgctgccacgggcagccccagcccccgtccgtccaggctcacccacagtagtgatgcagacgtgacgtgggggaagggggctgagccctgtggctgggttctgacaactgtaacggttttgtcgagcttaggcccctttggagggagaatcaataaataacaaacaccaactacaaacgccagt

SEQ ID NO: 350271 - DNA, 2379 bp, Homo sapiens
atcgctccagtcgcctccgacctcggcgctgggcgggcgcgccgggcctggggaaggggcgggcgcggggacccgatgcgcgggagcggaggccgagatggcttcggcgggaggcgaagactgcgagagccccgcgccggaggccgaccgtccgcaccagcggcccttcctgataggggtgagcggcggcactgccagcgggaagtcgaccgtgtgtgagaagatcatggagttgctgggacagaacgaggtggaacagcggcagcggaaggtggtcatcctgagccaggacaggttctacaaggtcctgacggcagagcagaaggccaaggccttgaaaggacagtacaattttgaccatccagatgcctttgataatgatttgatgcacaggactctgaagaacatcgtggagggcaaaacggtggaggtgccgacctatgattttgtgacacactcaaggttaccagagaccacggtggtctaccctgcggacgtggttctgtttgagggcatcttggtgttctacagccaggagatccgggacatgttccacctgcgcctcttcgtggacaccgactccgacgtcaggctgtctcgaagagttctccgggacgtgcgccgagggagggacctggagcagattctgacgcagtacaccaccttcgtgaagccggccttcgaggagttctgcctgccgctgcactttctgcctcacttcttggatcatggcctctcacacctggctgatgactgagtctgtgtcccccatttgccgatgacaccagcacctctgagcaccccagggccgcccctcctgctgttgcatctgtttctgagcatcttaaaatcacctttgaaggaaaagtcctcacaggaacacccccccttgtgccttacagacaaagaagtatgccgatgtgatcatcccacgaggagtggacaatatggttgccatcaacctgatcgtgcagcacatccaggacattctgaatggtgacatctgcaaatggcaccgaggagggtccaatgggcggagctacaagcggaccttttctgagccaggggaccaccctgggatgctgacctctggcaaacggtcacatttggagtccagcagcagaccccactgaggggctgccgagcctcagggcaggtctcccgcccggcatgtgtgttcagggactgagcctggggacgcccacccacacccactgcttcctctcggcgcaccccaggggagtgttagcagcgaggccttcctcactcaggagtggaaactcagatgtgtcactcagactcaacttgctgggacactgacaggcgttcctgaggttttcagccacttaggctcgttgcggtttaaagatccctctaggtcactgagaaatgccacagaatgtgcaggaagcctgggaggcttctgtgaggaatgtgaggcacattattggggaaattgaggagacagcctagacactggctggcctgatgttttgttgacagtgaacccacagtgggagagagttttttccagtctgatctggttcttacacactcacacacataactcaaaagttttgtgaacaagtactttccttttttacatgttacatgtcctcatgttttctgttttctgtttcataacacaaggctggttgtggcctacaaacctaatttcatgacccagtggtttgcagtccagcgtggcctacacggatatggggagccactgagggatgttttccccccttgcttgtgccttaaaggcagagaagcgaggcggatgccctggaagcacccagcatcacacccaggcttgtgcggggccaggctgggagcccatgcagtagggcagaaggcagcggaggccaggtctgtcccggctggagaacagcgtccacgcagtcctgcctggggtcaggccctcactgaccctcaggggagcccccaaggtgctgtctgtctagacaggctgtcccaccccagggtggctagtggccatatgcagggaatggtgcttctggctgtggcacgcactggatcacccaggtcccagcagacatggccgcccaaagtcagcaagcctcctttgtgctatgtggagctcacagcctcacatgtgaacacccgtgtctgggttgcctggggtgatcctccctcctgcgtggtggctgtctctggaaagcatcccttgccgctgccacgggcagccccagcccccgtccgtccaggctcacccacagtagtgatgcagacgtgacgtgggggaagggggctgagccctgtggctgggttctgacaactgtaacggttttgtcgagcttaggcccctttggagggagaatcaataaataacaaacaccaactacaaacgccagt

SEQ ID NO: 350272 - DNA, 1224 bp, Homo sapiens
atcgctccagtcgcctccgacctcggcgctgggcgggcgcgccgggcctggggaaggggcgggcgcggggacccgatgcgcgggagcggaggccgagatggcttcggcgggaggcgaagactgcgagagccccgcgccggaggccgaccgtccgcaccagcggcccttcctgataggggtgagcggcggcactgccagcgggaagtcgaccgtgtgtgagaagatcatggagttgctgggacagaacgaggtggaacagcggcagcggaaggtggtcatcctgagccaggacaggttctacaaggtcctgacggcagagcagaaggccaaggccttgaaaggacagtacaattttgaccatccagatgcctttgataatgatttgatgcacaggactctgaagaacatcgtggagggcaaaacggtggaggtgccgacctatgattttgtgacacactcaaggttaccagagaccacggtggtctaccctgcggacgtggttctgtttgagggcatcttggtgttctacagccaggagatccgggacatgttccacctgcgcctcttcgtggacaccgactccgacgtcaggctgtctcgaagagttctccgggacgtgcgccgagggagggacctggagcagattctgacgcagtacaccaccttcgtgaagccggccttcgaggagttctgcctgccgctgcactttctgcctcacttcttggatcatggcctctcacacctggctgatgactgagtctgtgtcccccatttgccgatgacaccagcacctctgagcaccccagggccgcccctcctgctgttgcatctgtttctgagcatcttaaaatcacctttgaaggaaaagtcctcacaggaacacccccccttgtgccttacagacaaagaagtatgccgatgtgatcatcccacgaggagtggacaatatgggtaagaagctggcctgctgggctgtccccccgcccctcccagagcttgaggcagggacagttccaccagtgtgcagttactgagcactcccctgcgcacgcggcctgccagtgttgatctgcggcacagggttaaaatatgcttaaaaatgtatgtagctgggcgcggtggctcacactggtaatcccagcactttgggaggctgaggcagggggatcactggagcccaggagttcaacagcctggggaacatagcaaaaccccatctctaca

SEQ ID NO: 350273 - DNA, 457 bp, Homo sapiens
atgcctttgataatgatttgatgcacaggactctgaagaacatcgtggagggcaaaacggtggaggtgccgacctatgattttgtgacacactcaaggtaagcaggtggttctagggagggccgaggagaggggccagctaggacgtcccctcgggctcacacagacctgcctggcggcaggcctcccccggttggtttctgtgggtcccccaccccttcccacagtcagtgtccctgcaatggaagctgactgtgtgtgtggcctggagaccctgtgtctgcagcagagcccctttccccgtgcgcccctcaggttaccagagaccacggtggtctaccctgcggacgtggttctgtttgagggcatcttggtgttctacagccaggagatccgggacatgttccacctgcgcctcttcgtggacaccgactccgacgtcaggctgtctcgaagag

SEQ ID NO: 350274 - DNA, 529 bp, Homo sapiens
gcctttaaaacactctgtcccccccatatttcttggctgcagactctttgatcacattttcgtgtgacagtgattttgtaatatttcctatggggagaatagaaagataattccgtctctcctttggcagtaggcatgtccctgtgagggaggagatcagcaggatttttccaagcacctgtcaaaaccctgctgatcaaaacagaacataacaataacaaagaatggccaaaaccagctcggaataggaattaaaatgcatttgcataagatactcccaccagggccatgacagtttacaaatgatcccacggcaataacccaggaattatcttatatggttccaggaacttcctgttcctagtttatgaataacctgcctcttatttagcatataattagcagtgggtataaatatagctagccagcaatcctggagtgctattctacctgtggggtagccctgctctgtctgtggagcagccattttgctgtacaatgttgctttaataaacttgctttgctttca

SEQ ID NO: 350275 - DNA, 331 bp, Homo sapiens
agtccacattcacatatataaataattgaataaataaatggtgtgaaaggacagctattccttggagaagaattataattaataaatatagaaggaatgagggaaatatcaaatcaccattaggcaaacaccattgtaatcatggttgcaggcaagacccaccaatggatactaaaatcagtaggtaaaagttggagtagaaacaggattttttcataatctcaaaatatttcctcctgcaggagcgttaacaattacaaagagaaaaagagtaatgttatagtggagaaacctagcagacaacagtttaaccttaaccttaagtgatcaa

SEQ ID NO: 350276 - DNA, 817 bp, Homo sapiens
ggaggtgtggacggctcaccctgggtggcccagaggatgcgggagctcaggggacacacagctgcactaaaggtcccgtgtggtgtcgactccccggcccgccaggaggacggctgtgcaaccccttcctgcacccttgcctaagctgcagaggctggtgatctagctcctgctgttaaactgtggtgtacacagacagaatcaggtccaaggagtcgcttctgtgaaggttacaaggtgaggacaactgtcacatttggggggaaatagtaaaacgctatgattctgcactgggttgcgttggaaacatctctaagttcctcaggctctgtcttccctcaaactcccactgtccacggtggggccagcagtgaagtggggggctcctcaggtctccagtttttccctgactctggtcacacccctcaccccagcctgtgccccaggtcactgccccctccacgcccccagactcggggatgggtataactggcctccaagctgcccacctccacccggtgatggcactggaggggccaccacaggactcttgtgatggggaccacatgccaggccaggccatcaaccccgcacctctgcgacctccctggagccggggtcccctcgcggggccaccacgctgggaagtcagcggggcaggtgccagagcggggtagccaaccccacccaaagggaaggcctgcagggccctgaaggcagctccactgccacacatgcccagggtgctggcggggaaatgtgtcccaaaaaacaggcacctccaaaaacgtcaggtgaaccccgacgccccgtggag

SEQ ID NO: 350277 - DNA, 772 bp, Homo sapiens
ggaggtgtggacggctcaccctgggtggcccagaggatgcgggagctcaggggacacacagctgcactaaaggtcccgtgtggtgtcgactccccggcccgccaggaggacggctgtgcaaccccttcctgcacccttgcctaagctgcagaggctggtgatctagctcctgctgttaaactgtggtgtacacagacagaatcaggtccaaggagtcgcttctgtgaaggttacaaggctctggaagtggacgctaaaccaggccgtgaagccgtgcagggtccccgccttcctgatgtcgaagcgcagctcgcccctcagggtctgggtcaagcagatgacaaggcacgcgtgggcaccgcgtggcaccgcagggcccgggttggggcggccccctccacgcgccccgcgcagacgctgaatgcgtcaggaaccgtagaaaagccccccagcctggggaaaccacccccaaaacccgcatcgtgagttcagaggcttcagtcagaaacgtttcaagcatctgagcttcttgcgcccaattttctaccccagattctgcggaatcttttcggcgctcagctcttccagttaaggagttggagagctccaggctgggcctttccacagcagaacgaactaaaaaccaaagcgcgccggcgccaccgcgcccgccccatctccagacgcggcgccagctggggcgccaggcagggcgggggcgcggggaaaccgcccagagcccacgagcgccaccgcgcggccacagacaggg

SEQ ID NO: 350278 - DNA, 1003 bp, Homo sapiens
ttctgtaatgcaaggcaatcttgtgtccttatttctgtttctgggcacactgtaaaacatctgtattttaatagtatctgtcaggaaattctattttggcaaccaagtacgggctaatctaaagtagcccatacttgagtgctatgttgataaggctctaatgcatagttagccccttgactgtcaggcttggaaaaaagacaggaagtattccttgtctttggaaatgagcctactctggctttgggaaggaaagagtacaaatggttctcaccagatagggttgcagcagctctcccagcattttgggaacaaatcaggtcattatctcaacaatgtcaaaattgtgttcccagatcggttgttgtttgaaacatttggggctgatgcggaggaggagaattaattagcagctccctctgttggtgttctttttcagccttctcacattgcagcacgagagtcccttagacatgctggctgctcatttgataatctgtgttttgctcagtacaaaaggttgctggctaagttttgtgagcccctctaacgtcaggctggcagtatcttgggttcaattaacaagaaagtctacagtaacattttgtcaatggggaaggacttgaattcacagaactgtctcggaaagccctggtcctcgcagtccgcctgagagagtagagaagaccccctcccagaaccttcctgtaaggtctccccgctgacttcctgtagtggatgtgactgtgtgccaggtgcctgccgaagacccctgtcactgactgtgccctttgggaaagagtcaacaatggcctcctcctatggctgacttcgttcatgttcaggctctccagcttgctagtgagaattgccaaggattggttcatggcaggatagaactaaactgatagatgaaagctccacagtgcttcaagacggggtcccgttcatgttaagcagttttccttccttcaaaataaaaaactagcagtccttagggagg

SEQ ID NO: 350279 - DNA, 534 bp, Homo sapiens
agcccggggcggaacgggggaccctctctgaagcggctctccgtggagttggatgttgcccttcgcgggagggagtggcggtcaagacccctttatcctcggccccagaggggcaggtggcctcgggtcgccctccgccaactccgaggtttggggaaaggtgctgctgaagcaatggaagaaaaatcctcgcagtccgcctgagagagtagagaagaccccctcccagaaccttcctgtaaggtctccccgctgacttcctgtagtggatgtgactgtgtgccaggtgcctgccgaagacccctgtcactgactgtgccctttgggaaagagtcaacaatggcctcctcctatggctgacttcgttcatgttcaggctctccagcttgctagtgagaattgccaaggattggttcatggcaggatagaactaaactgatagatgaaagctccacagtgcttcaagacggggtcccgttcatgttaagcagttttccttccttcaaaataaaaaactagcagtccttagggagg

SEQ ID NO: 350280 - DNA, 886 bp, Homo sapiens
ggagcagccggggcttcgccggcccgcgccgttcttctcacgcgccgctccggggcgcagccacagctgtcgcccaccgcgggtgagaggcttgctggtccgccccggcttccccgccccggcggcggccgtgcggttcgggctttaattctggcgcttgccagccggggccgactccgccccctgcgccccgcccttccccgagctccgggtccgcggcggagcgagcgagcggccggcaggttgggaggagcggccgaagggtctcactctgtcacctgagctggagtgcagtggtgcgatcacagcttactgcagcattgaactcctgggctcaagtgatcctcttgcctcagcctcccaagtaactgtgactgcagtgtccttgctggccttgcaaaatgagtttggaagggttgattccatcctcttcagttgtggaaagagtttaagaagggtggtgttaattcttctctttaaatatttgatgaaattcaccagtgaagccgtgacatcctgggatattctttgttgagagtcctcgcagtccgcctgagagagtagagaagaccccctcccagaaccttcctgtaaggtctccccgctgacttcctgtagtggatgtgactgtgtgccaggtgcctgccgaagacccctgtcactgactgtgccctttgggaaagagtcaacaatggcctcctcctatggctgacttcgttcatgttcaggctctccagcttgctagtgagaattgccaaggattggttcatggcaggatagaactaaactgatagatgaaagctccacagtgcttcaagacggggtcccgttcatgttaagcagttttccttccttcaaaataaaaaactagcagtccttagggagg

SEQ ID NO: 350281 - DNA, 753 bp, Homo sapiens
gcgggcgcctggctaccccggcccggcgctctgtccctcggatgcctctgggcccttccctagcccggggcggaacgggggaccctctctgaagcggctctccgtggagttggatgttgcccttcgcgggagggagtggcggtcaagacccctttatcctcggccccagaggggcaggtggcctcgggtcgccctccgccaactccgaggtggcttcggccggggctggagggcggggaggcgggggaggggcgtgggcgctgcggcctctggggcggcccaacccggcgcgggcagcgtgggtttccgaggtcccgcggttccaggtcgagggaaggtgtaggggccctgaagcgggctggtccccgaatgttgcgttttctgtgccgctttgggcaacacgcagtggcgctcgcggcagccacggctccttgaccgttcatctccttcacccgggtcccgtggaactttcagaggcaactgttcttggtggctcttgcgggtcagcacgagccgtgctgcacgagcgtgacctagtgaaggccttgggcgagttggcgttaacaatttatggcgtccgccagcgctcgctttccgcacgtggcctctgcggagggtcagcccatcttattaaatagtggattctattagaccctgatacccgaggctaataaggaagcttaatcatccagatgtgtaatcgtgcagttcctttcctcaccgtcattgccccccacctctggagctgaatgg

SEQ ID NO: 350282 - DNA, 969 bp, Homo sapiens
ggagcagccggggcttcgccggcccgcgccgttcttctcacgcgccgctccggggcgcagccacagctgtcgcccaccgcgggtgagaggcttgctggtccgccccggcttccccgccccggcggcggccgtgcggttcgggctttaattctggcgcttgccagccggggccgactccgccccctgcgccccgcccttccccgagctccgggtccgcggcggagcgagcgagcggccggcaggttgggaggagcggccgaagggtctcactctgtcacctgagctggagtgcagtggtgcgatcacagcttactgcagcattgaactcctgggctcaagtgatcctcttgcctcagcctcccaagtaactgtgactgcagtgtccttgctggccttgcaaaatgagtttggaagggttgattccatcctcttcagttgtggaaagagtttaagaagggtggtgttaattcttctctttaaatatttgatgaaattcaccagtgaagccgtgacatcctgggatattctttgttgagagaaaaacaggacaaagaaacctgtgtgaattttcagcttttcaccttctctgattttatttcttcctcactcttcctttgacagtcctcgcagtccgcctgagagagtagagaagaccccctcccagaaccttcctgtaaggtctccccgctgacttcctgtagtggatgtgactgtgtgccaggtgcctgccgaagacccctgtcactgactgtgccctttgggaaagagtcaacaatggcctcctcctatggctgacttcgttcatgttcaggctctccagcttgctagtgagaattgccaaggattggttcatggcaggatagaactaaactgatagatgaaagctccacagtgcttcaagacggggtcccgttcatgttaagcagttttccttccttcaaaataaaaaactagcagtccttagggagg

SEQ ID NO: 350283 - DNA, 213 bp, Homo sapiens
gggaaagacaggccaaaccaaggatggcaaatgtgatgcacacagcaccacttccatgtccgtgacaggcaccaataagcaattggagcacactctcaccaagcttcaaaagtctctctttttttttttttttttttttttttttttttttgagacggagtctccctgtgttggccaggctggagtgcaatggcgcaatctcggctcactgca

SEQ ID NO: 350284 - DNA, 633 bp, Homo sapiens
atgtataggtaactatttgtaagctatcagaatttcagaaggaactgtactgttagttatcaaataatttacgatagccctattacacacaaatctaaaactatacttgttagatctttattaatatttgggatagtctctttactaagagaaaactcacaaaattaaaccacttaaatttttggaatttatttttagatttccctttcagctccagtcttgacttttaaatttatataattaaagagccattgcattacatttatgacgaatatgacacataataagggacaatagctgaccggaagaacattgttatcaagaaaatttgttttaattcagatgactaaatgtagaaaagtatttcactttaatacaattttataaagaggttaagtttatgttgtgttttaatcacaaagaaaacagagtttcccccttattctatctatttgataactaaccattggttattgaatgaaattaagtggaactgatttctcctttctcaaaatattcttagagtacatatggggttttaagaagtaagatgtgtctttgtgtgtgtgtgtgtaatatttttaacttaagtgaagaatgcaaacatgaaaaactagaattatttcttgtgta

SEQ ID NO: 350285 - DNA, 367 bp, Homo sapiens
atagaatttgtggtaaacaagttttttttaagtactcttgaatttcagcttctataactggctgttcagctactgatacacaaccaaatctgttttatagagagagagagagtgaggaatggggatttttatatcattttgtttttaaactgctttagcctagaaatgtaactgtgtaactgtcttttttgcttatgtctccactacctctattcttatttttaacattcatcttatttttatttcttctggaatattgtgtttttgacactcactatctccctattttggctcctgttattttactatatgtcagttttcataaatgatatatattatcttttttttggagtcttgctctatcgcc

SEQ ID NO: 350286 - DNA, 743 bp, Homo sapiens
  misc_feature (690)..(690): n is a, c, g, or t
agccgcggtgtgagggagcgggagtcttccttagcttctccgccatgggtgtcgcttcgtagccgggctgctccgggaaaggcctcgtacagcacgcattcaccagaatcctgtcagctttcctcttctcatccagacgcctggccaggatcctcgataagaccgtgacccccaacttggacaccccataagctttgttctcagaaacttggcggctacaaggaattaaatgtgaatgggaaaggaagaaagaaaaacacagatcatagaagctgtgccttcgaggaaataaatcctcttaaggggaggaggtgtcctctttgatctgagggcacacctctgggagagaggccagaggctgacagtcagcctcgtcagccagatgcgtcatcagccctgggaagggctgcacccacaccaccctccactgaggtccaggtggccccaccggtcccgaaacacctgctgccttactctagaaagagtaggcaagttgcgccctctagtggcttagtagttgcttgtcctattgactcagaaccttgaacaaataagcaagtcaaatacagatagatggtccctgccctctgatggttccacttaggacttactgacttcactgatggatgaggaagcgatatgcattctgcagaatctgtacttggaggccccatacaaccattctgcatntcactttcagtacagattcaataaattacataagatactcaacattttatgat

SEQ ID NO: 350287 - DNA, 1383 bp, Homo sapiens
gaactttgggaggccaagttgggcagatcacctgaggtcaggagttcgagaccagcctggccaacatggtgaaataccgtctctactaaaattacaaaaattagccaggcatgatggcagatgcctggtaatcccagctactcaggaggctgaggcaggagaacagcttgaacccaggtggcagaggttgcagtgagctgagatcatgccactgcactccagcctgggcaacaagagcgagactccgtctcaaaaaaaaaaagaacagaaataatcaaaccacagcatcaattcattcattcattccaccaacatttattaagcagcaagctccgaagcagacgtttaccagttttgcacaactttgtcatggaccaactggccttgtggctcagtggcatctggaggcaagagggccaagtagacaggggtctcagccccctcctccacagtcctgatgctgtctttcccatccatgtctgtcttcactggtcctgggcagcacgcattcaccagaatcctgtcagctttcctcttctcatccagacgcctggccaggatcctcgataagaccgtgacccccaacttggacaccccataaggttcccagatgatgtgacagctactggtctccagccacaccttgagaacacttggctttgactaccacttcttaaacttaaaggaaaactagacaatccaccagcccaggaggggacaagcaggcttattcctcctcctcgtcatctctggctccagccccaccctggcccttgctggcattcttcctcttcacgtggctggggttggccaccccaatagggaagcagagggagaagtcaatgtgcttctgggaatccaggcggacagtgaagaacaggatatttaccacctgctcacggacacggatatgacactgctgaatcagcacatgagcgtggcggatggacttagccaagccaagcttgaagacctgggtctgtaggaatctctaagaaatcattgatcttcaggcccaggatgtaatccagcttcatcttgccctcatccagcaccccagtgcggaccagccactgcagcagggcaatgccttcgaacagacgccgtgggtccttctcatcaagcgtcagcagctcccgggcggccttatggatcttgaccagggtaaatttgaccctccagacctcacatttgttctggagcccatactcaccaatcagctttagcttttggtcgagatgaggtttctcgaagggtctctgcagggtcacataagtttggcgacaaacccagctctgggccgctggcatgttggctccacttgcccgtctatgcctaagcacaggccctggtcactgagaaagagctcaaattttttatata

SEQ ID NO: 350288 - DNA, 965 bp, Homo sapiens
agccgcggtgtgagggagcgggagtcttccttagcttctccgccatgggtgtcgcttcgtagccgggctgctccgggaaaggcctcgtacagcacgcattcaccagaatcctgtcagctttcctcttctcatccagacgcctggccaggatcctcgataagaccgtgacccccaacttggacaccccataagggtcttctctgtcgcccaggctggagtgcagtgctgcagtcgtggctcactgtagcgtcagtctcctgagctcaggaaaactagacaatccaccagcccaggaggggacaagcaggcttattcctcctcctcgtcatctctggctccagccccaccctggcccttgctggcattcttcctcttcacgtggctggggttggccaccccaatagggaagcagagggagaagtcaatgtgcttctgggaatccaggcggacagtgaagaacaggatatttaccacctgctcacggacacggatatgacactgctgaatcagcacatgagcgtggcggatggacttagccaagccaagcttgaagacctgggtctgtaggaatctctaagaaatcattgatcttcaggcccaggatgtaatccagcttcatcttgccctcatccagcaccccagtgcggaccagccactgcagcagggcaatgccttcgaacagacgccgtgggtccttctcatcaagcgtcagcagctcccgggcggccttatggatcttgaccagggtaaatttgaccctccagacctcacatttgttctggagcccatactcaccaatcagctttagcttttggtcgagatgaggtttctcgaagggtctctgcagggtcacataagtttggcgacaaacccagctctgggccgctggcatgttggctccacttgcccgtctatgcctaagcacaggccctggtcactgagaaagagctcaaattttttatata

SEQ ID NO: 350289 - DNA, 890 bp, Homo sapiens
agccgcggtgtgagggagcgggagtcttccttagcttctccgccatgggtgtcgcttcgtagccgggctgctccgggaaaggcctcgtacagcacgcattcaccagaatcctgtcagctttcctcttctcatccagacgcctggccaggatcctcgataagaccgtgacccccaacttggacaccccataaggaaaactagacaatccaccagcccaggaggggacaagcaggcttattcctcctcctcgtcatctctggctccagccccaccctggcccttgctggcattcttcctcttcacgtggctggggttggccaccccaatagggaagcagagggagaagtcaatgtgcttctgggaatccaggcggacagtgaagaacaggatatttaccacctgctcacggacacggatatgacactgctgaatcagcacatgagcgtggcggatggacttagccaagccaagcttgaagacctgggtctgtaggaatctctaagaaatcattgatcttcaggcccaggatgtaatccagcttcatcttgccctcatccagcaccccagtgcggaccagccactgcagcagggcaatgccttcgaacagacgccgtgggtccttctcatcaagcgtcagcagctcccgggcggccttatggatcttgaccagggtaaatttgaccctccagacctcacatttgttctggagcccatactcaccaatcagctttagcttttggtcgagatgaggtttctcgaagggtctctgcagggtcacataagtttggcgacaaacccagctctgggccgctggcatgttggctccacttgcccgtctatgcctaagcacaggccctggtcactgagaaagagctcaaattttttatata

SEQ ID NO: 350290 - DNA, 948 bp, Homo sapiens
gcctgcggctggccacctccgcaccctcggagcgctccagggggccccaacccaagccctgcacctactcttgaaggcgacggccgcgttgttgaccagtacgttgagccccccgtactccttgcgcaggaagtcgcgcagggcgcggatgctctgcaagtcgtcgatgtccagttggtggaagcgcgggctcaggccctccgcctgcagctgctgcacggccgcctggccccgcgccacgtcccgcgcggaaaactagacaatccaccagcccaggaggggacaagcaggcttattcctcctcctcgtcatctctggctccagccccaccctggcccttgctggcattcttcctcttcacgtggctggggttggccaccccaatagggaagcagagggagaagtcaatgtgcttctgggaatccaggcggacagtgaagaacaggatatttaccacctgctcacggacacggatatgacactgctgaatcagcacatgagcgtggcggatggacttagccaagccaagcttgaagacctgggtctgtaggaatctctaagaaatcattgatcttcaggcccaggatgtaatccagcttcatcttgccctcatccagcaccccagtgcggaccagccactgcagcagggcaatgccttcgaacagacgccgtgggtccttctcatcaagcgtcagcagctcccgggcggccttatggatcttgaccagggtaaatttgaccctccagacctcacatttgttctggagcccatactcaccaatcagctttagcttttggtcgagatgaggtttctcgaagggtctctgcagggtcacataagtttggcgacaaacccagctctgggccgctggcatgttggctccacttgcccgtctatgcctaagcacaggccctggtcactgagaaagagctcaaattttttatata

SEQ ID NO: 350291 - DNA, 266 bp, Homo sapiens
tctggattccacctcgatctccacggtgctcaaagcagctctagggggagtctgccaggagggaggtagagttgggggcggcgaaggacctggagctaagcgctgaggctcaggccctcaggaacaacggcttcagaggcaacagcacaaagcaggccaagtgctgggccaggctgggatttagggagagcccctggctgaggaggggagcggagacactcggggacatggatgacagggtggccaccaagcactgcagcccccac

SEQ ID NO: 350292 - DNA, 801 bp, Homo sapiens
aaaattgtctcatttaatttcatctttatgataatctcatgaagtagggattgtcatacacatttggccatgggtaagtggtaaaattactactatagcccaggtaaatctgatggtaagatctttgattttaaatgataaaattgtatgatacaaaagaaccaaagccaaaggaagcaaaaataattcctataggttttaaagtgatattttgattttaaaatattaaaatagtattgcaagggactattaagctaaattatgatactcttcttttacatagacttgttaacctactaaattaagtgggagaagttaaaaacatgtttggtttagttgagagactgatattgggaaaaaagatagccagactctgagacaaaacagattatgctcagttatactgacccagtcaccctttaaaagaacattaaataataataatattaattatatatgatgtatattaaatattctgacttcagatacagatctcttcagctcaccaaaactcatatatttgttttctgaaggatttcatcttgttctttactagctgccaattaatcacacactttttaatttaatctgggccctcttctgtctgcctgcccagtgctggtaggagtgtattcgtccaagacctatggacttcttatttttggttaaatatgtgctcccagctcttcctcttcatcttctttctggggtactattattgtttttagacaaaatggcataatatgcagggggatgggttttgtataaaataaaacagggttcaaatcctgggtctgcatg

SEQ ID NO: 350293 - DNA, 366 bp, Homo sapiens
cctcccaaagtgctgggacttaggcatgacccactgcacccagcctcaatgttgtcttctgatgaatagtgaataatttttgtgtcctgttgaagaattctttgcctccaacaaattcgcgaagataattctatttctctccatatcccgtttattgaaaagaccattcttactggactgtagcatcacttgtcaagcaggtgtctatatatgtgttggtcagtttctgaactctgttctcttccatgaacccatttgactatccttgaaccagtgctactctatcttaataagtacagcttcacggtaagtcttgataactggtgcacagatcctctgactttgcatttcttctgtattgttttg

SEQ ID NO: 350294 - DNA, 232 bp, Homo sapiens
aaagggcatccaaattagtaaagaggaagtcaaactgttgctgtttgctgatgatttgatcatttacctagaaaaccctaaagactgctccagaaagctcctagaactgataaaagaatttagcaaagtttccagatacaaaattagtgtacacaaatcaatagctcttctatacaccaagactgaccaagctgaaaatcaatcaagaactcaaccccttttacaatagctg

SEQ ID NO: 350295 - DNA, 914 bp, Homo sapiens
aaataaacaaaaaaaatccattcatttactcatgcaataaattctcctgcaagcttttatgggcactcagtaagtactcaggattggctttatcagccttgccactgagcagctcatggtcctatggaacctgagccaggcctcagtctctccatgattggctcagctaactctcagttcagagtggagagtatcaatcttgtgtttttgcccttaggcagcactatatgagacatggggcctgtggtccttccttctggtgtcccccgtgttaaaagataaaaaacaccccaagggccgggcgcggtggctcatgcctgtaatcccagcactttgggaggctgaggcgggtggatcacgaggtcaggtgatcgaaaccatcctggctaagacggtgaaaccccgtctctactaaaaatacaaaaaattagctgggtgtggtggtgggcgcctgtagtcccagctgctcgggaggctgaggcaggagaatggcgtgaacccgggaggcggagcttgcagtgagcagagatcacgccactgcactccagcctgggtgacagtgcaagactctgtctcaaaaaaaaaaaaaaacactccaagggccatccgtgctctctgcccctcctgtggggaccaagtggggttaggaatggctcagtggggaaggagagcactcttgtccccagtcccttgccaccctgtcccttagatagggaggtgggctgcagagattggtgccagaagagggtgggtttgggaattggagctcctccaaggagctcctcctaagattgagtgctgcagctgtagtggctgctggttgggagagtaagtgccatcactaatttaaaagtccttgccatctggaatcaggctttgtcaacagcagctgagaaaagcagcctgtgcctctg

SEQ ID NO: 350296 - DNA, 3801 bp, Homo sapiens
gcagggagccaggctggggccatgggctgctgccagaggaccgtggatacctcagtgtccacacacccaccatgcccagccctggagccatcactactcacaccgtggtcctgggccagggcctgagatgacagtggggagcaccatcctcattaatgtccaagtcacagggagcctcagccttgccctggctggggttgtggtgactccagtggaacattccctgatgggggacatgccgtggtggagaacacacctgtggctatcttatgtgaggactagaggtgaagaggagatggacactgcctctggagccagcctgacaccaaggacagcacttgtcatcatccctatcctcgtcagccccaccctactgcctcagctggacccagggctttgacacaaacccagtgctttgcttatgggtgctcgctggggtccggtggagactgaccaccctgcttgagccaaagacaaggtgatgagagatggggagaggccattggctcccagagggaacagtgctggctgtggctagagaacagcaggtctgtgcagtgtctgagggcaggttgggaagggtagcagagagagagagacagaaagagagagagagagagagagagagagatcctcagagtggaaggagggggaagcagcaggacacattggcaagtcaagcaggaaggagggagatggaaaggggatatcagattggtttcccccggtggagccttaggttagtgcccagtgcagtgccagactgtctcctctgctcctcccacctcatccctaggaggacccaccagtggagcacatgcagcctcagtggagatgcttggtgtggggatctgggtgaagggggttgagtagcgactgcctgggagatggctgttagtaggtctgtgcctggtgtctgcctcgccatcctggggtaaggggcagagagaaggacttgtcttatgtagggtgtggtcagccttggggccttacctacccagttccatgatatttcttgccctgttccccctggaatgtgcagtgggccagctgagagtacgccttgaggaggggggatgaggccttaatctgggaggcctatccccctatcccaggcatcccagacgaggactggctgaggctaggcgctctcatgatccacctgccccgggagggcagcggggaagacagagaaaagcaaacgcattcctcctcagctccacccacctggagacgaatgtagccagagaggaggaaggagggaaactgaagacaccgtggcccctcggccttctctctgctagagttgccgctcagaggcttcagcctgacttccagcggtcccaagaacacctactaattcctctgcactccttcatggctgggacagttactggttcatatgcaagtaaagatgacaatttactcaacaaatatttatcgagcaccttttatgtaccaggcactgttgtaggtgcttaggatattctcatgtttctgagggattacagcctgggaggattccaccgatcttcacttctagcaggttttttaaacgtgacccttggctgtatttcccatcttcacagttcaagcaccccaaacctgccctttctcccctgcagactggcaggtgggattggctcccaggtcatttcctctctctctctttctcccaagcctttctccctccacaggaaacagatttttcagggccttccatgcctgccactttgtccgtctctttttttttttttaaagtaatattttttagaaatacatgtaaaataccaagaaataatgtctgcgcctctgccacctctctctcatctcttatttcataaagctggctctttatgttgctttacatgccttaatatatgttttatggagattatacatattatagatctatatatgtaatatatttgtttggatgtctgatcttttcctacagttcctgcccaggcctgtttttctctcccttattttccacatcattcctagcatatcaagaccataccccttgcctttttgatccaaagaaggggagaggaaagacttattttaagacatctattttatgcttttgtttaaaaaaagcaaatctattttcaaattgtgcaatgtctgaatggaattggcaaatgaggtgaggagatggggtaactgcctttaggtcccaaccctgtgcctgtccctctgccacagtggcttccttccatcctattccccagtcacgaaagggctggtccccagagctcacccagaaagcatcttgccgggggcagggcattccctcggaagtcctggcctaaggattttattacactgtctgctcctgatgaccctctgcggttgtcaggcgtgaatcctctggaaggaactgtttgcagttgtatgcacaaaggagacccatgcaggcatgcaccccagatgggctgctagactacccctcttcatcagcctgctggaaagagcagacagcgtaacagcagcctatgccaaacagcactaaggatgtcagtgtacgagacggtgcgaagcccagaggaggcggcttgggatcctctgggccatccctggccctgtagcacagacacatacaagttccttggacttgtcacactccttttcacttgatccctctctggcctgggtcacatttatgacatcccccctctgcaacctttctctctgggggctgtaccaaaggcatggtacctcagtctggtatccagactgtgaaatcagcctctgggccaaggagggtcctacagacaaggtggcatctcaacctcacccaagaaacccccgggactttaccccagcaggctgccactggggcaccgaactaagccagctcagccttccaagctgcttagcctttgtcaaccatcaaagtggggaaagggtctctggccttgcaaggatttgggcaggatggaagtctttgtctaggtctgaaatcaagggcttgggaatctagagcagagctcctggccagcgtttgaagcctggcctcccacctggggcatttactgacaccctgtcgccagcctagaacatcctgctctgaatgaacagagcccagatgggggtccagagctaagtgacccacctggggaagctctgattattcatccagggccttctcaatgagcacattacctccatgatcaataaccaagaggctgcagtcaaatactgctactgtcactttgaagattttctaagggcacaagtggcacacttgctctccggcctttgggagaggcatgttcttgggcagggctggctacggcaagagggaaccaattcctttcccctttaggcaccctctacctggcagctcttaaaactaagaaaaaatatgatatacacacacattatatatatatatatatatacacacacacacacacacacacgtatatctatttatgcacatattggggccaatttgatttgctagtattagacaataaactgtacaaggaaatttattatctcagtgtctttatttagcataaaagtggccttagaagaagggtgaaggttagatagatggaatctctgtcaggggacaaacagctgtagcatccccttagcatctttctagccaatgagccccctccccaggaggagggatggcctgactgaaacaggtgagagtttgcttccccctttcagcagcattctttttagatttaggtactgaagaatcccagtgagttctgcatttgtatcttgcaagtttgtataaacccaatacaggaaataaaatgaatggtttgtata

SEQ ID NO: 350297 - DNA, 3472 bp, Homo sapiens
ccaccctgcttgagccaaagacaaggtggtcagtctccaccggaccccagcgagcacccataagcaaagcactgggtttgtgtcaaagccctgggtccagctgaggcagtagggtggggactgaccaccctgcttgagccaaagacaaggtgatgagagatggggagaggccattggctcccagagggaacagtgctggctgtggctagagaacagcaggtctgtgcagtgtctgagggcaggttgggaagggtagcagagagagagagacagaaagagagagagagagagagagagagagatcctcagagtggaaggagggggaagcagcaggacacattggcaagtcaagcaggaaggagggagatggaaaggggatatcagattggtttcccccggtggagccttaggttagtgcccagtgcagtgccagactgtctcctctgctcctcccacctcatccctaggaggacccaccagtggagcacatgcagcctcagtggagatgcttggtgtggggatctgggtgaagggggttgagtagcgactgcctgggagatggctgttagtaggtctgtgcctggtgtctgcctcgccatcctggggtaaggggcagagagaaggacttgtcttatgtagggtgtggtcagccttggggccttacctacccagttccatgatatttcttgccctgttccccctggaatgtgcagtgggccagctgagagtacgccttgaggaggggggatgaggccttaatctgggaggcctatccccctatcccaggcatcccagacgaggactggctgaggctaggcgctctcatgatccacctgccccgggagggcagcggggaagacagagaaaagcaaacgcattcctcctcagctccacccacctggagacgaatgtagccagagaggaggaaggagggaaactgaagacaccgtggcccctcggccttctctctgctagagttgccgctcagaggcttcagcctgacttccagcggtcccaagaacacctactaattcctctgcactccttcatggctgggacagttactggttcatatgcaagtaaagatgacaatttactcaacaaatatttatcgagcaccttttatgtaccaggcactgttgtaggtgcttaggatattctcatgtttctgagggattacagcctgggaggattccaccgatcttcacttctagcaggttttttaaacgtgacccttggctgtatttcccatcttcacagttcaagcaccccaaacctgccctttctcccctgcagactggcaggtgggattggctcccaggtcatttcctctctctctctttctcccaagcctttctccctccacaggaaacagatttttcagggccttccatgcctgccactttgtccgtctctttttttttttttaaagtaatattttttagaaatacatgtaaaataccaagaaataatgtctgcgcctctgccacctctctctcatctcttatttcataaagctggctctttatgttgctttacatgccttaatatatgttttatggagattatacatattatagatctatatatgtaatatatttgtttggatgtctgatcttttcctacagttcctgcccaggcctgtttttctctcccttattttccacatcattcctagcatatcaagaccataccccttgcctttttgatccaaagaaggggagaggaaagacttattttaagacatctattttatgcttttgtttaaaaaaagcaaatctattttcaaattgtgcaatgtctgaatggaattggcaaatgaggtgaggagatggggtaactgcctttaggtcccaaccctgtgcctgtccctctgccacagtggcttccttccatcctattccccagtcacgaaagggctggtccccagagctcacccagaaagcatcttgccgggggcagggcattccctcggaagtcctggcctaaggattttattacactgtctgctcctgatgaccctctgcggttgtcaggcgtgaatcctctggaaggaactgtttgcagttgtatgcacaaaggagacccatgcaggcatgcaccccagatgggctgctagactacccctcttcatcagcctgctggaaagagcagacagcgtaacagcagcctatgccaaacagcactaaggatgtcagtgtacgagacggtgcgaagcccagaggaggcggcttgggatcctctgggccatccctggccctgtagcacagacacatacaagttccttggacttgtcacactccttttcacttgatccctctctggcctgggtcacatttatgacatcccccctctgcaacctttctctctgggggctgtaccaaaggcatggtacctcagtctggtatccagactgtgaaatcagcctctgggccaaggagggtcctacagacaaggtggcatctcaacctcacccaagaaacccccgggactttaccccagcaggctgccactggggcaccgaactaagccagctcagccttccaagctgcttagcctttgtcaaccatcaaagtggggaaagggtctctggccttgcaaggatttgggcaggatggaagtctttgtctaggtctgaaatcaagggcttgggaatctagagcagagctcctggccagcgtttgaagcctggcctcccacctggggcatttactgacaccctgtcgccagcctagaacatcctgctctgaatgaacagagcccagatgggggtccagagctaagtgacccacctggggaagctctgattattcatccagggccttctcaatgagcacattacctccatgatcaataaccaagaggctgcagtcaaatactgctactgtcactttgaagattttctaagggcacaagtggcacacttgctctccggcctttgggagaggcatgttcttgggcagggctggctacggcaagagggaaccaattcctttcccctttaggcaccctctacctggcagctcttaaaactaagaaaaaatatgatatacacacacattatatatatatatatatatacacacacacacacacacacacgtatatctatttatgcacatattggggccaatttgatttgctagtattagacaataaactgtacaaggaaatttattatctcagtgtctttatttagcataaaagtggccttagaagaagggtgaaggttagatagatggaatctctgtcaggggacaaacagctgtagcatccccttagcatctttctagccaatgagccccctccccaggaggagggatggcctgactgaaacaggtgagagtttgcttccccctttcagcagcattctttttagatttaggtactgaagaatcccagtgagttctgcatttgtatcttgcaagtttgtataaacccaatacaggaaataaaatgaatggtttgtata

SEQ ID NO: 350298 - DNA, 444 bp, Homo sapiens
gggggaggaggggaaaggggagagggagagggagaaggagagggagaaggatagggaggagagggagaaggagaaggagagggagaaggaggagagggagaagaaggaggagaaggaggaggaggaggagaaggagaagaagaagaagaggaagaggaaaaggaagaagaaggagaagaaggagaagaagaaggaggaggaggagaagaagaaggaggaggaggaggaggaggagaagaagaagaagaggaagaagaaagaagaagaagaaacaattgctaaagacatcatgtctagatgtgcagtctaacttcaaaatatgaagacaacatatttcctacaatcaacaaaagcagctttggccccaaattctaaaaccaaagacgatttagagtattaaataaaaggttcacctctaccacaaattgaccaggaaaatgaact

SEQ ID NO: 350299 - DNA, 570 bp, Homo sapiens
ctttatagtttaattttaagggggaaattggttattttcaattattaaaggttaaaataggccaaatcactttttatgcaatcatgttttatacagtggtctcattgcacattgtgttttttctgcactttttacggtatccttatcatgctggtatgtcaatatacaccctaaagaaaaactccatttaatgattgtgccttgtattctattattttttgcatcattagtaaaattaagttgtctattgtaaatgataactatatgacttaggagaatgtattgctatatgtactgctatggaaaaggaaagcagttatttatttgtttatggtacagttagttattttataccttaaaaaccaacatacttaccatttctattgtttaaaaattactgtccatttttttaaaaatttaaagaatgtagtattttctgaggactggtatggtacaaaaatgtaatcaaaattttcagatactacatttttaaaaagtgaggatggggaaaatatgtatcagcatgaccctgatgtagaaaaataaagtctgcaattgaaccttgcaaaa

SEQ ID NO: 350300 - DNA, 299 bp, Homo sapiens
gagcctcctacatggtgctgcttctagtcggccgtcttggccccacccctagttttgcatggctgggaggcctcaggaaacttaaaatcatggcgcaaggcaaagggaaagcaacgcaccttcttcacaaggcagcaggagggagctggagtgattttctaagaataattctggccaaactttcatgcactcccgcagccaaactccatttggatctattcaggcaggaatcatatttcagctccttaactctcataagtggaaactgacaccaactcattataaaacctaagtggaaa

SEQ ID NO: 350301 - DNA, 725 bp, Homo sapiens
agcaaatatatatttcaagatgaatctaaagcagtttttaaattacctgaattttctgtgtattaaaaaaatgtaatcttagaagctgtccagttactcagcttatagtaactgaaatgacaattctactgtaaatacttaaaaaatgaataaaacagtatggccacaactccaaggggcatttacaggttaatgaaatttgttgaacatcaatagctgctagaagagaaagtattaactaattttgaaagtcttgccttttctagcaagaaggtagctaacgagctaagctaggatttgaactgataatgtgatgcaaaggccaagttgtatcactatagaacacccctataacgctgcacaaaattagttgggttttcattgtgactttgccactgtatttgcattatgaacttaaacaaataattcatctggtttttgggttccttacaaggaatcaaaatatttggcctgttatatagttttgaagttatctttcagatctaatgtcatatgtccccaaacaccaggaaaaaaaattaacatctacaaaaaatttgatctatttaaactttaaaattcaataatgacaatatgaacttcacatacagattcatatacaaatatcctataggctgggcatggtggctcatgcctgtaatcccagcactttggaaggccgaggcaggtagatcacctgaggtcaggagttcaagaccagcctg

SEQ ID NO: 350302 - DNA, 695 bp, Homo sapiens
cgggacaacagatgacccggagaccgggggaggaccttcccatgcgcacgactcgcgatcttcccagtgccccagagccacggacccaaccgccgcctaccccagcccgcggcaccaaacctgttcacaactgcgactccttaggtccgcttggacaccgccggaaacggaaattcaccctcgcgccgacccgccggaggaaacaaaaaggcagaaaaaaagggaccgccgcctggacgacttgcaggggacagctggaagaaagactcgtcaacggccgagtgctggcgccggcgccgtctgcgcagtgcgttccaccggatgtgccgtttgggggtgctaaagctggtgttaagatctatcccaagaactataccgataacgaactggaaaagatcacaaggaggttcaccatggagctagcaaagaagggctttattgtctttgtatccagacaattctagcctcatggaatgagttgaggagtgttccttcctcttctgtttttggaaaagcttttgaaaggagtcacgtagcctttctctctccagtccacagatgtggggatctcaagaagcaggcgttcctggaactgtttcccgttcctgtgcttctggtattgaaaaccattcatcacctgcctgaattcttcagtggtcttcaaagaaaagtaaataaaatgttaagaagcaaga

SEQ ID NO: 350303 - DNA, 1748 bp, Homo sapiens
cgggacaacagatgacccggagaccgggggaggaccttcccatgcgcacgactcgcgatcttcccagtgccccagagccacggacccaaccgccgcctaccccagcccgcggcaccaaacctgttcacaactgcgactccttaggtccgcttggacaccgccggaaacggaaattcaccctcgcgccgacccgccggaggaaacaaaaaggcagaaaaaaagggaccgccgcctggacgacttgcaggggacagctggaagaaagactcgtcaacggccgagtgctggcgccggcgccgtctgcgcagtgcgttccaccgggtccgcgtccctcccgattcagccccaccccgccctcggaatccgctgcctcagctcctgctgtggcactccccagcagcttgcacctcgctcgcggagtccttgctgaaggccagggcagctgtgcggcctggcgcgggttacttgatgccgtgcaaaagccaggagacacatttggttctggccgccccggagtcaccgtgcccggggcgaatggactatggctggattgggagtccacttcctcctctgtaaagatgacagacgagggagatctcgcgttctgggggtgccctatagccctcttttggccagaagcggtggatcacgcctgtaatcccagccctttgggaggccgaggcaggaggattgcttgagcccaggagttcaagaccaatctgggcaacatagggaggctacatctctcaaaaaataaataaataaataaataaataaaaataaagccagcgtcgtggcggggcgcctgtggtccctgtggtcccagctactctggaggctgaggcgggacgatcgcttgagcctgggaggcagaagttgtagtgagctgagatcgagccactgcactccagcctgggcgacagagcaagacactgtctcaaagaaaaataaataaataaaataaggccctctttttccgggaccaacagactctgagggcagggacaaactgacccagcctaaactgcctcgccttccctgctcccgggaaaggggttttccctgagggaaggtagcatcttgccattttcttcctgcacagctttgccttcccagggatccacccattgccacctgaggaaatgccttggagcccatctaatccccagcccagctacttgggacgcctacagagactacattgtcagaggatgcatcttcctctagtcttggagggtttcttttcaatatgatcccaccggtgcatgcaaggctcaattctacatcaaaaaactaggcccactcctgtcaccgagacccccaggcttcaggtcctgtcacagtgaccttgttatcacccccagcagcccccagatgtgccgtttgggggtgctaaagctggtgttaagatctatcccaagaactataccgataacgaactggaaaagatcacaaggaggttcaccatggagctagcaaagaagggctttattgtctttgtatccagacaattctagcctcatggaatgagttgaggagtgttccttcctcttctgtttttggaaaagcttttgaaaggagtcacgtagcctttctctctccagtccacagatgtggggatctcaagaagcaggcgttcctggaactgtttcccgttcctgtgcttctggtattgaaaaccattcatcacctgcctgaattcttcagtggtcttcaaagaaaagtaaataaaatgttaagaagcaaga

SEQ ID NO: 350304 - DNA, 322 bp, Homo sapiens
gatttttatatcttttttatttttattgttttcttattttacaggataacgaactggaaaagatcacaaggaggttcaccatggagctagcaaagaagggctttattggtatgtgtagccacatagattttggcataaagtgggaacatctaaaaaaatcttttttttttttttttttttttgttttgttttgttttgtttttgagacagagtcttactctgtctcccagactggagtgcagtggtgcaatctcctccacctcccgggttcaagcaattctcttgtctcagcctcccaagtagctgagactacaggcatgtg

SEQ ID NO: 350305 - DNA, 1722 bp, Homo sapiens
cgggacaacagatgacccggagaccgggggaggaccttcccatgcgcacgactcgcgatcttcccagtgccccagagccacggacccaaccgccgcctaccccagcccgcggcaccaaacctgttcacaactgcgactccttaggtccgcttggacaccgccggaaacggaaattcaccctcgcgccgacccgccggaggaaacaaaaaggcagaaaaaaagggaccgccgcctggacgacttgcaggggacagctggaagaaagactcgtcaacggccgagtgctggcgccggcgccgtctgcgcagtgcgttccaccgggtccgcgtccctcccgattcagccccaccccgccctcggaatccgctgcctcagctcctgctgtggcactccccagcagcttgcacctcgctcgcggagtccttgctgaaggccagggcagctgtgcggcctggcgcgggttacttgatgccgtgcaaaagccaggagacacatttggttctggccgccccggagtcaccgtgcccggggcgaatggactatggctggattgggagtccacttcctcctctgtaaagatgacagacgagggagatctcgcgttctgggggtgccctatagccctcttttggccagaagcggtggatcacgcctgtaatcccagccctttgggaggccgaggcaggaggattgcttgagcccaggagttcaagaccaatctgggcaacatagggaggctacatctctcaaaaaataaataaataaataaataaataaaaataaagccagcgtcgtggcggggcgcctgtggtccctgtggtcccagctactctggaggctgaggcgggacgatcgcttgagcctgggaggcagaagttgtagtgagctgagatcgagccactgcactccagcctgggcgacagagcaagacactgtctcaaagaaaaataaataaataaaataaggccctctttttccgggaccaacagactctgagggcagggacaaactgacccagcctaaactgcctcgccttccctgctcccgggaaaggggttttccctgagggaaggtagcatcttgccattttcttcctgcacagctttgccttcccagggatccacccattgccacctgaggaaatgccttggagcccatctaatccccagcccagctacttgggacgcctacagagactacattgtcagaggatgcatcttcctctagtcttggagggtttcttttcaatatgatcccaccggtgcatgcaaggctcaattctacatcaaaaaactaggcccactcctgtcaccgagacccccaggcttcaggtcctgtcacagtgaccttgttatcacccccagcagcccccagatgtgccgtttgggggtgctaaagctggtgttaagatctatcccaagaactataccgataacgaactggaaaagatcacaaggaggttcaccatggagctagcaaagaagggctttattgtctttgtatccagacaattctagcctcatggaatgagttgaggagtgttccttcctcttctgtttttggaaaagcttttgaaagtccacagatgtggggatctcaagaagcaggcgttcctggaactgtttcccgttcctgtgcttctggtattgaaaaccattcatcacctgcctgaattcttcagtggtcttcaaagaaaagtaaataaaatgttaagaagcaaga

SEQ ID NO: 350306 - DNA, 1750 bp, Homo sapiens
cgggacaacagatgacccggagaccgggggaggaccttcccatgcgcacgactcgcgatcttcccagtgccccagagccacggacccaaccgccgcctaccccagcccgcggcaccaaacctgttcacaactgcgactccttaggtccgcttggacaccgccggaaacggaaattcaccctcgcgccgacccgccggaggaaacaaaaaggcagaaaaaaagggaccgccgcctggacgacttgcaggggacagctggaagaaagactcgtcaacggccgagtgctggcgccggcgccgtctgcgcagtgcgttccaccgggtccgcgtccctcccgattcagccccaccccgccctcggaatccgctgcctcagctcctgctgtggcactccccagcagcttgcacctcgctcgcggagtccttgctgaaggccagggcagctgtgcggcctggcgcgggttacttgatgccgtgcaaaagccaggagacacatttggttctggccgccccggagtcaccgtgcccggggcgaatggactatggctggattgggagtccacttcctcctctgtaaagatgacagacgagggagatctcgcgttctgggggtgccctatagccctcttttggccagaagcggtggatcacgcctgtaatcccagccctttgggaggccgaggcaggaggattgcttgagcccaggagttcaagaccaatctgggcaacatagggaggctacatctctcaaaaaataaataaataaataaataaataaataaataaataaataaataaataaataaaaataaagccagcgtcgtggcggggcgcctgtggtccctgtggtcccagctactctggaggctgaggcgggacgatcgcttgagcctgggaggcagaagttgtagtgagctgagatcgagccactgcactccagcctgggcgacagagcaagacactgtctcaaagaaaaataaataaataaaataaggccctctttttccgggaccaacagactctgagggcagggacaaactgacccagcctaaactgcctcgccttccctgctcccgggaaaggggttttccctgagggaaggtagcatcttgccattttcttcctgcacagctttgccttcccagggatccacccattgccacctgaggaaatgccttggagcccatctaatccccagcccagctacttgggacgcctacagagactacattgtcagaggatgcatcttcctctagtcttggagggtttcttttcaatatgatcccaccggtgcatgcaaggctcaattctacatcaaaaaactaggcccactcctgtcaccgagacccccaggcttcaggtcctgtcacagtgaccttgttatcacccccagcagcccccagatgtgccgtttgggggtgctaaagctggtgttaagatctatcccaagaactataccgataacgaactggaaaagatcacaaggaggttcaccatggagctagcaaagaagggctttattgtctttgtatccagacaattctagcctcatggaatgagttgaggagtgttccttcctcttctgtttttggaaaagcttttgaaagtccacagatgtggggatctcaagaagcaggcgttcctggaactgtttcccgttcctgtgcttctggtattgaaaaccattcatcacctgcctgaattcttcagtggtcttcaaagaaaagtaaataaaatgttaagaagcaaga

SEQ ID NO: 350307 - DNA, 404 bp, Homo sapiens
gttaatctgctagtgagaatttaagtggactcctggggtggagtattctacaatggatggaacttggattctgaagtcagtcagttctggttcaaatcccagttattccatttactagctgtgtcatgttgggcaagctatgtaacctccctaaatcgttgtttcctcacctagaatatgaatacaatattaatagtactggtataacagttgttctgagaattaaataagatattgcatataaagaacttagttcagagtaaacacattataaaattcaacacatgttagtccccatgattacaattcttttggagcacaaaataatcagagatatgtaaaaaagatggttgtgaagagatgtttatgtaccatttttataagagtaaaaagttggaaacaat

SEQ ID NO: 350308 - DNA, 865 bp, Homo sapiens
ttcagttatgtgcccagccataattttacagagcaaactgcggattacagtccaacaggatcagaaccagaatgtgcccccagcttgccagcagtcagcactgcctttcattgtaccttttcctgcctttggaagaaaaatcactgaatttgcagcaggccgcagtatatgatctaggggtttcacttaagtagttaactccgtggaagagcagagattgtattgatgaagatttttatcaaggaataggtaacttatatctccctctctctagacgataatcaaagcaaaacttcctccttttttcctgaatttacatctcttaccccagagtctaagagtaatagttttccaaaaaatacttctttcctaaagaactcaaaattcttgtttcccttagtcccaaagtattgggatctgccccttaaccccattagtattaatgtgagtttcaagcaaacatccactgtccacattaggtgacatacatcactgtggtactgtcttgtactttctctaacgttctcaaaatgtcatcttcagtaagaaaatggccaaagccctctgccacctcaacgtccctgtcactgtggtgctagatgctgctgtcgggggtgagtgcccatcttccccagccataatcacctcccccaccccatgctggcttacagcaagttttcagattgaaagtttgagtcccgttcataaagccacaccaggtagcgtcctacttcttaattaatagctgccctaaaccagcaagcttgttatgaggttgtgatagcatacaaagaagacagagctgtaggatgttggggagagtgggagttgtgtctatagctttatggctgtaagtgttgagttt

SEQ ID NO: 350309 - DNA, 1823 bp, Homo sapiens
atctgcggaagtggagtgcggggagtgcgccggaagaggggtacggaagtgcgccggaagtggggtgcggaggtgtgcagcgcgctgtcagactggctcgcaggcggcgcggccggcggacccgttcgagacagcgcgggcggctcgggtcccctggggctccgcagcaggaggacgccatggacgacaaggagttaattgaatactttaagtctcagatgaaagaagatcctgacatggcctcagcagtggctgccatccggacgttgctggagttcttgaagagagataaaggggagacaatccagggtctgagggcgaatctcaccagtgccatagaaaccctgtgtggtgtggactcctctgtggcagtgtcctctggcggggagctcttcctccgcttcatcagtcttgcctccctggaatactccgattactccaaatgtaaaaagatcatgattgagcggggagaactttttctcaggagaatatcactgtcaagaaacaaaattgcagatctgtgccatactttcatcaaagatggagcgacaatattgactcacgcctactccagagtggtcctgagagtcctggaagcagccgtggcggccaagaagcgatttagtgtatacgtcacagagtcacagcctgatttgtcaggtaagaaaatggccaaagccctctgccacctcaacgtccctgtcactgtggtgctagatgctgctgtcggctacatcatggagaaagcagatcttgtcatagttggtgctgaaggagttgttgaaaacggaggaattattaacaagattggaaccaaccagatggctgtgtgtgccaaagcacagaacaaacctttctatgtggttgcagaaagtttcaagtttgtccggctctttccactaaaccagcaagacgtcccagataagtttaagtataaggcagacactctcaaggtcgcgcagactggacaagacctcaaagaggagcatccgtgggtcgactacactgccccttccttaatcactctgctgtttacagacctgggcgtgctgacaccctcagcagtcagcgatgagctcatcaagctctatctgtaacctgtgagccctttcctgccaaggtgcagcttacgtagttgaggcagggtgagtagctgcttgacaccccagtgagtcaggccaaaactgagatgtgtttaatgaagatttatggagtaaggacttaaaatcatacatcttggagaacctttcttactcatttcagtcccatctaaaaatgtgtcagctattctaaatcccaacttaaattgttcttacggtttctagaaactttccttttcagtttccagaaatacaagttagataattggctacttaactgatgaaagatgagcccaagtccacctgtcttcatcctcccctgcactccagactgatctgcctaaagcacgcgagatgcaggcgaaaagcagccacacccctctgccacaaatgaccaacagctggtcaggacgttacacgcggtgccttgtaagaggcaagaaacacttgccgaatctgcatctggcttccagtggtaagcacattcctcagcaggatcaagccaaacagtaaaaactaccaagagaacacgaggaaggcagaaacgatgtttagcaacagtattctgcatggttcactgcttaagaaaatgccttctggaatatttgtaaactgaaattctgtatgtgtaagagatgtttaaatatgtttgggtcctaaacagctttttaaaattatacttgggaataaattcagcatcttttcaaataaactctatgaaag

SEQ ID NO: 350310 - DNA, 464 bp, Homo sapiens
tctagaggatcccgacacttgaaacgtaagacgtcccagataagtttaagtataaggcagacactctcaaggtcgcgcagactggacaagacctcaaagaggagcatccgtgggtcgactacactgccccttccttaatcactctgctgtttacagacctgggcgtgctgacaccctcagcagtcagcgatgagctcatcaagctctatctgtaacctgtgagccctttcctgccaaggtgcagcttacgtagttgaggcagggtgagtagctgcttgacaccccagtgagtcaggccaaaactgagatgtgtttaatgaagatttatggagtaaggacttaaaatcatacatcttggagaacctttcttactcatttcagtcccatctaaaaatgtgtcagctattctaaatcccaacttaaattgttcttacggtttcaagtgtcgggatcctctaggacac

SEQ ID NO: 350311 - DNA, 2937 bp, Homo sapiens
atctgcggaagtggagtgcggggagtgcgccggaagaggggtacggaagtgcgccggaagtggggtgcggaggtgtgcagcgcgctgtcagactggctcgcaggcggcgcggccggcggacccgttcgagacagcgcgggcggctcgggtcccctggggctccgcagcaggaggacgccatggacgacaaggagttaattgaatactttaagtctcagatgaaagaagatcctgacatggcctcagcagtggctgccatccggacgttgctggagttcttgaagagagataaaggggagacaatccagggtctgagggcgaatctcaccagtgccatagaaaccctgtgtggtgtggactcctctgtggcagtgtcctctggcggggagctcttcctccgcttcatcagtcttgcctccctggaatactccgattactccaaatgtaaaaagatcatgattgagcggggagaactttttctcaggagaatatcactgtcaagaaacaaaattgcagatctgtgccatactttcatcaaagatggagcgacaatattgactcacgcctactccagagtggtcctgagagtcctggaagcagccgtggcggccaagaagcgatttagtgtatacgtcacagagtcacagcctgatttgtcaggtaagaaaatggccaaagccctctgccacctcaacgtccctgtcactgtggtgctagatgctgctgtcggctacatcatggagaaagcagatcttgtcatagttggtgctgaaggagttgttgaaaacggaggaattattaacaagattggaaccaaccagatggctgtgtgtgccaaagcacagaacaaacctttctatgtggttgcagaaagtttcaagtttgtccggctctttccactaaaccagcaagacgtcccagataagtttaagtataaggcagacactctcaaggtcgcgcagactggacaagacctcaaagaggagcatccgtgggtcgactacactgccccttccttaatcactctgctgtttacagacctgggcgtgctgacaccctcagcagtcagcgatgagctcatcaagctctatctgtaacctgtgagccctttcctgccaaggtgcagcttacgtagttgaggcagggtgagtagctgcttgacaccccagtgagtcaggccaaaactgagatgtgtttaatgaagatttatggagtaaggacttaaaatcatacatcttggagaacctttcttactcatttcagtcccatctaaaaatgtgtcagctattctaaatcccaacttaaattgttcttacggtttctagaaactttccttttcagtttccagaaatacaagttagataattggctacttaactgatgaaagatgagcccaagtccacctgtcttcatcctcccctgcactccagactgatctgcctaaagcacgcgagatgcaggcgaaaagcagccacacccctctgccacaaatgaccaacagctggtcaggacgttacacgcggtgccttgtaagaggcaagaaacacttgccgaatctgcatctggcttccagtggtaagcacattcctcagcaggatcaagccaaacagtaaaaactaccaagagaacacgaggaaggcagaaacgatgtttagcaacagtattctgcatggttcactgcttaagaaaatgccttctggaatatttgtaaactgaaattctgtatgtgtaagagatgtttaaatatgtttgggtcctaaacagctttttaaaattatacttgggaataaattcagcatcttttcaaataaactctatgaaagacgctgatgtggtgttgcatcaatactgcaagctgaccaggccatctaggggaaaacactgtccagctacatttacacacttaagacccaggcaatcaggacaccatttattcaacaggaggcataaaaactataattctctttcccggaatatgacttaatccctctgtttttcagctattcaccaataaaacaatactgtgactattaacacagaaaaaccccagcacattagccacccctgcaggacatcaaaggataactgaagcccagggccaagcacattcaggaggtcaaatgcctgaagatactgaggaatggttttgaaaatcagaagtcaagaagacttctgtatctttatgtttaaaaataactataaaatagcctcagaaaaaagagcttttatatatatatatatatatatatatatatatatatatatatatatataatatgtacatatgtctatatgtgacccatcatgataaatactgacatctattatttacactcaaataattttacattttcttctgttagactactccaagactggaattgttttgttttgttgtttttaatgagagggtctcgctgtgttcccaggctggtcttgaactcctgggctcaagtgatcctcctgcctcagcctcccaaagtgctgggattataggcaggagccaccgcacccggccaagactggaatgtttttagtaaaatattctgaagtgtgaaatccttcatttctccctcatctgaaaggacagctttcagagacatcattcttttcagatgtctcctgaagttgtgattttcgttaaaagcaaactggagccatccaccaagttagggaacagctatgtccttgtgggttcatctgtggcactggaatcagcagtcatcttccaaatctgagatccctaaatccactgtcttgattgttcttttgccagttgtcaacaagcccttctcaaattcttcttcagttattttgcctttcttaagttttttcaagagtcttgtgtcattaagaagttcttccatgtcctcatcttcaatatcagaaccgaagaatttgagaagtccagtaaccgggggcctctagagcgccgca

SEQ ID NO: 350312 - DNA, 1844 bp, Homo sapiens
atctgcggaagtggagtgcggggagtgcgccggaagaggggtacggaagtgcgccggaagtggggtgcggaggtgtgcagcgcgctgtcagactggctcgcaggcggcgcggccggcggacccgttcgagacagcgcgggcggctcgggtcccctggggctccgcagcaggaggacgccatggacgacaaggagttaattgaatactttaagtctcagatgaaagaagatcctgacatggcctcagcagtggctgccatccggacgttgctggagttcttgaagagagataaaggggagacaatccagggtctgagggcgaatctcaccagtgccatagaaaccctgtgtggtgtggactcctctgtggcagtgtcctctggcggggagctcttcctccgcttcatcagtcttgcctccctggaatactccgattactccaaatgtaaaaagatcatgattgagcggggagaactttttctcaggagaatatcactgtcaagaaacaaaattgcagatctgtgccatactttcatcaaagatggagcgacaatattgactcacgcctactccagagtggtcctgagagtcctggaagcagccgtggcggccaagaagcgatttagtgtatacgtcacagagtcacagcctgatttgtcaggtaagaaaatggccaaagccctctgccacctcaacgtccctgtcactgtggtgctagatgctgctgtcggctacatcatggagaaagcagatcttgtcatagttggtgctgaaggagttgttgaaaacggaggaattattaacaagattggaaccaaccagatggctgtgtgtgccaaagcacagaacaaacctttctatgtggttgcagaaagtttcaagtttgtccggctctttccactaaaccagcaagacgtcccagataagtttaagtataaggcagacactctcaaggtcgcgcagactggacaagacctcaaagaggagcatccgtgggtcgactacactgccccttccttaatcactctgctgtttacagacctgggcgtgctgacaccctcagcagtcagcgatgagctcatcaagctctatctgtaacctgtgagccctttcctgccaaggtgcagcttacgtagttgaggcagggtgagtagctgcttgacaccccagtgagtcaggccaaaactgagatgtgtttaatgaagatttatggagtaaggacttaaaatcatacatcttggagaacctttcttactcatttcagtcccatctaaaaatgtgtcagctattctaaatcccaacttaaattgttcttacggtttctagaaactttccttttcagtttccagaaatacaagttagataattggctacttaactgatgaaagatgagcccaagtccacctgtcttcatcctcccctgcactccagactgatctgcctaaagcacgcgagatgcaggcgaaaagcagccacacccctctgccacaaatgaccaacagctggtcaggacgttacacgcggtgccttgtaagaggcaagaaacacttgccgaatctgcatctggcttccagtggtaagcacattcctcagcaggatcaagccaaacagtaaaaactaccaagagaacacgaggaaggcagaaacgatgtttagcaacagtattctgcatggttcactgcttaagaaaatgccttctggaatatttgtaaactgaaattctgtatgtgtaagagatgtttaaatatgtttgggtcctaaacagctttttaaaattatacttgggaataaattcagcatcttttcaaataaactctatgaaagccaaaaaaaaaaaaaccaaac

SEQ ID NO: 350313 - DNA, 2178 bp, Homo sapiens
  misc_feature (13)..(14): n is a, c, g, or t
  misc_feature (18)..(18): n is a, c, g, or t
cttgtttgctggnntaanatgttgaaaacggaggaattattaacaagattggaaccaaccagatggctgtgtgtgccaaagcacagaacaaacctttctatgtggttgcagaaagtttcaagtttgtccggctctttccactaaaccagcaagacgtcccagataagtttaagtataaggcagacactctcaaggtcgcgcagactggacaagacctcaaagaggagcatccgtgggtcgactacactgccccttccttaatcactctgctgtttacagacctgggcgtgctgacaccctcagcagtcagcgatgagctcatcaagctctatctgtaacctgtgagccctttcctgccaaggtgcagcttacgtagttgaggcagggtgagtagctgcttgacaccccagtgagtcaggccaaaactgagatgtgtttaatgaagatttatggagtaaggacttaaaatcatacatcttggagaacctttcttactcatttcagtcccatctaaaaatgtgtcagctattctaaatcccaacttaaattgttcttacggtttctagaaactttccttttcagtttccagaaatacaagttagataattggctacttaactgatgaaagatgagcccaagtccacctgtcttcatcctcccctgcactccagactgatctgcctaaagcacgcgagatgcaggcgaaaagcagccacacccctctgccacaaatgaccaacagctggtcaggacgttacacgcggtgccttgtaagaggcaagaaacacttgccgaatctgcatctggcttccagtggtaagcacattcctcagcaggatcaagccaaacagtaaaaactaccaagagaacacgaggaaggcagaaacgatgtttagcaacagtattctgcatggttcactgcttaagaaaatgccttctggaatatttgtaaactgaaattctgtatgtgtaagagatgtttaaatatgtttgggtcctaaacagctttttaaaattatacttgggaataaattcagcatcttttcaaataaactctatgaaagacgctgatgtggtgttgcatcaatactgcaagctgaccaggccatctaggggaaaacactgtccagctacatttacacacttaagacccaggcaatcaggacaccatttattcaacaggaggcataaaaactataattctctttcccggaatatgacttaatccctctgtttttcagctattcaccaataaaacaatactgtgactattaacacagaaaaaccccagcacattagccacccctgcaggacatcaaaggataactgaagcccagggccaagcacattcaggaggtcaaatgcctgaagatactgaggaatggttttgaaaatcagaagtcaagaagacttctgtatctttatgtttaaaaataactataaaatagcctcagaaaaaagagcttttatatatatatatatatatatatatatatatatatatatatatatataatatgtacatatgtctatatgtgacccatcatgataaatactgacatctattatttacactcaaataattttacattttcttctgttagactactccaagactggaattgttttgttttgttgtttttaatgagagggtctcgctgtgttcccaggctggtcttgaactcctgggctcaagtgatcctcctgcctcagcctcccaaagtgctgggattataggcaggagccaccgcacccggccaagactggaatgtttttagtaaaatattctgaagtgtgaaatccttcatttctccctcatctgaaaggacagctttcagagacatcattcttttcagatgtctcctgaagttgtgattttcgttaaaagcaaactggagccatccaccaagttagggaacagctatgtccttgtgggttcatctgtggcactggaatcagcagtcatcttccaaatctgagatccctaaatccactgtcttgattgttcttttgccagttgtcaacaagcccttctcaaattcttcttcagttattttgcctttcttaagttttttcaagagtcttgtgtcattaagaagttcttccatgtcctcatcttcaatatcagaaccgaagaatttgagaagtccagtaaccgggggcctctagagcgccgca

SEQ ID NO: 350314 - DNA, 1346 bp, Homo sapiens
atctgcggaagtggagtgcggggagtgcgccggaagaggggtacggaagtgcgccggaagtggggtgcggaggtgtgcagcgcgctgtcagactggctcgcaggcggcgcggccggcggacccgttcgagacagcgcgggcggctcgggtcccctggggctccgcagcaggaggacgccatggacgacaaggagttaattgaatactttaagtctcagatgaaagaagatcctgacatggcctcagcagtggctgccatccggacgttgctggagttcttgaagagagataaaggggagacaatccagggtctgagggcgaatctcaccagtgccatagaaaccctgtgtggtgtggactcctctgtggcagtgtcctctggcggggagctcttcctccgcttcatcagtcttgcctccctggaatactccgattactccaaatgtaaaaagatcatgattgagcggggagaactttttctcaggagaatatcactgtcaagaaacaaaattgcagatctgtgccatactttcatcaaagatggagcgacaatattgactcacgcctactccagagtggtcctgagagtcctggaagcagccgtggcggccaagaagcgatttagtgtatacgtcacagagtcacagcctgatttgtcaggtaagaaaatggccaaagccctctgccacctcaacgtccctgtcactgtggtgctagatgctgctgtcggctacatcatggagaaagcagatcttgtcatagttggtgctgaaggagttgttgaaaacggaggaattattaacaagattggaaccaaccagatggctgtgtgtgccaaagcacagaacaaacctttctatgtggttgcagaaagtttcaagtttgtccggctctttccactaaaccagcaagacgtcccagataagtttaagtataaggcagacactctcaaggtcgcgcagactggacaagacctcaaagaggagcatccgtgggtcgactacactgccccttccttaatcactctgctgtttacagacctgggcgtgctgacaccctcagcagtcagcgatgagctcatcaagctctatctgtaacctgtgagccctttcctgccaaggtgcagcttacgtagttgaggcagggtgagtagctgcttgacaccccagtgagtcaggccaaaactgagatgtgtttaatgaagatttatggagtaaggacttaaaatcatacatcttggagaacctttcttactcatttcagtcccatctaaaaatgtgtcagctattctaaatcccaacttaaattgttcttacggtttcaagtgtcgggatcctctaggacac

SEQ ID NO: 350315 - DNA, 2652 bp, Homo sapiens
atctgcggaagtggagtgcggggagtgcgccggaagaggggtacggaagtgcgccggaagtggggtgcggaggtgtgcagcgcgctgtcagactggctcgcaggcggcgcggccggcggacccgttcgagacagcgcgggcggctcgggtcccctggggctccgcagcaggaggacgccatggacgacaaggagttaattgaatactttaagtctcagatgaaagaagatcctgacatggcctcagcagtggctgccatccggacgttgctggagttcttgaagagagataaaggggagacaatccagggtctgagggcgaatctcaccagtgccatagaaaccctgtgtggtgtggactcctctgtggcagtgtcctctggcggggagctcttcctccgcttcatcagtcttgcctccctggaatactccgattactccaaatgtaaaaagatcatgattgagcggggagaactttttctcaggagaatatcactgtcaagaaacaaaattgcagatctgtgccatactttcatcaaagatggagcgacaatattgactcacgcctactccagagtggtcctgagagtcctggaagcagccgtggcggccaagaagcgatttagtgtatacgtcacagagtcacagcctgatttgtcaggtaagaaaatggccaaagccctctgccacctcaacgtccctgtcactgtggtgctagatgctgctgtcggctacatcatggagaaagcagatcttgtcatagttggtgctgaaggagttgttgaaaacggaggaattattaacaagattggaaccaaccagatggctgtgtgtgccaaagcacagaacaaacctttctatgtggttgcagaaagtttcaagtttgtccggctctttccactaaaccagcaagacgtcccagataagtttaagtataaggcagacactctcaaggtcgcgcagactggacaagacctcaaagaggagcatccgtgggtcgactacactgccccttccttaatcactctgctgtttacagacctgggcgtgctgacaccctcagcagtcagcgatgagctcatcaagctctatctgtaacctgtgagccctttcctgccaaggtgcagcttacgtagttgaggcaggactgatctgcctaaagcacgcgagatgcaggcgaaaagcagccacacccctctgccacaaatgaccaacagctggtcaggacgttacacgcggtgccttgtaagaggcaagaaacacttgccgaatctgcatctggcttccagtggtaagcacattcctcagcaggatcaagccaaacagtaaaaactaccaagagaacacgaggaaggcagaaacgatgtttagcaacagtattctgcatggttcactgcttaagaaaatgccttctggaatatttgtaaactgaaattctgtatgtgtaagagatgtttaaatatgtttgggtcctaaacagctttttaaaattatacttgggaataaattcagcatcttttcaaataaactctatgaaagacgctgatgtggtgttgcatcaatactgcaagctgaccaggccatctaggggaaaacactgtccagctacatttacacacttaagacccaggcaatcaggacaccatttattcaacaggaggcataaaaactataattctctttcccggaatatgacttaatccctctgtttttcagctattcaccaataaaacaatactgtgactattaacacagaaaaaccccagcacattagccacccctgcaggacatcaaaggataactgaagcccagggccaagcacattcaggaggtcaaatgcctgaagatactgaggaatggttttgaaaatcagaagtcaagaagacttctgtatctttatgtttaaaaataactataaaatagcctcagaaaaaagagcttttatatatatatatatatatatatatatatatatatatatatatatataatatgtacatatgtctatatgtgacccatcatgataaatactgacatctattatttacactcaaataattttacattttcttctgttagactactccaagactggaattgttttgttttgttgtttttaatgagagggtctcgctgtgttcccaggctggtcttgaactcctgggctcaagtgatcctcctgcctcagcctcccaaagtgctgggattataggcaggagccaccgcacccggccaagactggaatgtttttagtaaaatattctgaagtgtgaaatccttcatttctccctcatctgaaaggacagctttcagagacatcattcttttcagatgtctcctgaagttgtgattttcgttaaaagcaaactggagccatccaccaagttagggaacagctatgtccttgtgggttcatctgtggcactggaatcagcagtcatcttccaaatctgagatccctaaatccactgtcttgattgttcttttgccagttgtcaacaagcccttctcaaattcttcttcagttattttgcctttcttaagttttttcaagagtcttgtgtcattaagaagttcttccatgtcctcatcttcaatatcagaaccgaagaatttgagaagtccagtaaccgggggcctctagagcgccgca

SEQ ID NO: 350316 - DNA, 2055 bp, Homo sapiens
tctagaggatcccgacacttgaaacgtaagacgtcccagataagtttaagtataaggcagacactctcaaggtcgcgcagactggacaagacctcaaagaggagcatccgtgggtcgactacactgccccttccttaatcactctgctgtttacagacctgggcgtgctgacaccctcagcagtcagcgatgagctcatcaagctctatctgtaacctgtgagccctttcctgccaaggtgcagcttacgtagttgaggcagggtgagtagctgcttgacaccccagtgagtcaggccaaaactgagatgtgtttaatgaagatttatggagtaaggacttaaaatcatacatcttggagaacctttcttactcatttcagtcccatctaaaaatgtgtcagctattctaaatcccaacttaaattgttcttacggtttctagaaactttccttttcagtttccagaaatacaagttagataattggctacttaactgatgaaagatgagcccaagtccacctgtcttcatcctcccctgcactccagactgatctgcctaaagcacgcgagatgcaggcgaaaagcagccacacccctctgccacaaatgaccaacagctggtcaggacgttacacgcggtgccttgtaagaggcaagaaacacttgccgaatctgcatctggcttccagtggtaagcacattcctcagcaggatcaagccaaacagtaaaaactaccaagagaacacgaggaaggcagaaacgatgtttagcaacagtattctgcatggttcactgcttaagaaaatgccttctggaatatttgtaaactgaaattctgtatgtgtaagagatgtttaaatatgtttgggtcctaaacagctttttaaaattatacttgggaataaattcagcatcttttcaaataaactctatgaaagacgctgatgtggtgttgcatcaatactgcaagctgaccaggccatctaggggaaaacactgtccagctacatttacacacttaagacccaggcaatcaggacaccatttattcaacaggaggcataaaaactataattctctttcccggaatatgacttaatccctctgtttttcagctattcaccaataaaacaatactgtgactattaacacagaaaaaccccagcacattagccacccctgcaggacatcaaaggataactgaagcccagggccaagcacattcaggaggtcaaatgcctgaagatactgaggaatggttttgaaaatcagaagtcaagaagacttctgtatctttatgtttaaaaataactataaaatagcctcagaaaaaagagcttttatatatatatatatatatatatatatatatatatatatatatatataatatgtacatatgtctatatgtgacccatcatgataaatactgacatctattatttacactcaaataattttacattttcttctgttagactactccaagactggaattgttttgttttgttgtttttaatgagagggtctcgctgtgttcccaggctggtcttgaactcctgggctcaagtgatcctcctgcctcagcctcccaaagtgctgggattataggcaggagccaccgcacccggccaagactggaatgtttttagtaaaatattctgaagtgtgaaatccttcatttctccctcatctgaaaggacagctttcagagacatcattcttttcagatgtctcctgaagttgtgattttcgttaaaagcaaactggagccatccaccaagttagggaacagctatgtccttgtgggttcatctgtggcactggaatcagcagtcatcttccaaatctgagatccctaaatccactgtcttgattgttcttttgccagttgtcaacaagcccttctcaaattcttcttcagttattttgcctttcttaagttttttcaagagtcttgtgtcattaagaagttcttccatgtcctcatcttcaatatcagaaccgaagaatttgagaagtccagtaaccgggggcctctagagcgccgca

SEQ ID NO: 350317 - DNA, 1747 bp, Homo sapiens
gcagataatagtaagtaaggactccaaatcatacattctagagagaaccctaactcactcagtactattccatctaggagtcgagtcgcctacacggagatcccctataatactgagctgcaagggttgcctagcaaggtatcgttcgcagtttccagaaatacaagttagataattggctacttaactgatgaaagatgagcccaagtccacctgtcttcatcctcccctgcactccagactgatctgcctaaagcacgcgagatgcaggcgaaaagcagccacacccctctgccacaaatgaccaacagctggtcaggacgttacacgcggtgccttgtaagaggcaagaaacacttgccgaatctgcatctggcttccagtggtaagcacattcctcagcaggatcaagccaaacagtaaaaactaccaagagaacacgaggaaggcagaaacgatgtttagcaacagtattctgcatggttcactgcttaagaaaatgccttctggaatatttgtaaactgaaattctgtatgtgtaagagatgtttaaatatgtttgggtcctaaacagctttttaaaattatacttgggaataaattcagcatcttttcaaataaactctatgaaagacgctgatgtggtgttgcatcaatactgcaagctgaccaggccatctaggggaaaacactgtccagctacatttacacacttaagacccaggcaatcaggacaccatttattcaacaggaggcataaaaactataattctctttcccggaatatgacttaatccctctgtttttcagctattcaccaataaaacaatactgtgactattaacacagaaaaaccccagcacattagccacccctgcaggacatcaaaggataactgaagcccagggccaagcacattcaggaggtcaaatgcctgaagatactgaggaatggttttgaaaatcagaagtcaagaagacttctgtatctttatgtttaaaaataactataaaatagcctcagaaaaaagagcttttatatatatatatatatatatatatatatatatatatatatatatataatatgtacatatgtctatatgtgacccatcatgataaatactgacatctattatttacactcaaataattttacattttcttctgttagactactccaagactggaattgttttgttttgttgtttttaatgagagggtctcgctgtgttcccaggctggtcttgaactcctgggctcaagtgatcctcctgcctcagcctcccaaagtgctgggattataggcaggagccaccgcacccggccaagactggaatgtttttagtaaaatattctgaagtgtgaaatccttcatttctccctcatctgaaaggacagctttcagagacatcattcttttcagatgtctcctgaagttgtgattttcgttaaaagcaaactggagccatccaccaagttagggaacagctatgtccttgtgggttcatctgtggcactggaatcagcagtcatcttccaaatctgagatccctaaatccactgtcttgattgttcttttgccagttgtcaacaagcccttctcaaattcttcttcagttattttgcctttcttaagttttttcaagagtcttgtgtcattaagaagttcttccatgtcctcatcttcaatatcagaaccgaagaatttgagaagtccagtaaccgggggcctctagagcgccgca

SEQ ID NO: 350318 - DNA, 1150 bp, Homo sapiens
atctgcggaagtggagtgcggggagtgcgccggaagaggggtacggaagtgcgccggaagtggggtgcggaggtgtgcagcgcgctgtcagactggctcgcaggcggcgcggccggcggacccgttcgagacagcgcgggcggctcgggtcccctggggctccgcagcaggaggacgccatggacgacaaggagttaattgaatactttaagtctcagatgaaagaagatcctgacatggcctcagcagtggctgccatccggacgttgctggagttcttgaagagagataaaggggagacaatccagggtctgagggcgaatctcaccagtgccatagaaaccctgtgtggtgtggactcctctgtggcagtgtcctctggcggggagctcttcctccgcttcatcagtcttgcctccctggaatactccgattactccaaatgtaaaaagatcatgattgagcggggagaactttttctcaggagaatatcactgtcaagaaacaaaattgcagatctgtgccatactttcatcaaagatggagcgacaatattgactcacgcctactccagagtggtcctgagagtcctggaagcagccgtggcggccaagaagcgatttagtgtatacgtcacagagtcacagcctgatttgtcaggtaagaaaatggccaaagccctctgccacctcaacgtccctgtcactgtggtgctagatgctgctgtcggctgtcttcatcctcccctgcactccagactgatctgcctaaagcacgcgagatgcaggcgaaaagcagccacacccctctgccacaaatgaccaacagctggtcaggacgttacacgcggtgccttgtaagaggcaagaaacacttgccgaatctgcatctggcttccagtggtaagcacattcctcagcaggatcaagccaaacagtaaaaactaccaagagaacacgaggaaggcagaaacgatgtttagcaacagtattctgcatggttcactgcttaagaaaatgccttctggaatatttgtaaactgaaattctgtatgtgtaagagatgtttaaatatgtttgggtcctaaacagctttttaaaattatacttgggaataaattcagcatcttttcaaataaactctatgaaag

SEQ ID NO: 350319 - DNA, 1672 bp, Homo sapiens
atctgcggaagtggagtgcggggagtgcgccggaagaggggtacggaagtgcgccggaagtggggtgcggaggtgtgcagcgcgctgtcagactggctcgcaggcggcgcggccggcggacccgttcgagacagcgcgggcggctcgggtcccctggggctccgcagcaggaggacgccatggacgacaaggagttaattgaatactttaagtctcagatgaaagaagatcctgacatggcctcagcagtggctgccatccggacgttgctggagttcttgaagagagataaaggggagacaatccagggtctgagggcgaatctcaccagtgccatagaaaccctgtgtggtgtggactcctctgtggcagtgtcctctggcggggagctcttcctccgcttcatcagtcttgcctccctggaatactccgattactccaaatgtaaaaagatcatgattgagcggggagaactttttctcaggagaatatcactgtcaagaaacaaaattgcagatctgtgccatactttcatcaaagatggagcgacaatattgactcacgcctactccagagtggtcctgagagtcctggaagcagccgtggcggccaagaagcgatttagtgtatacgtcacagagtcacagcctgatttgtcaggtaagaaaatggccaaagccctctgccacctcaacgtccctgtcactgtggtgctagatgctgctgtcggctacatcatggagaaagcagatcttgtcatagttggtgctgaaggagttgttgaaaacggaggaattattaacaaggtaagagcatcagttctccccagttccctgctcaagacttggaggtgtcttgctgacctaggacaccacagcagtgttgattatggttccttctaatcctgcttcacttcaggacttcatcatggtattgagttgttgcccatttcccgtaagtcatagcaatgggcagtccagtttcagtcaaatcttttttagattgatctacataaatgaagacaatgtaatttggtcaggtgtgatgccttatacctgtaatcctagcaatttgagaggccagggtgggaggatcacttgaggccttgagttcaagaccagcctgggcaacatagtgaaaccctgtctctacaaaaaattagaaaaattagctgggcgtggtggtgcttgcctgtagttccagctgcccaggaagctgaggcaggagtatcacgtgagcccaggaatttgaggttgcagtaagttatgatcacactactgcattccagcctgggcgatggtgagaccctgtctcagtaaaaaaaaaaaaaaaaaaagtgtaatttatatttatacaaaattggcttgaattggaattgggattacaggcgtgagccaccacatccagcctctagtggctgtttctatatcctttgagaaacatttatttttttgattccaaagtcagaattagatatatctaatatatgtattagatatatgtatatctatattatatacataactttctattgctgttttttaattgttcctttattgtaattgagacgaggtctcaccgtgttgcctaggctggtcccaaactcatgggttcaggtgatccacccacctcggcctcccaaaatgctggaatacaggcatgcaccactgtg

SEQ ID NO: 350320 - DNA, 983 bp, Homo sapiens
atctgcggaagtggagtgcggggagtgcgccggaagaggggtacggaagtgcgccggaagtggggtgcggaggtgtgcagcgcgctgtcagactggctcgcaggcggcgcggccggcggacccgttcgagacagcgcgggcggctcgggtcccctggggctccgcagcaggaggacgccatggacgacaaggagttaattgaatactttaagtctcagatgaaagaagatcctgacatggcctcagcagtggctgccatccggacgttgctggagttcttgaagagagataaaggggagacaatccagggtctgagggcgaatctcaccagtgccatagaaaccctgtgtggtgtggactcctctgtggcagtgtcctctggcggggagctcttcctccgcttcatcagtcttgcctccctggaatactccgattactccaaatgtaaaaagatcatgattgagcggggagaactttttctcaggagaatatcactgtcaagaaacaaaattgcagatctgtgccatactttcatcaaagatggagcgacaatattgactcacgcctactccagagtggtcctgagagtcctggaagcagccgtggcggccaagaagcgatttagtgtatacgtcacagagtcacagcctgatttgtcaggtaagaaaatggccaaagccctctgccacctcaacgtccctgtcactgtggtgctagatgctgctgtcgggggtgagtgcccatcttccccagccataatcacctcccccaccccatgctggcttacagcaagttttcagattgaaagtttgagtcccgttcataaagccacaccaggtagcgtcctacttcttaattaatagctgccctaaaccagcaagcttgttatgaggttgtgatagcatacaaagaagacagagctgtaggatgttggggagagtgggagttgtgtctatagctttatggctgtaagtgttgagttt

SEQ ID NO: 350321 - DNA, 558 bp, Homo sapiens
tgtaccatcaggtctcctttctggttgtggttgatttgtgagaaagtgtacagagatgcttagggtgtcgggaacacgtgccgcagtgcagagggtgtgagtgagcagcaaggagcctgcccctttgacaaagctttctcggtccacagacaatattgactcacgcctactccagagtggtcctgagagtcctggaagcagccgtggcggccaagaagcgatttagtgtatacgtcacagagtcacagcctgatttgtcagggcaagtacctttctgttcagttatgtgcccagccataattttacagagcaaactgcggattacagtccaacaggatcagaaccagaatgtgcccccagcttgccagcagtcagcactgcctttcattgtaccttttcctgcctttggaagaaaaatcactgaatttgcagcaggccgcagtatatgatctaggggtttcacttaagtagttaactccgtggaagagcagagattgtattgatgaagatttttatcaaggaataggtaacttatatctccctctctctagacgataa

SEQ ID NO: 350322 - DNA, 464 bp, Homo sapiens
cgggcgtagtagctcacacctgtaatcccagcactttgggaggccaagactggaatgtttttagtaaaatattctgaagtgtgaaatccttcatttctccctcatctgaaaggacagctttcagagacatcattcttttcagatgtctcctgaagttgtgattttcgttaaaagcaaactggagccatccaccaagttagggaacagctatgtccttgtgggttcatctgtggcactggaatcagcagtcatcttccaaatctgagatccctaaatccactgtcttgattgttcttttgccagttgtcaacaagcccttctcaaattcttcttcagttattttgcctttcttaagttttttcaagagtcttgtgtcattaagaagttcttccatgtcctcatcttcaatatcagaaccgaagaatttgagaagtccagtaaccgggggcctctagagcgccgca

SEQ ID NO: 350323 - DNA, 2920 bp, Homo sapiens
atctgcggaagtggagtgcggggagtgcgccggaagaggggtacggaagtgcgccggaagtggggtgcggaggtgtgcagcgcgctgtcagactggctcgcaggcggcgcggccggcggacccgttcgagacagcgcgggcggctcgggtcccctggggctccgcagcaggaggacgccatggacgacaaggagttaattgaatactttaagtctcagatgaaagaagatcctgacatggcctcagcagtggctgccatccggacgttgctggagttcttgaagagagataaaggggagacaatccagggtctgagggcgaatctcaccagtgccatagaaaccctgtgtggtgtggactcctctgtggcagtgtcctctggcggggagctcttcctccgcttcatcagtcttgcctccctggaatactccgattactccaaatgtaaaaagatcatgattgagcggggagaactttttctcaggagaatatcactgtcaagaaacaaaattgcagatctgtgccatactttcatcaaagatggagcgacaatattgactcacgcctactccagagtggtcctgagagtcctggaagcagccgtggcggccaagaagcgatttagtgtatacgtcacagagtcacagcctgatttgtcaggtaagaaaatggccaaagccctctgccacctcaacgtccctgtcactgtggtgctagatgctgctgtcggctacatcatggagaaagcagatcttgtcatagttggtgctgaaggagttgttgaaaacggaggaattattaacaagattggaaccaaccagatggctgtgtgtgccaaagcacagaacaaacctttctatgtggttgcagaaagtttcaagtttgtccggctctttccactaaaccagcaagacgtcccagataagtttaagtataaggcagacactctcaaggtcgcgcagactggacaagacctcaaagaggagcatccgtgggtcgactacactgccccttccttaatcactctgctgtttacagacctgggcgtgctgacaccctcagcagtcagcgatgagctcatcaagctctatctgtaacctgtgagccctttcctgccaaggtgcagcttacgtagttgaggcagggtgagtagctgcttgacaccccagtgagtcaggccaaaactgagatgtgtttaatgaagatttatggagtaaggacttaaaatcatacatcttggagaacctttcttactcatttcagtcccatctaaaaatgtgtcagctattctaaatcccaacttaaattgttcttacggtttctagaaactttccttttcagtttccagaaatacaagttagataattggctacttaactgatgaaagatgagcccaagtccacctgtcttcatcctcccctgcactccagactgatctgcctaaagcacgcgagatgcaggcgaaaagcagccacacccctctgccacaaatgaccaacagctggtcaggacgttacacgcggtgccttgtaagaggcaagaaacacttgccgaatctgcatctggcttccagtggtaagcacattcctcagcaggatcaagccaaacagtaaaaactaccaagagaacacgaggaaggcagaaacgatgtttagcaacagtattctgcatggttcactgcttaagaaaatgccttctggaatatttgtaaactgaaattctgtatgtgtaagagatgtttaaatatgtttgggtcctaaacagctttttaaaattatacttgggaataaattcagcatcttttcaaataaactctatgaaagacgctgatgtggtgttgcatcaatactgcaagctgaccaggccatctaggggaaaacactgtccagctacatttacacacttaagacccaggcaatcaggacaccatttattcaacaggaggcataaaaactataattctctttcccggaatatgacttaatccctctgtttttcagctattcaccaataaaacaatactgtgactattaacacagaaaaaccccagcacattagccacccctgcaggacatcaaaggataactgaagcccagggccaagcacattcaggaggtcaaatgcctgaagatactgaggaatggttttgaaaatcagaagtcaagaagacttctgtatctttatgtttaaaaataactataaaatagcctcagaaaaaagagctttttatatatatatatatatatatatatatataatatgtacatatgtctatatgtgacccatcatgataaatactgacatctattatttacactcaaataattttacattttcttctgttagactactccaagactggaattgttttgttttgttgtttttaatgagagggtctcgctgtgttcccaggctggtcttgaactcctgggctcaagtgatcctcctgcctcagcctcccaaagtgctgggattataggcaggagccaccgcacccggccaagactggaatgtttttagtaaaatattctgaagtgtgaaatccttcatttctccctcatctgaaaggacagctttcagagacatcattcttttcagatgtctcctgaagttgtgattttcgttaaaagcaaactggagccatccaccaagttagggaacagctatgtccttgtgggttcatctgtggcactggaatcagcagtcatcttccaaatctgagatccctaaatccactgtcttgattgttcttttgccagttgtcaacaagcccttctcaaattcttcttcagttattttgcctttcttaagttttttcaagagtcttgtgtcattaagaagttcttccatgtcctcatcttcaatatcagaaccgaagaatttgagaagtccagtaaccgggggcctctagagcgccgca

SEQ ID NO: 350324 - DNA, 2819 bp, Homo sapiens
ttcagttatgtgcccagccataattttacagagcaaactgcggattacagtccaacaggatcagaaccagaatgtgcccccagcttgccagcagtcagcactgcctttcattgtaccttttcctgcctttggaagaaaaatcactgaatttgcagcaggccgcagtatatgatctaggggtttcacttaagtagttaactccgtggaagagcagagattgtattgatgaagatttttatcaaggaataggtaacttatatctccctctctctagacgataatcaaagcaaaacttcctccttttttcctgaatttacatctcttaccccagagtctaagagtaatagttttccaaaaaatacttctttcctaaagaactcaaaattcttgtttcccttagtcccaaagtattgggatctgccccttaaccccattagtattaatgtgagtttcaagcaaacatccactgtccacattaggtgacatacatcactgtggtactgtcttgtactttctctaacgttctcaaaatgtcatcttcagtaagaaaatggccaaagccctctgccacctcaacgtccctgtcactgtggtgctagatgctgctgtcggctacatcatggagaaagcagatcttgtcatagttggtgctgaaggagttgttgaaaacggaggaattattaacaagattggaaccaaccagatggctgtgtgtgccaaagcacagaacaaacctttctatgtggttgcagaaagtttcaagtttgtccggctctttccactaaaccagcaagacgtcccagataagtttaagtataaggcagacactctcaaggtcgcgcagactggacaagacctcaaagaggagcatccgtgggtcgactacactgccccttccttaatcactctgctgtttacagacctgggcgtgctgacaccctcagcagtcagcgatgagctcatcaagctctatctgtaacctgtgagccctttcctgccaaggtgcagcttacgtagttgaggcagggtgagtagctgcttgacaccccagtgagtcaggccaaaactgagatgtgtttaatgaagatttatggagtaaggacttaaaatcatacatcttggagaacctttcttactcatttcagtcccatctaaaaatgtgtcagctattctaaatcccaacttaaattgttcttacggtttctagaaactttccttttcagtttccagaaatacaagttagataattggctacttaactgatgaaagatgagcccaagtccacctgtcttcatcctcccctgcactccagactgatctgcctaaagcacgcgagatgcaggcgaaaagcagccacacccctctgccacaaatgaccaacagctggtcaggacgttacacgcggtgccttgtaagaggcaagaaacacttgccgaatctgcatctggcttccagtggtaagcacattcctcagcaggatcaagccaaacagtaaaaactaccaagagaacacgaggaaggcagaaacgatgtttagcaacagtattctgcatggttcactgcttaagaaaatgccttctggaatatttgtaaactgaaattctgtatgtgtaagagatgtttaaatatgtttgggtcctaaacagctttttaaaattatacttgggaataaattcagcatcttttcaaataaactctatgaaagacgctgatgtggtgttgcatcaatactgcaagctgaccaggccatctaggggaaaacactgtccagctacatttacacacttaagacccaggcaatcaggacaccatttattcaacaggaggcataaaaactataattctctttcccggaatatgacttaatccctctgtttttcagctattcaccaataaaacaatactgtgactattaacacagaaaaaccccagcacattagccacccctgcaggacatcaaaggataactgaagcccagggccaagcacattcaggaggtcaaatgcctgaagatactgaggaatggttttgaaaatcagaagtcaagaagacttctgtatctttatgtttaaaaataactataaaatagcctcagaaaaaagagcttttatatatatatatatatatatatatatatatatatatatatatatataatatgtacatatgtctatatgtgacccatcatgataaatactgacatctattatttacactcaaataattttacattttcttctgttagactactccaagactggaattgttttgttttgttgtttttaatgagagggtctcgctgtgttcccaggctggtcttgaactcctgggctcaagtgatcctcctgcctcagcctcccaaagtgctgggattataggcaggagccaccgcacccggccaagactggaatgtttttagtaaaatattctgaagtgtgaaatccttcatttctccctcatctgaaaggacagctttcagagacatcattcttttcagatgtctcctgaagttgtgattttcgttaaaagcaaactggagccatccaccaagttagggaacagctatgtccttgtgggttcatctgtggcactggaatcagcagtcatcttccaaatctgagatccctaaatccactgtcttgattgttcttttgccagttgtcaacaagcccttctcaaattcttcttcagttattttgcctttcttaagttttttcaagagtcttgtgtcattaagaagttcttccatgtcctcatcttcaatatcagaaccgaagaatttgagaagtccagtaaccgggggcctctagagcgccgca

SEQ ID NO: 350325 - DNA, 2416 bp, Homo sapiens
ggacattcttgcttcacttacacacatatgtacgtgtgcatgcgccgggcggcagtgtgaagtgtatgtctcattgtagggtcatgaccagaaaacacccctggtaacaatgccaggggtctatcgcgtgttaagtgcgctttaaaaaaaacaggtagttatgggaggaacttaccttgatagaaatggaatattgatctttgcagatgatgatgctactcgttagagccaagaaaataaagcatgaaaagctttttttccccctacatcatggagaaagcagatcttgtcatagttggtgctgaaggagttgttgaaacacagaacaaacctttctatgtggttgcagaaagtttcaagtttgtccggctctttccactaaaccagcaagacgtcccagataagtttaagtataaggcagacactctcaaggtcgcgcagactggacaagacctcaaagaggagcatccgtgggtcgactacactgccccttccttaatcactctgctgtttacagacctgggcgtgctgacaccctcagcagtcagcgatgagctcatcaagctctatctgtaacctgtgagccctttcctgccaaggtgcagcttacgtagttgaggcagggtgagtagctgcttgacaccccagtgagtcaggccaaaactgagatgtgtttaatgaagatttatggagtaaggacttaaaatcatacatcttggagaacctttcttactcatttcagtcccatctaaaaatgtgtcagctattctaaatcccaacttaaattgttcttacggtttctagaaactttccttttcagtttccagaaatacaagttagataattggctacttaactgatgaaagatgagcccaagtccacctgtcttcatcctcccctgcactccagactgatctgcctaaagcacgcgagatgcaggcgaaaagcagccacacccctctgccacaaatgaccaacagctggtcaggacgttacacgcggtgccttgtaagaggcaagaaacacttgccgaatctgcatctggcttccagtggtaagcacattcctcagcaggatcaagccaaacagtaaaaactaccaagagaacacgaggaaggcagaaacgatgtttagcaacagtattctgcatggttcactgcttaagaaaatgccttctggaatatttgtaaactgaaattctgtatgtgtaagagatgtttaaatatgtttgggtcctaaacagctttttaaaattatacttgggaataaattcagcatcttttcaaataaactctatgaaagacgctgatgtggtgttgcatcaatactgcaagctgaccaggccatctaggggaaaacactgtccagctacatttacacacttaagacccaggcaatcaggacaccatttattcaacaggaggcataaaaactataattctctttcccggaatatgacttaatccctctgtttttcagctattcaccaataaaacaatactgtgactattaacacagaaaaaccccagcacattagccacccctgcaggacatcaaaggataactgaagcccagggccaagcacattcaggaggtcaaatgcctgaagatactgaggaatggttttgaaaatcagaagtcaagaagacttctgtatctttatgtttaaaaataactataaaatagcctcagaaaaaagagcttttatatatatatatatatatatatatatatatatatatatatatatataatatgtacatatgtctatatgtgacccatcatgataaatactgacatctattatttacactcaaataattttacattttcttctgttagactactccaagactggaattgttttgttttgttgtttttaatgagagggtctcgctgtgttcccaggctggtcttgaactcctgggctcaagtgatcctcctgcctcagcctcccaaagtgctgggattataggcaggagccaccgcacccggccaagactggaatgtttttagtaaaatattctgaagtgtgaaatccttcatttctccctcatctgaaaggacagctttcagagacatcattcttttcagatgtctcctgaagttgtgattttcgttaaaagcaaactggagccatccaccaagttagggaacagctatgtccttgtgggttcatctgtggcactggaatcagcagtcatcttccaaatctgagatccctaaatccactgtcttgattgttcttttgccagttgtcaacaagcccttctcaaattcttcttcagttattttgcctttcttaagttttttcaagagtcttgtgtcattaagaagttcttccatgtcctcatcttcaatatcagaaccgaagaatttgagaagtccagtaaccgggggcctctagagcgccgca

SEQ ID NO: 350326 - DNA, 2058 bp, Homo sapiens
caggtcagagcactaaatattcagtgccgactaatgtgtacttctctcctcagtataaggcagacactctcaaggtcgcgcagactggacaagacctcaaagaggagcatccgtgggtcgactacactgccccttccttaatcactctgctgtttacagacctgggcgtgctgacaccctcagcagtcagcgatgagctcatcaagctctatctgtaacctgtgagccctttcctgccaaggtgcagcttacgtagttgaggcagggtgagtagctgcttgacaccccagtgagtcaggccaaaactgagatgtgtttaatgaagatttatggagtaaggacttaaaatcatacatcttggagaacctttcttactcatttcagtcccatctaaaaatgtgtcagctattctaaatcccaacttaaattgttcttacggtttctagaaactttccttttcagtttccagaaatacaagttagataattggctacttaactgatgaaagatgagcccaagtccacctgtcttcatcctcccctgcactccagactgatctgcctaaagcacgcgagatgcaggcgaaaagcagccacacccctctgccacaaatgaccaacagctggtcaggacgttacacgcggtgccttgtaagaggcaagaaacacttgccgaatctgcatctggcttccagtggtaagcacattcctcagcaggatcaagccaaacagtaaaaactaccaagagaacacgaggaaggcagaaacgatgtttagcaacagtattctgcatggttcactgcttaagaaaatgccttctggaatatttgtaaactgaaattctgtatgtgtaagagatgtttaaatatgtttgggtcctaaacagctttttaaaattatacttgggaataaattcagcatcttttcaaataaactctatgaaagacgctgatgtggtgttgcatcaatactgcaagctgaccaggccatctaggggaaaacactgtccagctacatttacacacttaagacccaggcaatcaggacaccatttattcaacaggaggcataaaaactataattctctttcccggaatatgacttaatccctctgtttttcagctattcaccaataaaacaatactgtgactattaacacagaaaaaccccagcacattagccacccctgcaggacatcaaaggataactgaagcccagggccaagcacattcaggaggtcaaatgcctgaagatactgaggaatggttttgaaaatcagaagtcaagaagacttctgtatctttatgtttaaaaataactataaaatagcctcagaaaaaagagcttttatatatatatatatatatatatatatatatatatatatatatatataatatgtacatatgtctatatgtgacccatcatgataaatactgacatctattatttacactcaaataattttacattttcttctgttagactactccaagactggaattgttttgttttgttgtttttaatgagagggtctcgctgtgttcccaggctggtcttgaactcctgggctcaagtgatcctcctgcctcagcctcccaaagtgctgggattataggcaggagccaccgcacccggccaagactggaatgtttttagtaaaatattctgaagtgtgaaatccttcatttctccctcatctgaaaggacagctttcagagacatcattcttttcagatgtctcctgaagttgtgattttcgttaaaagcaaactggagccatccaccaagttagggaacagctatgtccttgtgggttcatctgtggcactggaatcagcagtcatcttccaaatctgagatccctaaatccactgtcttgattgttcttttgccagttgtcaacaagcccttctcaaattcttcttcagttattttgcctttcttaagttttttcaagagtcttgtgtcattaagaagttcttccatgtcctcatcttcaatatcagaaccgaagaatttgagaagtccagtaaccgggggcctctagagcgccgca

SEQ ID NO: 350327 - DNA, 1958 bp, Homo sapiens
atctgcggaagtggagtgcggggagtgcgccggaagaggggtacggaagtgcgccggaagtggggtgcggaggtgtgcagcgcgctgtcagactggctcgcaggcggcgcggccggcggacccgttcgagacagcgcgggcggctcgggtcccctggggctccgcagcaggaggacgccatggacgacaaggagttaattgaatactttaagtctcagatgaaagaagatcctgacatggcctcagcagtggctgccatccggacgttgctggagttcttgaagagagataaaggggagacaatccagggtctgagggcgaatctcaccagtgccatagaaaccctgtgtggtgtggactcctctgtggcagtgtcctctggcggggagctcttcctccgcttcatcagtcttgcctccctggaatactccgattactccaaatgtaaaaagatcatgattgagcggggagaactttttctcaggagaatatcactgtcaagaaacaaaattgcagatctgtgccatactttcatcaaagatggagcgacaatattgactcacgcctactccagagtggtcctgagagtcctggaagcagccgtggcggccaagaagcgatttagtgtatacgtcacagagtcacagcctgatttgtcaggtaagaaaatggccaaagccctctgccacctcaacgtccctgtcactgtggtgctagatgctgctgtcggctacatcatggagaaagcagatcttgtcatagttggtgctgaaggagttgttgaaaacggaggaattattaacaaggtaagagcatcagttctccccagttccctgctcaagacttggaggtgtcttgctgacctaggacaccacagcagtgttgattatggttccttctaatcctgcttcacttcaggacttcatcatggtattgagttgttgcccatttcccgtaagtcatagcaatgggcagtccagtttcagtcaaatcttttttagattgatctacataaatgaagacaatgtaatttggtcaggtgtgatgccttatacctgtaatcctagcaatttgagaggccagggtgggaggatcacttgaggccttgagttcaagaccagcctgggcaacatagtgaaaccctgtctctacaaaaaattagaaaaattagctgggcgtggtggtgcttgcctgtagttccagctgcccaggaagctgaggcaggagtatcacgtgagcccaggaatttgaggttgcagtaagttatgatcacactactgcattccagcctgggcgatggtgagaccctgtctcagtaaaaaaaaaaaaaaaaaaagtgtaatttatatttatacaaaattggcttgaattggaattggggtttgtctggtttttgctttatttatgtgtatatgtatgttttatttatgcatatatatacacacacataatatatatacacaaatatttttaaaatattatttatatatttacatataaagtatgtatgtataaaatacgtgtatttatatataaatattatatatattttaaaatagagacacattcactctgttgcccaggctgtagtgtagtacagtgatcatagcttactgcagtcttgaactcctagcctgaagcaatctttccacttcccaaagtgctaggattacaggcatgagccactatccagcctctagtggctgtttctatatcctttgagaaacatttatttttttgattccaaagtcagaattagatatatctaatatatgtattagatatatgtatatctatattatatacataactttctattgctgttttttaattgttcctttattgtaattgagacgaggtctcaccgtgttgcctaggctggtcccaaactcatgggttcaggtgatccacccacctcggcctcccaaaatgctggaatacaggcatgcaccactgtg

SEQ ID NO: 350328 - DNA, 795 bp, Homo sapiens
cctcatggcctcttcctgttgagcaggtttgatgatgataagggattttggtgccagggacttgaaggtggtaagactcgctgtctaggccggagcaaaggccggaggtatccagatatggacactgagtcccgtcttttccttacggattttttccggaaccataatttggagttgtcgaagctgctgagccggcttggacagccagtgccctcgtggcttcgggaagaactgcagcattccagtctgggctgatgtcccagcctcccataccagcaaaatgccccctgcttccctaagggtcaggtccagagcagggcccacaagggggattagagtggcctggcccctccccctctacctcagtagcccccaggcctgagatggctgagaagggaagggtatccttttcccacagttctgggacaaataaaggggcttcctttggtaccccacataatagtgctaggtacctttgacccatcatcttgggaggtggggaggaatgagagggtccaggcagggtgtaggggaatgtattagtccaatgagatttccctcttcatccgcagcagtgtatctattctatacctggctatgggagagaccccttgcatgggagggaccccttgctatggcccctttagccaggcagtgggatctacctgtggcccggcctccctaatgtcattcacattgaatggggatgaggtcggacagtggctcatagagccgagtatgagccctagctgtgggctagaaatgtccttaataaacatccttatttttctgttt

SEQ ID NO: 350329 - DNA, 1464 bp, Homo sapiens
gaaggcgctgcgggcactccggatcgcattcacaaagtcgtcgtagtccgcaggagtcagtaaacaaatgaagagctagaggaagggtcctctgaagagccactggcacaactgcagtcaggtcaaatgatttacctgtaatccaggaaacgtgggaagaataagtacgtgagagccagttgggagaaacaaagttgtgcaggccaagggcataaagcccaatctcgaaggcgcaaaggtgcaggttgcggtgaggaccctggtggccccctgaggaagatggatgtgtgaaaatggaagtgctgctgttgccccctgccttgatcagcactgtcttcgccagctcgaagtagaagtgtgcagctgcctctgatggctgattggtcttcgcccgggctcctccactggcactggcccggcgacttccactggaggatgaggagcccagggagtccgaagaagagctgctaatgctgtcactgtcctgacctcgaccccaggaggtgggggcccagccccctcgaagtggtctccggcttaaggtgggggaactatccgatgttgtttcaggggcactgctgtcaatgctggccatgcctaacccccaagagaagtcagtctcagaagtcaggagtcccagatgttaagactccaaccttcaggattatccttccctctatgctagcccacaggctatcctacctgtgtgcttcttcttaggccgtcctggggacccccatccccgtccattatagcctccacgactgccaagtgccaagcggctaggaaccttcccttctggccttggggtcaaagctgcctcagatggaagaccctcacagggggaatgtggggaactctctaggtgaggaaaacaggacgctgggatgagcccaggaaaggggacctcaacataggtccacaccattcatcccccctgcccagtgcccccacctcaccaggcacattcttctctgtgaagccctcagtggggcctggcccagcccctgccacactccctggttgagcaggccctgcagagcctgaggtcagtggttgcagggcccctggggcagatgggcccccgtgctttgaaggagacctctggctggctgtggttgggcggctagatgagtagaaagaactcagcgtctgtggcttatgtgtctggctctctcggtccaagagtttgtctaagatctggaagacagaagcagtgacctccagagaagcagtgacaggatgccctttagctcctgacttctattaccttcctttctccttgaaacagccaattgctacatcctcagggagccttccccacttacaaccacaggatgacctcctggtttacatgtctttttgtaacttatttaaccccaacatatcttggtatcctccattaacaccacagggcagaatatactgatagtcaataaatactgaaataagtgaaaaaaaaaa

SEQ ID NO: 350330 - DNA, 3515 bp, Homo sapiens
attcctccctcccttcctccccccgccatgctccagttgtggaaggtggtacgcccagctcggcagctggaactgcaccgcctcatactgctgctgatcgctttcagcctgggctccatgggcttcctggcttattatgtgtccaccagccctaaggccaaggaacccttgcccctgcccttgggagactgcagcagcggtggggcagctggtcctggccctgcacggcctccagttccacctcggccccccaggcctccagagacagctcgaactgaacccgtggtccttgtgtttgtggagagtgcatactcacagctggggcaggaaattgtggccatcctggagtctagtcgttttcgttatagcactgagttggcacctggccgaggggacatgcccacattgactgataatacccatggccgctatgtcttggtcatttatgagaacctgctcaagtatgtcaacctggatgcctggagtcgggaactgctagaccggtactgcgtggagtatggtgtgggcatcattggctttttccgagcccacgagcacagcctactgagcgcccagctcaagggctttcccctttttttacactcaaacttggggctccgggactaccaagtgaatccttctgccccgctactgcatctcacacgccccagccgcctagaaccagggccactgcctggtgatgactggaccatcttccaatccaatcatagtacatatgaaccagtgcttcttgccagccttcggccagctgagcccgcagtgccaggaccagttcttcgtcgggcccggcttcccactgtggtacaggacctggggcttcatgatggcatccagcgggtgctctttggacatggcctttccttctggctccacaaacttatcttcgttgatgctgttgcatacctcactggcaagcgcctctgcctggaccttgaccgctacatcttggtagacatcgatgacatctttgtgggcaaggaagggacccgcatgaaggtggctgatgttgaggctctgttgaccacccagaacaaactcaggaccttagttcccaacttcaccttcaacttgggcttctcgggcaagttctatcatactggtgagcttatacccctactcctttggcatatcatagtttgacctgtcccttcactgtccacctccctgggcagacaagttgaagaaaagggtcaaggtttggggtcagactgctgtgaggagctagtggtgggcatgaatttaggttcgcatgggtggctggatggcaagttggcagtggggcaaatagaaagtcttaggcaaggatcagggatggaaggtggtcagtgttgttacaaaataaaggagggaacaggggctgactggctgtggtcagtggtcagcgtgtggtcatagggacagaggaggaggatgcaggggacgacatgctgctgaagcaccgcaaagagttctggtggttcccccacatgtggagccacatgcagccacacctgttccacaatcgctccgtgctggctgaccagatgaggctcaacaaacagtttgctctggagcatgggattcccacggacctggggtatgctgtggccccccaccactcgggtgtgtaccccatccacacgcagctctatgaggcctggaaatccgtgtggggcatccaggtgaccagcactgaggagtatccccatctccgccctgcccgctaccgccgtggcttcattcacaatggcattatggtgctgccccggcagacatgtggcctcttcactcacacaatcttctataatgagtatcctggaggctctcgtgaactagaccggagcatccgaggtggagagctctttctgacagtgctgcttaatccgatcagcatctttatgacccatctgtccaattatggaaatgaccggctgggcctatacacctttgagagcttggtgcgcttcctccagtgttggacacggctgcgcctacagacccttcctcctgtcccacttgcacagaagtactttgaacttttccctcaggagcgaagccccctttggcagaatccctgtgatgacaagaggcacaaagatatctggtccaaggagaaaacctgtgatcgtctcccgaagttcctcattgtgggaccccagaaaacagggactacagctattcacttcttcctgagcctgcacccagctgtaactagcagcttccctagccccagcacatttgaggagattcagttcttcaacagccctaattaccacaagggtattgactggtacatggatttcttccctgttccttccaatgccagcactgatttcctatttgaaaaaagtgccacctactttgactctgaagttgtaccacggcggggggctgccctcctgccacgagccaagatcatcacagtgctcaccaaccctgctgacagggcctactcctggtaccagcatcagcgagcccatggagacccagttgctctgaactataccttctatcaggtgatttcagcctcctcccagacccctctggcactacgctccctgcagaaccgctgtcttgtccctggctactattctacccatctacaacgctggctgacttactacccctctggacagttgctgattgtggatgggcaagagctgcgtaccaacccagcagcctcaatggagagcatccagaagttcctgggtatcacaccctttctgaactacacacggaccctcaggtttgatgatgataagggattttggtgccagggacttgaaggtggtaagactcgctgtctaggccggagcaaaggccggaggtatccagatatggacactgagtcccgtcttttccttacggattttttccggaaccataatttggagttgtcgaagctgctgagccggcttggacagccagtgccctcgtggcttcgggaagaactgcagcattccagtctgggctgatgtcccagcctcccataccagcaaaatgccccctgcttccctaagggtcaggtccagagcagggcccacaagggggattagagtggcctggcccctccccctctacctcagtagcccccaggcctgagatggctgagaagggaagggtatccttttcccacagttctgggacaaataaaggggcttcctttggtaccccacataatagtgctaggtacctttgacccatcatcttgggaggtggggaggaatgagagggtccaggcagggtgtaggggaatgtattagtccaatgagatttccctcttcatccgcagcagtgtatctattctatacctggctatgggagagaccccttgcatgggagggaccccttgctatggcccctttagccaggcagtgggatctacctgtggcccggcctccctaatgtcattcacattgaatggggatgaggtcggacagtggctcatagagccgagtatgagccctagctgtgggctagaaatgtccttaataaacatccttatttttctgttt

SEQ ID NO: 350331 - DNA, 3316 bp, Homo sapiens
attcctccctcccttcctccccccgccatgctccagttgtggaaggtggtacgcccagctcggcagctggaactgcaccgcctcatactgctgctgatcgctttcagcctgggctccatgggcttcctggcttattatgtgtccaccagccctaaggccaaggaacccttgcccctgcccttgggagactgcagcagcggtggggcagctggtcctggccctgcacggcctccagttccacctcggccccccaggcctccagagacagctcgaactgaacccgtggtccttgtgtttgtggagagtgcatactcacagctggggcaggaaattgtggccatcctggagtctagtcgttttcgttatagcactgagttggcacctggccgaggggacatgcccacattgactgataatacccatggccgctatgtcttggtcatttatgagaacctgctcaagtatgtcaacctggatgcctggagtcgggaactgctagaccggtactgcgtggagtatggtgtgggcatcattggctttttccgagcccacgagcacagcctactgagcgcccagctcaagggctttcccctttttttacactcaaacttggggctccgggactaccaagtgaatccttctgccccgctactgcatctcacacgccccagccgcctagaaccagggccactgcctggtgatgactggaccatcttccaatccaatcatagtacatatgaaccagtgcttcttgccagccttcggccagctgagcccgcagtgccaggaccagttcttcgtcgggcccggcttcccactgtggtacaggacctggggcttcatgatggcatccagcgggtgctctttggacatggcctttccttctggctccacaaacttatcttcgttgatgctgttgcatacctcactggcaagcgcctctgcctggaccttgaccgctacatcttggtagacatcgatgacatctttgtgggcaaggaagggacccgcatgaaggtggctgatgttgaggctctgttgaccacccagaacaaactcaggaccttagttcccaacttcaccttcaacttgggcttctcgggcaagttctatcatactgggacagaggaggaggatgcaggggacgacatgctgctgaagcaccgcaaagagttctggtggttcccccacatgtggagccacatgcagccacacctgttccacaatcgctccgtgctggctgaccagatgaggctcaacaaacagtttgctctggagcatgggattcccacggacctggggtatgctgtggccccccaccactcgggtgtgtaccccatccacacgcagctctatgaggcctggaaatccgtgtggggcatccaggtgaccagcactgaggagtatccccatctccgccctgcccgctaccgccgtggcttcattcacaatggcattatggtgctgccccggcagacatgtggcctcttcactcacacaatcttctataatgagtatcctggaggctctcgtgaactagaccggagcatccgaggtggagagctctttctgacagtgctgcttaatccgatcagcatctttatgacccatctgtccaattatggaaatgaccggctgggcctatacacctttgagagcttggtgcgcttcctccagtgttggacacggctgcgcctacagacccttcctcctgtcccacttgcacagaagtactttgaacttttccctcaggagcgaagccccctttggcagaatccctgtgatgacaagaggcacaaagatatctggtccaaggagaaaacctgtgatcgtctcccgaagttcctcattgtgggaccccagaaaacagggactacagctattcacttcttcctgagcctgcacccagctgtaactagcagcttccctagccccagcacatttgaggagattcagttcttcaacagccctaattaccacaagggtattgactggtacatggatttcttccctgttccttccaatgccagcactgatttcctatttgaaaaaagtgccacctactttgactctgaagttgtaccacggcggggggctgccctcctgccacgagccaagatcatcacagtgctcaccaaccctgctgacagggcctactcctggtaccagcatcagcgagcccatggagacccagttgctctgaactataccttctatcaggtgatttcagcctcctcccagacccctctggcactacgctccctgcagaaccgctgtcttgtccctggctactattctacccatctacaacgctggctgacttactacccctctggacagttgctgattgtggatgggcaagagctgcgtaccaacccagcagcctcaatggagagcatccagaagttcctgggtatcacaccctttctgaactacacacggaccctcaggtttgatgatgataagggattttggtgccagggacttgaaggtggtaagactcgctgtctaggccggagcaaaggccggaggtatccagatatggacactgaggtaagtaaagccaggggcaggggaatccctctccacttccaggatctgattctgtgtcccacttcttaccatttctgccttcattttctcctgtcagtcccgtcttttccttacggattttttccggaaccataatttggagttgtcgaagctgctgagccggcttggacagccagtgccctcgtggcttcgggaagaactgcagcattccagtctgggctgatgtcccagcctcccataccagcaaaatgccccctgcttccctaagggtcaggtccagagcagggcccacaagggggattagagtggcctggcccctccccctctacctcagtagcccccaggcctgagatggctgagaagggaagggtatccttttcccacagttctgggacaaataaaggggcttcctttggtaccccacataatagtgctaggtacctttgacccatcatcttgggaggtggggaggaatgagagggtccaggcagggtgtaggggaatgtattagtccaatgagatttccctcttcatccgcagcagtgtatctattctatacctggctatgggagagaccccttgcatgggagggaccccttgctatggcccctttagccaggcagtgggatctacctgtggcccggcctccctaatgtcattcacattgaatggggatgaggtcggacagtggctcatagagccgagtatgagccctagctgtgggctagaaatgtccttaataaacatccttatttttctgttt

SEQ ID NO: 350332 - DNA, 3182 bp, Homo sapiens
attcctccctcccttcctccccccgccatgctccagttgtggaaggtggtacgcccagctcggcagctggaactgcaccgcctcatactgctgctgatcgctttcagcctgggctccatgggcttcctggcttattatgtgtccaccagccctaaggccaaggaacccttgcccctgcccttgggagactgcagcagcggtggggcagctggtcctggccctgcacggcctccagttccacctcggccccccaggcctccagagacagctcgaactgaacccgtggtccttgtgtttgtggagagtgcatactcacagctggggcaggaaattgtggccatcctggagtctagtcgttttcgttatagcactgagttggcacctggccgaggggacatgcccacattgactgataatacccatggccgctatgtcttggtcatttatgagaacctgctcaagtatgtcaacctggatgcctggagtcgggaactgctagaccggtactgcgtggagtatggtgtgggcatcattggctttttccgagcccacgagcacagcctactgagcgcccagctcaagggctttcccctttttttacactcaaacttggggctccgggactaccaagtgaatccttctgccccgctactgcatctcacacgccccagccgcctagaaccagggccactgcctggtgatgactggaccatcttccaatccaatcatagtacatatgaaccagtgcttcttgccagccttcggccagctgagcccgcagtgccaggaccagttcttcgtcgggcccggcttcccactgtggtacaggacctggggcttcatgatggcatccagcgggtgctctttggacatggcctttccttctggctccacaaacttatcttcgttgatgctgttgcatacctcactggcaagcgcctctgcctggaccttgaccgctacatcttggtagacatcgatgacatctttgtgggcaaggaagggacccgcatgaaggtggctgatgttgaggctctgttgaccacccagaacaaactcaggaccttagttcccaacttcaccttcaacttgggcttctcgggcaagttctatcatactgggacagaggaggaggatgcaggggacgacatgctgctgaagcaccgcaaagagttctggtggttcccccacatgtggagccacatgcagccacacctgttccacaatcgctccgtgctggctgaccagatgaggctcaacaaacagtttgctctggagcatgggattcccacggacctggggtatgctgtggccccccaccactcgggtgtgtaccccatccacacgcagctctatgaggcctggaaatccgtgtggggcatccaggtgaccagcactgaggagtatccccatctccgccctgcccgctaccgccgtggcttcattcacaatggcattatggtgctgccccggcagacatgtggcctcttcactcacacaatcttctataatgagtatcctggaggctctcgtgaactagaccggagcatccgaggtggagagctctttctgacagtgctgcttaatccgatcagcatctttatgacccatctgtccaattatggaaatgaccggctgggcctatacacctttgagagcttggtgcgcttcctccagtgttggacacggctgcgcctacagacccttcctcctgtcccacttgcacagaagtactttgaacttttccctcaggagcgaagccccctttggcagaatccctgtgatgacaagaggcacaaagatatctggtccaaggagaaaacctgtgatcgtctcccgaagttcctcattgtgggaccccagaaaacagggactacagctattcacttcttcctgagcctgcacccagctgtaactagcagcttccctagccccagcacatttgaggagattcagttcttcaacagccctaattaccacaagggtattgactggtacatggatttcttccctgttccttccaatgccagcactgatttcctatttgaaaaaagtgccacctactttgactctgaagttgtaccacggcggggggctgccctcctgccacgagccaagatcatcacagtgctcaccaaccctgctgacagggcctactcctggtaccagcatcagcgagcccatggagacccagttgctctgaactataccttctatcaggtgatttcagcctcctcccagacccctctggcactacgctccctgcagaaccgctgtcttgtccctggctactattctacccatctacaacgctggctgacttactacccctctggacagttgctgattgtggatgggcaagagctgcgtaccaacccagcagcctcaatggagagcatccagaagttcctgggtttgatgatgataagggattttggtgccagggacttgaaggtggtaagactcgctgtctaggccggagcaaaggccggaggtatccagatatggacactgagtcccgtcttttccttacggattttttccggaaccataatttggagttgtcgaagctgctgagccggcttggacagccagtgccctcgtggcttcgggaagaactgcagcattccagtctgggctgatgtcccagcctcccataccagcaaaatgccccctgcttccctaagggtcaggtccagagcagggcccacaagggggattagagtggcctggcccctccccctctacctcagtagcccccaggcctgagatggctgagaagggaagggtatccttttcccacagttctgggacaaataaaggggcttcctttggtaccccacataatagtgctaggtacctttgacccatcatcttgggaggtggggaggaatgagagggtccaggcagggtgtaggggaatgtattagtccaatgagatttccctcttcatccgcagcagtgtatctattctatacctggctatgggagagaccccttgcatgggagggaccccttgctatggcccctttagccaggcagtgggatctacctgtggcccggcctccctaatgtcattcacattgaatggggatgaggtcggacagtggctcatagagccgagtatgagccctagctgtgggctagaaatgtccttaataaacatccttatttttctgttt

SEQ ID NO: 350333 - DNA, 3775 bp, Homo sapiens
attcctccctcccttcctccccccgccatgctccagttgtggaaggtggtacgcccagctcggcagctggaactgcaccgcctcatactgctgctgatcgctttcagcctgggctccatgggcttcctggcttattatgtgtccaccagccctaaggccaaggaacccttgcccctgcccttgggagactgcagcagcggtggggcagctggtcctggccctgcacggcctccagttccacctcggccccccaggcctccagagacagctcgaactgaacccgtggtccttgtgtttgtggagagtgcatactcacagctggggcaggaaattgtggccatcctggagtctagtcgttttcgttatagcactgagttggcacctggccgaggggacatgcccacattgactgataatacccatggccgctatgtcttggtcatttatgagaacctgctcaagtatgtcaacctggatgcctggagtcgggaactgctagaccggtactgcgtggagtatggtgtgggcatcattggctttttccgagcccacgagcacagcctactgagcgcccagctcaagggctttcccctttttttacactcaaacttggggctccgggactaccaagtgaatccttctgccccgctactgcatctcacacgccccagccgcctagaaccagggccactgcctggtgatgactggaccatcttccaatccaatcatagtacatatgaaccagtgcttcttgccagccttcggccagctgagcccgcagtgccaggaccagttcttcgtcgggcccggcttcccactgtggtacaggacctggggcttcatgatggcatccagcgggtgctctttggacatggcctttccttctggctccacaaacttatcttcgttgatgctgttgcatacctcactggcaagcgcctctgcctggaccttgaccgctacatcttggtagacatcgatgacatctttgtgggcaaggaagggacccgcatgaaggtggctgatgttgaggctctgttgaccacccagaacaaactcaggaccttagttcccaacttcaccttcaacttgggcttctcgggcaagttctatcatactggtgagcttatacccctactcctttggcatatcatagtttgacctgtcccttcactgtccacctccctgggcagacaagttgaagaaaagggtcaaggtttggggtcagactgctgtgaggagctagtggtgggcatgaatttaggttcgcatgggtggctggatggcaagttggcagtggggcaaatagaaagtcttaggcaaggatcagggatggaaggtggtcagtgttgttacaaaataaaggagggaacaggggctgactggctgtggtcagtggtcagcgtgtggtcatagggacagaggaggaggatgcaggggacgacatgctgctgaagcaccgcaaagagttctggtggttcccccacatgtggagccacatgcagccacacctgttccacaatcgctccgtgctggctgaccagatgaggctcaacaaacagtttgctctggagcatgggattcccacggacctggggtatgctgtggccccccaccactcgggtgtgtaccccatccacacgcagctctatgaggcctggaaatccgtgtggggcatccaggtgaccagcactgaggagtatccccatctccgccctgcccgctaccgccgtggcttcattcacaatggcattatggtgagggactcccaatacaggcttgaatcaaactctaacatttagacagctttcaacatgcattgacctatgttctctatcaactgccagtccaagtatgggggtacataattgggggtagaaaggtgaaaaaattttaacaccctcagtaagagctttattgctataacttcagactcagtcctctataaatcccagtgtcctccatctacttctcattctatctttcaaatctcatctgttttttcttttccctccaggtgctgccccggcagacatgtggcctcttcactcacacaatcttctataatgagtatcctggaggctctcgtgaactagaccggagcatccgaggtggagagctctttctgacagtgctgcttaatccgatcagcatctttatgacccatctgtccaattatggaaatgaccggctgggcctatacacctttgagagcttggtgcgcttcctccagtgttggacacggctgcgcctacagacccttcctcctgtcccacttgcacagaagtactttgaacttttccctcaggagcgaagccccctttggcagaatccctgtgatgacaagaggcacaaagatatctggtccaaggagaaaacctgtgatcgtctcccgaagttcctcattgtgggaccccagaaaacagggactacagctattcacttcttcctgagcctgcacccagctgtaactagcagcttccctagccccagcacatttgaggagattcagttcttcaacagccctaattaccacaagggtattgactggtacatggatttcttccctgttccttccaatgccagcactgatttcctatttgaaaaaagtgccacctactttgactctgaagttgtaccacggcggggggctgccctcctgccacgagccaagatcatcacagtgctcaccaaccctgctgacagggcctactcctggtaccagcatcagcgagcccatggagacccagttgctctgaactataccttctatcaggtgatttcagcctcctcccagacccctctggcactacgctccctgcagaaccgctgtcttgtccctggctactattctacccatctacaacgctggctgacttactacccctctggacagttgctgattgtggatgggcaagagctgcgtaccaacccagcagcctcaatggagagcatccagaagttcctgggtatcacaccctttctgaactacacacggaccctcaggtttgatgatgataagggattttggtgccagggacttgaaggtggtaagactcgctgtctaggccggagcaaaggccggaggtatccagatatggacactgagtcccgtcttttccttacggattttttccggaaccataatttggagttgtcgaagctgctgagccggcttggacagccagtgccctcgtggcttcgggaagaactgcagcattccagtctgggctgatgtcccagcctcccataccagcaaaatgccccctgcttccctaagggtcaggtccagagcagggcccacaagggggattagagtggcctggcccctccccctctacctcagtagcccccaggcctgagatggctgagaagggaagggtatccttttcccacagttctgggacaaataaaggggcttcctttggtaccccacataatagtgctaggtacctttgacccatcatcttgggaggtggggaggaatgagagggtccaggcagggtgtaggggaatgtattagtccaatgagatttccctcttcatccgcagcagtgtatctattctatacctggctatgggagagaccccttgcatgggagggaccccttgctatggcccctttagccaggcagtgggatctacctgtggcccggcctccctaatgtcattcacattgaatggggatgaggtcggacagtggctcatagagccgagtatgagccctagctgtgggctagaaatgtccttaataaacatccttatttttctgttt

SEQ ID NO: 350334 - DNA, 448 bp, Homo sapiens
ctccaggtgctgccccggcagacatgtggcctcttcactcacacaatcttctataatgagtatcctggaggctctcgtgaactagaccggagcatccgaggtggagagctctttctgacagtgctgcttaatccggtaaggtgctgagaggaacggctagaagattggagagccaaggtgtttgcaggctgggacctttattcaccaaggctaattcagaggtggggtaggctctccaaatctgacatgcaggtaccccttacagatcagcatctttatgacccatctgtccaattatggaaatgaccggctgggcctatacacctttgagagcttggtgcgcttcctccagtgttggacacggctgcgcctacagacccttcctcctgtcccacttgcacagaagtactttgaacttttccctcaggagcgaagccccctttggcag

SEQ ID NO: 350335 - DNA, 3219 bp, Homo sapiens
attcctccctcccttcctccccccgccatgctccagttgtggaaggtggtacgcccagctcggcagctggaactgcaccgcctcatactgctgctgatcgctttcagcctgggctccatgggcttcctggcttattatgtgtccaccagccctaaggccaaggaacccttgcccctgcccttgggagactgcagcagcggtggggcagctggtcctggccctgcacggcctccagttccacctcggccccccaggcctccagagacagctcgaactgaacccgtggtccttgtgtttgtggagagtgcatactcacagctggggcaggaaattgtggccatcctggagtctagtcgttttcgttatagcactgagttggcacctggccgaggggacatgcccacattgactgataatacccatggccgctatgtcttggtcatttatgagaacctgctcaagtatgtcaacctggatgcctggagtcgggaactgctagaccggtactgcgtggagtatggtgtgggcatcattggctttttccgagcccacgagcacagcctactgagcgcccagctcaagggctttcccctttttttacactcaaacttggggctccgggactaccaagtgaatccttctgccccgctactgcatctcacacgccccagccgcctagaaccagggccactgcctggtgatgactggaccatcttccaatccaatcatagtacatatgaaccagtgcttcttgccagccttcggccagctgagcccgcagtgccaggaccagttcttcgtcgggcccggcttcccactgtggtacaggacctggggcttcatgatggcatccagcgggtgctctttggacatggcctttccttctggctccacaaacttatcttcgttgatgctgttgcatacctcactggcaagcgcctctgcctggaccttgaccgctacatcttggtagacatcgatgacatctttgtgggcaaggaagggacccgcatgaaggtggctgatgttgaggctctgttgaccacccagaacaaactcaggaccttagttcccaacttcaccttcaacttgggcttctcgggcaagttctatcatactgggacagaggaggaggatgcaggggacgacatgctgctgaagcaccgcaaagagttctggtggttcccccacatgtggagccacatgcagccacacctgttccacaatcgctccgtgctggctgaccagatgaggctcaacaaacagtttgctctggagcatgggattcccacggacctggggtatgctgtggccccccaccactcgggtgtgtaccccatccacacgcagctctatgaggcctggaaatccgtgtggggcatccaggtgaccagcactgaggagtatccccatctccgccctgcccgctaccgccgtggcttcattcacaatggcattatggtgctgccccggcagacatgtggcctcttcactcacacaatcttctataatgagtatcctggaggctctcgtgaactagaccggagcatccgaggtggagagctctttctgacagtgctgcttaatccgatcagcatctttatgacccatctgtccaattatggaaatgaccggctgggcctatacacctttgagagcttggtgcgcttcctccagtgttggacacggctgcgcctacagacccttcctcctgtcccacttgcacagaagtactttgaacttttccctcaggagcgaagccccctttggcagaatccctgtgatgacaagaggcacaaagatatctggtccaaggagaaaacctgtgatcgtctcccgaagttcctcattgtgggaccccagaaaacagggactacagctattcacttcttcctgagcctgcacccagctgtaactagcagcttccctagccccagcacatttgaggagattcagttcttcaacagccctaattaccacaagggtattgactggtacatggatttcttccctgttccttccaatgccagcactgatttcctatttgaaaaaagtgccacctactttgactctgaagttgtaccacggcggggggctgccctcctgccacgagccaagatcatcacagtgctcaccaaccctgctgacagggcctactcctggtaccagcatcagcgagcccatggagacccagttgctctgaactataccttctatcaggtgatttcagcctcctcccagacccctctggcactacgctccctgcagaaccgctgtcttgtccctggctactattctacccatctacaacgctggctgacttactacccctctggacagttgctgattgtggatgggcaagagctgcgtaccaacccagcagcctcaatggagagcatccagaagttcctgggtatcacaccctttctgaactacacacggaccctcaggtttgatgatgataagggattttggtgccagggacttgaaggtggtaagactcgctgtctaggccggagcaaaggccggaggtatccagatatggacactgagtcccgtcttttccttacggattttttccggaaccataatttggagttgtcgaagctgctgagccggcttggacagccagtgccctcgtggcttcgggaagaactgcagcattccagtctgggctgatgtcccagcctcccataccagcaaaatgccccctgcttccctaagggtcaggtccagagcagggcccacaagggggattagagtggcctggcccctccccctctacctcagtagcccccaggcctgagatggctgagaagggaagggtatccttttcccacagttctgggacaaataaaggggcttcctttggtaccccacataatagtgctaggtacctttgacccatcatcttgggaggtggggaggaatgagagggtccaggcagggtgtaggggaatgtattagtccaatgagatttccctcttcatccgcagcagtgtatctattctatacctggctatgggagagaccccttgcatgggagggaccccttgctatggcccctttagccaggcagtgggatctacctgtggcccggcctccctaatgtcattcacattgaatggggatgaggtcggacagtggctcatagagccgagtatgagccctagctgtgggctagaaatgtccttaataaacatccttatttttctgttt

SEQ ID NO: 350336 - DNA, 3279 bp, Homo sapiens
attcctccctcccttcctccccccgccatgctccagttgtggaaggtggtacgcccagctcggcagctggaactgcaccgcctcatactgctgctgatcgctttcagcctgggctccatgggcttcctggcttattatgtgtccaccagccctaaggccaaggaacccttgcccctgcccttgggagactgcagcagcggtggggcagctggtcctggccctgcacggcctccagttccacctcggccccccaggcctccagagacagctcgaactgaacccgtggtccttgtgtttgtggagagtgcatactcacagctggggcaggaaattgtggccatcctggagtctagtcgttttcgttatagcactgagttggcacctggccgaggggacatgcccacattgactgataatacccatggccgctatgtcttggtcatttatgagaacctgctcaagtatgtcaacctggatgcctggagtcgggaactgctagaccggtactgcgtggagtatggtgtgggcatcattggctttttccgagcccacgagcacagcctactgagcgcccagctcaagggctttcccctttttttacactcaaacttggggctccgggactaccaagtgaatccttctgccccgctactgcatctcacacgccccagccgcctagaaccagggccactgcctggtgatgactggaccatcttccaatccaatcatagtacatatgaaccagtgcttcttgccagccttcggccagctgagcccgcagtgccaggaccagttcttcgtcgggcccggcttcccactgtggtacaggacctggggcttcatgatggcatccagcgggtgctctttggacatggcctttccttctggctccacaaacttatcttcgttgatgctgttgcatacctcactggcaagcgcctctgcctggaccttgaccgctacatcttggtagacatcgatgacatctttgtgggcaaggaagggacccgcatgaaggtggctgatgttgaggctctgttgaccacccagaacaaactcaggaccttagttcccaacttcaccttcaacttgggcttctcgggcaagttctatcatactgggacagaggaggaggatgcaggggacgacatgctgctgaagcaccgcaaagagttctggtggttcccccacatgtggagccacatgcagccacacctgttccacaatcgctccgtgctggctgaccagatgaggctcaacaaacagtttgctctggagcatgggattcccacggacctggggtatgctgtggccccccaccactcgggtgtgtaccccatccacacgcagctctatgaggcctggaaatccgtgtggggcatccaggtgaccagcactgaggagtatccccatctccgccctgcccgctaccgccgtggcttcattcacaatggcattatggtgctgccccggcagacatgtggcctcttcactcacacaatcttctataatgagtatcctggaggctctcgtgaactagaccggagcatccgaggtggagagctctttctgacagtgctgcttaatccgatcagcatctttatgacccatctgtccaattatggaaatgaccggctgggcctatacacctttgagagcttggtgcgcttcctccagtgttggacacggctgcgcctacagacccttcctcctgtcccacttgcacagaagtactttgaacttttccctcaggagcgaagccccctttggcagaatccctgtgatgacaagaggcacaaagatatctggtccaaggagaaaacctgtgatcgtctcccgaagttcctcattgtgggaccccagaaaacagggactacagctattcacttcttcctgagcctgcacccagctgtaactagcagcttccctagccccagcacatttgaggagattcagttcttcaacagccctaattaccacaagggtattgactggtacatggatttcttccctgttccttccaatgccagcactgatttcctatttgaaaaaagtgccacctactttgactctgaagttgtaccacggcggggggctgccctcctgccacgagccaagatcatcacagtgctcaccaaccctgctgacagggcctactcctggtaccagcatcagcgagcccatggagacccagttgctctgaactataccttctatcaggtgatttcagcctcctcccagacccctctggcactacgctccctgcagaaccgctgtcttgtccctggctactattctacccatctacaacgctggctgacttactacccctctggacagttgctgattgtggatgggcaagagctgcgtaccaacccagcagcctcaatggagagcatccagaagttcctgggtttgatgatgataagggattttggtgccagggacttgaaggtggtaagactcgctgtctaggccggagcaaaggccggaggtatccagatatggacactgaggtaagtaaagccaggggcaggggaatccctctccacttccaggatctgattctgtgtcccacttcttaccatttctgccttcattttctcctgtcagtcccgtcttttccttacggattttttccggaaccataatttggagttgtcgaagctgctgagccggcttggacagccagtgccctcgtggcttcgggaagaactgcagcattccagtctgggctgatgtcccagcctcccataccagcaaaatgccccctgcttccctaagggtcaggtccagagcagggcccacaagggggattagagtggcctggcccctccccctctacctcagtagcccccaggcctgagatggctgagaagggaagggtatccttttcccacagttctgggacaaataaaggggcttcctttggtaccccacataatagtgctaggtacctttgacccatcatcttgggaggtggggaggaatgagagggtccaggcagggtgtaggggaatgtattagtccaatgagatttccctcttcatccgcagcagtgtatctattctatacctggctatgggagagaccccttgcatgggagggaccccttgctatggcccctttagccaggcagtgggatctacctgtggcccggcctccctaatgtcattcacattgaatggggatgaggtcggacagtggctcatagagccgagtatgagccctagctgtgggctagaaatgtccttaataaacatccttatttttctgttt

SEQ ID NO: 350337 - DNA, 3697 bp, Homo sapiens
attcctccctcccttcctccccccgccatgctccagttgtggaaggtggtacgcccagctcggcagctggaactgcaccgcctcatactgctgctgatcgctttcagcctgggctccatgggcttcctggcttattatgtgtccaccagccctaaggccaaggaacccttgcccctgcccttgggagactgcagcagcggtggggcagctggtcctggccctgcacggcctccagttccacctcggccccccaggcctccagagacagctcgaactgaacccgtggtccttgtgtttgtggagagtgcatactcacagctggggcaggaaattgtggccatcctggagtctagtcgttttcgttatagcactgagttggcacctggccgaggggacatgcccacattgactgataatacccatggccgctatgtcttggtcatttatgagaacctgctcaagtatgtcaacctggatgcctggagtcgggaactgctagaccggtactgcgtggagtatggtgtgggcatcattggctttttccgagcccacgagcacagcctactgagcgcccagctcaagggctttcccctttttttacactcaaacttggggctccgggactaccaagtgaatccttctgccccgctactgcatctcacacgccccagccgcctagaaccagggccactgcctggtgatgactggaccatcttccaatccaatcatagtacatatgaaccagtgcttcttgccagccttcggccagctgagcccgcagtgccaggaccagttcttcgtcgggcccggcttcccactgtggtacaggacctggggcttcatgatggcatccagcgggtgctctttggacatggcctttccttctggctccacaaacttatcttcgttgatgctgttgcatacctcactggcaagcgcctctgcctggaccttgaccgctacatcttggtagacatcgatgacatctttgtgggcaaggaagggacccgcatgaaggtggctgatgttgaggctctgttgaccacccagaacaaactcaggaccttagttcccaacttcaccttcaacttgggcttctcgggcaagttctatcatactggtgagcttatacccctactcctttggcatatcatagtttgacctgtcccttcactgtccacctccctgggcagacaagttgaagaaaagggtcaaggtttggggtcagactgctgtgaggagctagtggtgggcatgaatttaggttcgcatgggtggctggatggcaagttggcagtggggcaaatagaaagtcttaggcaaggatcagggatggaaggtggtcagtgttgttacaaaataaaggagggaacaggggctgactggctgtggtcagtggtcagcgtgtggtcatagggacagaggaggaggatgcaggggacgacatgctgctgaagcaccgcaaagagttctggtggttcccccacatgtggagccacatgcagccacacctgttccacaatcgctccgtgctggctgaccagatgaggctcaacaaacagtttgctctggtgagacccttggatctcttccccataatttctcccagccatgcttccttttctaccttcccctaatgggctacccttttcctatcctttgcgtttttctttatttggaggcttccccaccctctttaccctctactccccaaacctcaccaggtcctggtgagagtctatgccattcccaggagcatgggattcccacggacctggggtatgctgtggccccccaccactcgggtgtgtaccccatccacacgcagctctatgaggcctggaaatccgtgtggggcatccaggtgaccagcactgaggagtatccccatctccgccctgcccgctaccgccgtggcttcattcacaatggcattatggtgctgccccggcagacatgtggcctcttcactcacacaatcttctataatgagtatcctggaggctctcgtgaactagaccggagcatccgaggtggagagctctttctgacagtgctgcttaatccgatcagcatctttatgacccatctgtccaattatggaaatgaccggctgggcctatacacctttgagagcttggtgcgcttcctccagtgttggacacggctgcgcctacagacccttcctcctgtcccacttgcacagaagtactttgaacttttccctcaggagcgaagccccctttggcagaatccctgtgatgacaagaggcacaaagatatctggtccaaggagaaaacctgtgatcgtctcccgaagttcctcattgtgggaccccagaaaacagggactacagctattcacttcttcctgagcctgcacccagctgtaactagcagcttccctagccccagcacatttgaggagattcagttcttcaacagccctaattaccacaagggtattgactggtacatggatttcttccctgttccttccaatgccagcactgatttcctatttgaaaaaagtgccacctactttgactctgaagttgtaccacggcggggggctgccctcctgccacgagccaagatcatcacagtgctcaccaaccctgctgacagggcctactcctggtaccagcatcagcgagcccatggagacccagttgctctgaactataccttctatcaggtgatttcagcctcctcccagacccctctggcactacgctccctgcagaaccgctgtcttgtccctggctactattctacccatctacaacgctggctgacttactacccctctggacagttgctgattgtggatgggcaagagctgcgtaccaacccagcagcctcaatggagagcatccagaagttcctgggtatcacaccctttctgaactacacacggaccctcaggtttgatgatgataagggattttggtgccagggacttgaaggtggtaagactcgctgtctaggccggagcaaaggccggaggtatccagatatggacactgagtcccgtcttttccttacggattttttccggaaccataatttggagttgtcgaagctgctgagccggcttggacagccagtgccctcgtggcttcgggaagaactgcagcattccagtctgggctgatgtcccagcctcccataccagcaaaatgccccctgcttccctaagggtcaggtccagagcagggcccacaagggggattagagtggcctggcccctccccctctacctcagtagcccccaggcctgagatggctgagaagggaagggtatccttttcccacagttctgggacaaataaaggggcttcctttggtaccccacataatagtgctaggtacctttgacccatcatcttgggaggtggggaggaatgagagggtccaggcagggtgtaggggaatgtattagtccaatgagatttccctcttcatccgcagcagtgtatctattctatacctggctatgggagagaccccttgcatgggagggaccccttgctatggcccctttagccaggcagtgggatctacctgtggcccggcctccctaatgtcattcacattgaatggggatgaggtcggacagtggctcatagagccgagtatgagccctagctgtgggctagaaatgtccttaataaacatccttatttttctgttt

SEQ ID NO: 350338 - DNA, 3834 bp, Homo sapiens
attcctccctcccttcctccccccgccatgctccagttgtggaaggtggtacgcccagctcggcagctggaactgcaccgcctcatactgctgctgatcgctttcagcctgggctccatgggcttcctggcttattatgtgtccaccagccctaaggccaaggaacccttgcccctgcccttgggagactgcagcagcggtggggcagctggtcctggccctgcacggcctccagttccacctcggccccccaggcctccagagacagctcgaactgaacccgtggtccttgtgtttgtggagagtgcatactcacagctggggcaggaaattgtggccatcctggagtctagtcgttttcgttatagcactgagttggcacctggccgaggggacatgcccacattgactgataatacccatggccgctatgtcttggtcatttatgagaacctgctcaagtatgtcaacctggatgcctggagtcgggaactgctagaccggtactgcgtggagtatggtgtgggcatcattggctttttccgagcccacgagcacagcctactgagcgcccagctcaagggctttcccctttttttacactcaaacttggggctccgggactaccaagtgaatccttctgccccgctactgcatctcacacgccccagccgcctagaaccagggccactgcctggtgatgactggaccatcttccaatccaatcatagtacatatgaaccagtgcttcttgccagccttcggccagctgagcccgcagtgccaggaccagttcttcgtcgggcccggcttcccactgtggtacaggacctggggcttcatgatggcatccagcgggtgctctttggacatggcctttccttctggctccacaaacttatcttcgttgatgctgttgcatacctcactggcaagcgcctctgcctggaccttgaccgctacatcttggtagacatcgatgacatctttgtgggcaaggaagggacccgcatgaaggtggctgatgttgaggctctgttgaccacccagaacaaactcaggaccttagttcccaacttcaccttcaacttgggcttctcgggcaagttctatcatactgggacagaggaggaggatgcaggggacgacatgctgctgaagcaccgcaaagagttctggtggttcccccacatgtggagccacatgcagccacacctgttccacaatcgctccgtgctggctgaccagatgaggctcaacaaacagtttgctctggagcatgggattcccacggacctggggtatgctgtggccccccaccactcgggtgtgtaccccatccacacgcagctctatgaggcctggaaatccgtgtggggcatccaggtgaccagcactgaggagtatccccatctccgccctgcccgctaccgccgtggcttcattcacaatggcattatggtgctgccccggcagacatgtggcctcttcactcacacaatcttctataatgagtatcctggaggctctcgtgaactagaccggagcatccgaggtggagagctctttctgacagtgctgcttaatccgatcagcatctttatgacccatctgtccaattatggaaatgaccggctgggcctatacacctttgagagcttggtgcgcttcctccagtgttggacacggctgcgcctacagacccttcctcctgtcccacttgcacagaagtactttgaacttttccctcaggagcgaagccccctttggcagaatccctgtgatgacaagaggcacaaagatatctggtccaaggagaaaacctgtgatcgtctcccgaagttcctcattgtgggaccccagaaaacagggactacagctattcacttcttcctgagcctgcacccagctgtaactagcagcttccctagccccagcacatttgaggagattcagttcttcaacagccctaattaccacaagggtattgactggtacatggatttcttccctgttccttccaatgccagcactgatttcctatttgaaaaaagtgccacctactttgactctgaagttgtaccacggcggggggctgccctcctgccacgagccaagatcatcacagtgctcaccaaccctgctgacagggcctactcctggtaccagcatcagcgagcccatggagacccagttgctctgaactataccttctatcaggtgatttcagcctcctcccagacccctctggcactacgctccctgcagaaccgctgtcttgtccctggctactattctacccatctacaacgctggctgacttactacccctctggacagttgctgattgtggatgggcaagagctgcgtaccaacccagcagcctcaatggagagcatccagaagttcctgggtttgatgatgataagggattttggtgccagggacttgaaggtggtaagactcgctgtctaggccggagcaaaggccggaggtatccagatatggacactgaggaaacgtgggaagaataagtacgtgagagccagttgggagaaacaaagttgtgcaggccaagggcataaagcccaatctcgaaggcgcaaaggtgcaggttgcggtgaggaccctggtggccccctgaggaagatggatgtgtgaaaatggaagtgctgctgttgccccctgccttgatcagcactgtcttcgccagctcgaagtagaagtgtgcagctgcctctgatggctgattggtcttcgcccgggctcctccactggcactggcccggcgacttccactggaggatgaggagcccagggagtccgaagaagagctgctaatgctgtcactgtcctgacctcgaccccaggaggtgggggcccagccccctcgaagtggtctccggcttaaggtgggggaactatccgatgttgtttcaggggcactgctgtcaatgctggccatgcctaacccccaagagaagtcagtctcagaagtcaggagtcccagatgttaagactccaaccttcaggattatccttccctctatgctagcccacaggctatcctacctgtgtgcttcttcttaggccgtcctggggacccccatccccgtccattatagcctccacgactgccaagtgccaagcggctaggaaccttcccttctggccttggggtcaaagctgcctcagatggaagaccctcacagggggaatgtggggaactctctaggtgaggaaaacaggacgctgggatgagcccaggaaaggggacctcaacataggtccacaccattcatcccccctgcccagtgcccccacctcaccaggcacattcttctctgtgaagccctcagtggggcctggcccagcccctgccacactccctggttgagcaggccctgcagagcctgaggtcagtggttgcagggcccctggggcagatgggcccccgtgctttgaaggagacctctggctggctgtggttgggcggctagatgagtagaaagaactcagcgtctgtggcttatgtgtctggctctctcggtccaagagtttgtctaagatctggaagacagaagcagtgacctccagagaagcagtgacaggatgccctttagctcctgacttctattaccttcctttctccttgaaacagccaattgctacatcctcagggagccttccccacttacaaccacaggatgacctcctggtttacatgtctttttgtaacttatttaaccccaacatatcttggtatcctccattaacaccacagggcagaatatactgatagtcaataaatactgaaataagtgaaaaaaaaaa

SEQ ID NO: 350339 - DNA, 2403 bp, Homo sapiens
aaaaaaaaaaaaaaaaacaggtactgagtataaaacaatatgagagggtctctctcttccctcgctttaactttcggagggctgaaattctttctagccttggttaatacagcaattcattccattctagctattgttatttctcttactataattttactattagtacttacgctattctattattttcttaattttccacttaattaggataacaaaccgaggccgggctcccatcctcctcaagcacacgaggggggcctggcccagcagggagcttcgcctggtttctgagggaattcccggcgggcctttccaaaacatgcccgttcccttccgctaacttcaggggcggagaattgaactttcaccctcctcaagccggtggcgctgcctcgctggcgttcccagcgcgcagccaaccggatgccagccggcggcattagcactgccagcatggggcgcccgcggacctccgactgaggcagctgccgggagccggaagtgtcccgggcgccgggactgcgagggggccgggagttccccaagaccggaagtgtcccgaggccgggagcccgcgggaccccggagcgcgcggggccggaagaggcgggcggccagtggaggtccgcagagtttgggcgccaggcgagacggcagggcttaaagttccgggtgaggcgtgggtcccacaaccgcttggaatttgcctcccggctccgctctggaagctaagaaggggcacgagagccggagacgggaacctgagagcagggaagccagtagccggccggaggagcgcgcggccgctccagtcggaaggagccgttgcagccctgcccggcgtgtggcggggtcagcgaggcccctgcggtgcttcgcccgcgccttccgctccgcactcacccgccctctgggcctcccacaggaatcaaagatcaactcccactgaggacaaatggacctgtaattccgggtgtgacgagagaacgagatttaccttcctgaattaaaaaacaggtcattaagcttgggccctgactcttctttgtgagaaggtacagagatggaaaccttacaatccgagactaaaacgagggtccttccctcatggctgacagcccaggtggctacaaagaatgtggcaccaatgaaggcccccaagaggatgagaatggcagcagtgccagtggcagcagcaaggtgcgacagctctggtcagaagactcctgcgaatctgactccctgcgacaaggactgtgtactgcatgaatgaggctgagatagttgatgttgctctgggaatcctgattgagagccgcaaacaggaaaaggcctgcgagcagccggccctggcgggggctgataacccagagcactcccctccctgctccgtgtcgcctcacacaagttctgggagcagcagtgaggaagaggacagtgggaaacaggcactggctccaggcctcagcccttcccagaggccggggggttccagctctgcctgtagcaggagccctgaggaggaggaggaagaggatgtgctgaaatacgtccgggagatctttttcagctagggcataaactgtgcactgaactgtctgccgagagcagctggaggacagctgagcttccactggtgctgctgggccgcccgcctgtgggaatggggctctctgtgctcctacctttgtgccttcttgggcctggcagattcacctcaggccagaagcccctggacactccgggccttggggctgccgttctgagtgtgcggaaggcaggactcaaaatgagatcccatttgactccctctgtatgtactgtgccctctcctggctcttgaggctctggagtcccaattgtctgtgttagtcagtgaccaggttccagggaaaatgatgtcatgtggtggtccaacttactggaaccaaagagacagtactttgcaaagaaaaggatcactgccaggtgcactggaattgctacagtttagtccgcatgatctctcctgaaggaggaagcctgtttcaaaaatagtttccatcatgagtctatcaatgagctcccacctctccagccagcctagaaagcaaacgagctgcccacagttctctgccctgtctgggaggttgaggccacagtgtatagactggtaagccagacaggcctcctcccgcaagctgctaccttgctttcacctgtaccttggtccccgggcagctagctataaagcaagagggacaggagcccagaagagacactgaggacaagagatcacaccagagtacatgtctctgcctctgttttcagtgtggctttggacaggaatatatgaataaatcactgccatacaggttttccaatacacaagtgctagaaaatacacacaattccccaatg

SEQ ID NO: 350340 - DNA, 1396 bp, Homo sapiens
  misc_feature (1)..(3): n is a, c, g, or t
nnnagaaaggaggagtggaagggaaatggcaggcagatgcagtcctgagctggtgcccccttgccttcgcagtcgtgcctagtaaacagctctctgaactttggtacatttgttctgactgatgtcactatcagctgatttcactttcgtttcctaacttgccagtggcccatgacttttcagaaatgagagcaactaagaggtctttcttggctctatgagaacctggtgggattcctgaagataaagtccacaaaaatgaagctccagacaagactatggccaccaggagtttctcactttcaagctagtgcgcactcagcctctggcaatttgttaaaatcactgtttaagtgttcctaccagtttatgattctagcagcttctgcctcagacaagcagatctcagcagtgactccctggattcgtctgtctcttcagatttcagggtagtagtttacttgtcagcctcagttctctgatggatccaataagttgctgatttttagtttgttcagcttttttgttgttgtaaggacaggaatgttgactttcaagcattattcatgttgcagctaaaacgagaaggccccttattatctgtttaaatagtaagtctatattttcttctaagagtagttttaactcctacatttgtttctgtgatccattttttattatttttagtgtatggtataaggaacacggccaacttcattcttttgcatgtggatatccagttgtcccagtaccatttgctgaaaagactattttttttccccatccaattgtcctggcatctttgttgaaaaatcaattgaaatatatataaaggtttatttacatattttcaatcctatttcatttatctatatgtttacccttaggccagtaccacacagtctcaattactatagcttggtagtcagttttgaaatcaggaatccttaaacattgttctttatcaaaattgctttggttattctgggtcccttgtatttccatataaatttcagatttggtttgttagtttctgcacaaaaggtagctgacattttgatagggattgcactgaatctatcaatttgaggagtattgccatctagcaatattaaatcttctgatccatgaccagagttatcttgccatttatttaaagcttctttaatacagttcaactgtgttttttgtagttttcagtttataagtcttgtacttcttttgtaaaatttattcctaagtattttgttctttttgatgctaatgtaaatggaattgttttcttaatttcattttttaaatgttcattgctagtgtatagagatacaattgatttttataacaggtttttgagatgtaattcacataccatacagttcattcattacaactgaaa

SEQ ID NO: 350341 - DNA, 2269 bp, Homo sapiens
aaaaaaaaaaaaaaaaacaggtactgagtataaaacaatatgagagggtctctctcttccctcgctttaactttcggagggctgaaattctttctagccttggttaatacagcaattcattccattctagctattgttatttctcttactataattttactattagtacttacgctattctattattttcttaattttccacttaattaggataacaaaccgaggccgggctcccatcctcctcaagcacacgaggggggcctggcccagcagggagcttcgcctggtttctgagggaattcccggcgggcctttccaaaacatgcccgttcccttccgctaacttcaggggcggagaattgaactttcaccctcctcaagccggtggcgctgcctcgctggcgttcccagcgcgcagccaaccggatgccagccggcggcattagcactgccagcatggggcgcccgcggacctccgactgaggcagctgccgggagccggaagtgtcccgggcgccgggactgcgagggggccgggagttccccaagaccggaagtgtcccgaggccgggagcccgcgggaccccggagcgcgcggggccggaagaggcgggcggccagtggaggtccgcagagtttgggcgccaggcgagacggcagggcttaaagttccgggaatcaaagatcaactcccactgaggacaaatggacctgtaattccgggtgtgacgagagaacgagatttaccttcctgaattaaaaaacaggtcattaagcttgggccctgactcttctttgtgagaaggtacagagatggaaaccttacaatccgagactaaaacgagggtccttccctcatggctgacagcccaggtggctacaaagaatgtggcaccaatgaaggcccccaagaggatgagaatggcagcagtgccagtggcagcagcaaggtgcgacagctctggtcagaagactcctgcgaatctgactccctgcgacaaggactgtgtactgcatgaatgaggctgagatagttgatgttgctctgggaatcctgattgagagcaactaagaggtctttcttggctctatgagaacctggtgggattcctgaagataaagtccacaaaaatgaagctccagacaagactatggccaccaggagtttctcactttcaagctagtgcgcactcagcctctggcaatttgttaaaatcactgtttaagtgttcctaccagtttatgattctagcagcttctgcctcagacaagcagatctcagcagtgactccctggattcgtctgtctcttcagatttcagggtagtagtttacttgtcagcctcagttctctgatggatccaataagttgctgatttttagtttgttcagcttttttgttgttgtaaggacaggaatgttgactttcaagcattattcatgttgcagctaaaacgagaaggccccttattatctgtttaaatagtaagtctatattttcttctaagagtagttttaactcctacatttgtttctgtgatccattttttattatttttagtgtatggtataaggaacacggccaacttcattcttttgcatgtggatatccagttgtcccagtaccatttgctgaaaagactattttttttccccatccaattgtcctggcatctttgttgaaaaatcaattgaaatatatataaaggtttatttacatattttcaatcctatttcatttatctatatgtttacccttaggccagtaccacacagtctcaattactatagcttggtagtcagttttgaaatcaggaatccttaaacattgttctttatcaaaattgctttggttattctgggtcccttgtatttccatataaatttcagatttggtttgttagtttctgcacaaaaggtagctgacattttgatagggattgcactgaatctatcaatttgaggagtattgccatctagcaatattaaatcttctgatccatgaccagagttatcttgccatttatttaaagcttctttaatacagttcaactgtgttttttgtagttttcagtttataagtcttgtacttcttttgtaaaatttattcctaagtattttgttctttttgatgctaatgtaaatggaattgttttcttaatttcattttttaaatgttcattgctagtgtatagagatacaattgatttttataacaggtttttgagatgtaattcacataccatacagttcattcattacaactgaaa

SEQ ID NO: 350342 - DNA, 556 bp, Homo sapiens
ctctaaggtttcctgactgacagccttcccttgtgactgctgccgtctttccctaagtctggtcctgctttcaggttcctctcagtacagcctcagcccgaggttcccttcctcttgcatccatgtgtgtgtttcagaggcggccatccttccctacttccagatccttgtagggcagttggtggagggtgggaggcaccccggtgttgcctccatgaagccctgtgccagtcactgggctgcaaggctgaggaaattgtgtccgtgtcagaaagctcctcagctcagaggtgctggtacctcctgcgtggtaggaaggcagggggaagaggccctgcttctcctgttctctttgcccttatgagacttgagagtctgtgtcatctgtgccttgcatgtctttttttcagactccctgcgacaaggactgtgtactgcatgaatgaggctgagatagttgatgttgctctgggaatcctgattgaggtaaagtcagacaagcctcttactcatgaccagaaactctgcatgggcagaggctagacccttggtcacc

SEQ ID NO: 350343 - DNA, 3394 bp, Homo sapiens
aaaaaaaaaaaaaaaaacaggtactgagtataaaacaatatgagagggtctctctcttccctcgctttaactttcggagggctgaaattctttctagccttggttaatacagcaattcattccattctagctattgttatttctcttactataattttactattagtacttacgctattctattattttcttaattttccacttaattaggataacaaaccgaggccgggctcccatcctcctcaagcacacgaggggggcctggcccagcagggagcttcgcctggtttctgagggaattcccggcgggcctttccaaaacatgcccgttcccttccgctaacttcaggggcggagaattgaactttcaccctcctcaagccggtggcgctgcctcgctggcgttcccagcgcgcagccaaccggatgccagccggcggcattagcactgccagcatggggcgcccgcggacctccgactgaggcagctgccgggagccggaagtgtcccgggcgccgggactgcgagggggccgggagttccccaagaccggaagtgtcccgaggccgggagcccgcgggaccccggagcgcgcggggccggaagaggcgggcggccagtggaggtccgcagagtttgggcgccaggcgagacggcagggcttaaagttccgggtgaggcgtgggtcccacaaccgcttggaatttgcctcccggctccgctctggaagctaagaaggggcacgagagccggagacgggaacctgagagcagggaagccagtagccggccggaggagcgcgcggccgctccagtcggaaggagccgttgcagccctgcccggcgtgtggcggggtcagcgaggcccctgcggtgcttcgcccgcgccttccgctccgcactcacccgccctctgggcctcccacaggaatcaaagatcaactcccactgaggacaaatggacctgtaattccgggtgtgacgagagaacgagatttaccttcctgaattaaaaaacaggtcattaagcttgggccctgactcttctttgtgagaaggtacagagatggaaaccttacaatccgagactaaaacgagggtccttccctcatggctgacagcccaggtggctacaaagaatgtggcaccaatgaaggcccccaagaggatgagaatggcagcagtgccagtggcagcagcaaggtgcgacagctctggtcagaagactcctgcgaatctgactccctgcgacaaggactgtgtactgcatgaatgaggctgagatagttgatgttgctctgggaatcctgattgagagccgcaaacaggaaaaggcctgcgagcagccggccctggcgggggctgataacccagagcactcccctccctgctccgtgtcgcctcacacaagttctgggagcagcagtgaggaagaggacagtgggaaacaggcactggctccaggcctcagcccttcccagaggccggggggttccagctctgcctgtagcaggagccctgaggaggaggaggaagaggatgtgctgaaatacgtccgggagatctttttcagctagggcataaactgtgcactgaactgtctgccgagagcagctggaggacagctgagcttccactggtgctgctgggccgcccgcctgtgggaatggggctctctgtgctcctacctttgtgccttcttgggcctggcagattcacctcaggccagaagcccctggacactccgggccttggggctgccgttctgagtgtgcggaaggcaggactcaaaatgagatcccatttgactccctctgtatgtactgtgccctctcctggctcttgaggctctggagtcccaattgtctgtgttagtcagtgaccaggttccagggaaaatgatgtcatgtggtggtccaacttactggaaccaaagagacagtactttgcaaagaaaaggatcactgccaggtgcactggaattgctacagtttagtccgcatgatctctcctgaaggaggaagcctgtttcaaaaatagtttccatcatgagtctatcaatgagctcccacctctccagccagcctagaaagcaaacgagctgcccacagttctctgccctgtctgggaggttgaggccacagtgtatagactggtaagccagacaggcctcctcccgcaagctgctaccttgctttcacctgtaccttggtccccgggcagctagctataaagcaagagggacaggagcccagaagagacactgaggacaagagatcacaccagagtacatgtctctgcctctgttttcagtgtggctttggacaggaatatatgaataaatcactgccatacaggttttccaatacacaagtgctagaaaatacacacaattccccaatgcgtaagttgtgctaatgtctttccaagttctgggttgggaagtggagggtggcagcgtttgtttgtgcgcaaccgtccagtcctgttcacagcgaggatttggagtcctccagggtctcatcatgggagtgatttgtcagcggacgcctctgccctgtctggcttcaggtccagggaagctttgaagcagtcaagccttgtctttgtaccccatgtgtcctgtctttgttgagtcactcagagatcactcctggacctctggggttggagttccagtgatggcttatggcggcccactcactatggtgggctgagtggaagctccttaaccatgtccccagagacactgaggtgctcgctcttttaatgtcctcgtttgttgccgtaagttctttgctaggtttcattttggcatttggcaaatcagcctggaagtctggccccatgacagcaatcactccctccccaccctcctgaagctagaggaagatttgctcagatccattaattaaagcaggaattggtgtgacaatgagctgcatggtttagggagtctttgggagccttggaagtcctgaaggacagacaatcttgtactaagaagtcacaggtgccctggctgcccttgctgcccctcggcctctttgacacaggggccccacctcctctgtagtgggttccatcgctggagctggagatcagcgttagctgtaaaatgagatggctgagcagatgtgccacctctgaccatggttggaactgaacccttgcaatcacgtaagcctttagcagctctcaagcttgctctcagccctctcagccctcagagggaacacagccatggctataagcaagaggatgagtaaggcctgggcgctgccagagctagaaacccaggccccgggagggagagctgacccacttcacacataggagaggaagaggcccaggccgcctgccagcagcacagaggacacagccaggaagccca

SEQ ID NO: 350344 - DNA, 3517 bp, Homo sapiens
aaaaaaaaaaaaaaaaacaggtactgagtataaaacaatatgagagggtctctctcttccctcgctttaactttcggagggctgaaattctttctagccttggttaatacagcaattcattccattctagctattgttatttctcttactataattttactattagtacttacgctattctattattttcttaattttccacttaattaggataacaaaccgaggccgggctcccatcctcctcaagcacacgaggggggcctggcccagcagggagcttcgcctggtttctgagggaattcccggcgggcctttccaaaacatgcccgttcccttccgctaacttcaggggcggagaattgaactttcaccctcctcaagccggtggcgctgcctcgctggcgttcccagcgcgcagccaaccggatgccagccggcggcattagcactgccagcatggggcgcccgcggacctccgactgaggcagctgccgggagccggaagtgtcccgggcgccgggactgcgagggggccgggagttccccaagaccggaagtgtcccgaggccgggagcccgcgggaccccggagcgcgcggggccggaagaggcgggcggccagtggaggtccgcagagtttgggcgccaggcgagacggcagggcttaaagttccgggtgaggcgtgggtcccacaaccgcttggaatttgcctcccggctccgctctggaagctaagaaggggcacgagagccggagacgggaacctgagagcagggaagccagtagccggccggaggagcgcgcggccgctccagtcggaaggagccgttgcagccctgcccggcgtgtggcggggtcagcgaggcccctgcggtgcttcgcccgcgccttccgctccgcactcacccgccctctgggcctcccacaggtcggcgccgccagcggcgggtaccggcccgcagagggagggcgggctgtgaactggcagcacatcgcgttcccgcggggcccccattctgcccaggcagggagcggctgggatgggactgaggaatcaaagatcaactcccactgaggacaaatggacctgtaattccgggtgtgacgagagaacgagatttaccttcctgaattaaaaaacaggtcattaagcttgggccctgactcttctttgtgagaaggtacagagatggaaaccttacaatccgagactaaaacgagggtccttccctcatggctgacagcccaggtggctacaaagaatgtggcaccaatgaaggcccccaagaggatgagaatggcagcagtgccagtggcagcagcaaggtgcgacagctctggtcagaagactcctgcgaatctgactccctgcgacaaggactgtgtactgcatgaatgaggctgagatagttgatgttgctctgggaatcctgattgagagccgcaaacaggaaaaggcctgcgagcagccggccctggcgggggctgataacccagagcactcccctccctgctccgtgtcgcctcacacaagttctgggagcagcagtgaggaagaggacagtgggaaacaggcactggctccaggcctcagcccttcccagaggccggggggttccagctctgcctgtagcaggagccctgaggaggaggaggaagaggatgtgctgaaatacgtccgggagatctttttcagctagggcataaactgtgcactgaactgtctgccgagagcagctggaggacagctgagcttccactggtgctgctgggccgcccgcctgtgggaatggggctctctgtgctcctacctttgtgccttcttgggcctggcagattcacctcaggccagaagcccctggacactccgggccttggggctgccgttctgagtgtgcggaaggcaggactcaaaatgagatcccatttgactccctctgtatgtactgtgccctctcctggctcttgaggctctggagtcccaattgtctgtgttagtcagtgaccaggttccagggaaaatgatgtcatgtggtggtccaacttactggaaccaaagagacagtactttgcaaagaaaaggatcactgccaggtgcactggaattgctacagtttagtccgcatgatctctcctgaaggaggaagcctgtttcaaaaatagtttccatcatgagtctatcaatgagctcccacctctccagccagcctagaaagcaaacgagctgcccacagttctctgccctgtctgggaggttgaggccacagtgtatagactggtaagccagacaggcctcctcccgcaagctgctaccttgctttcacctgtaccttggtccccgggcagctagctataaagcaagagggacaggagcccagaagagacactgaggacaagagatcacaccagagtacatgtctctgcctctgttttcagtgtggctttggacaggaatatatgaataaatcactgccatacaggttttccaatacacaagtgctagaaaatacacacaattccccaatgcgtaagttgtgctaatgtctttccaagttctgggttgggaagtggagggtggcagcgtttgtttgtgcgcaaccgtccagtcctgttcacagcgaggatttggagtcctccagggtctcatcatgggagtgatttgtcagcggacgcctctgccctgtctggcttcaggtccagggaagctttgaagcagtcaagccttgtctttgtaccccatgtgtcctgtctttgttgagtcactcagagatcactcctggacctctggggttggagttccagtgatggcttatggcggcccactcactatggtgggctgagtggaagctccttaaccatgtccccagagacactgaggtgctcgctcttttaatgtcctcgtttgttgccgtaagttctttgctaggtttcattttggcatttggcaaatcagcctggaagtctggccccatgacagcaatcactccctccccaccctcctgaagctagaggaagatttgctcagatccattaattaaagcaggaattggtgtgacaatgagctgcatggtttagggagtctttgggagccttggaagtcctgaaggacagacaatcttgtactaagaagtcacaggtgccctggctgcccttgctgcccctcggcctctttgacacaggggccccacctcctctgtagtgggttccatcgctggagctggagatcagcgttagctgtaaaatgagatggctgagcagatgtgccacctctgaccatggttggaactgaacccttgcaatcacgtaagcctttagcagctctcaagcttgctctcagccctctcagccctcagagggaacacagccatggctataagcaagaggatgagtaaggcctgggcgctgccagagctagaaacccaggccccgggagggagagctgacccacttcacacataggagaggaagaggcccaggccgcctgccagcagcacagaggacacagccaggaagccca

SEQ ID NO: 350345 - DNA, 3109 bp, Homo sapiens
aaaaaaaaaaaaaaaaacaggtactgagtataaaacaatatgagagggtctctctcttccctcgctttaactttcggagggctgaaattctttctagccttggttaatacagcaattcattccattctagctattgttatttctcttactataattttactattagtacttacgctattctattattttcttaattttccacttaattaggataacaaaccgaggccgggctcccatcctcctcaagcacacgaggggggcctggcccagcagggagcttcgcctggtttctgagggaattcccggcgggcctttccaaaacatgcccgttcccttccgctaacttcaggggcggagaattgaactttcaccctcctcaagccggtggcgctgcctcgctggcgttcccagcgcgcagccaaccggatgccagccggcggcattagcactgccagcatggggcgcccgcggacctccgactgaggcagctgccgggagccggaagtgtcccgggcgccgggactgcgagggggccgggagttccccaagaccggaagtgtcccgaggccgggagcccgcgggaccccggagcgcgcggggccggaagaggcgggcggccagtggaggtccgcagagtttgggcgccaggcgagacggcagggcttaaagttccgggaatcaaagatcaactcccactgaggacaaatggacctgtaattccgggtgtgacgagagaacgagatttaccttcctgaattaaaaaacaggtcattaagcttgggccctgactcttctttgtgagaaggtacagagatggaaaccttacaatccgagactaaaacgagggtccttccctcatggctgacagcccaggtggctacaaagaatgtggcaccaatgaaggcccccaagaggatgagaatggcagcagtgccagtggcagcagcaaggtgcgacagctctggtcagaagactcctgcgaatctgactccctgcgacaaggactgtgtactgcatgaatgaggctgagatagttgatgttgctctgggaatcctgattgagagccgcaaacaggaaaaggcctgcgagcagccggccctggcgggggctgataacccagagcactcccctccctgctccgtgtcgcctcacacaagttctgggagcagcagtgaggaagaggacagtgggaaacaggcactggctccaggcctcagcccttcccagaggccggggggttccagctctgcctgtagcaggagccctgaggaggaggaggaagaggatgtgctgaaatacgtccgggagatctttttcagctagggcataaactgtgcactgaactgtctgccgagagcagctggaggacagctgagcttccactggtgctgctgggccgcccgcctgtgggaatggggctctctgtgctcctacctttgtgccttcttgggcctggcagattcacctcaggccagaagcccctggacactccgggccttggggctgccgttctgagtgtgcggaaggcaggactcaaaatgagatcccatttgactccctctgtatgtactgtgccctctcctggctcttgaggctctggagtcccaattgtctgtgttagtcagtgaccaggttccagggaaaatgatgtcatgtggtggtccaacttactggaaccaaagagacagtactttgcaaagaaaaggatcactgccaggtgcactggaattgctacagtttagtccgcatgatctctcctgaaggaggaagcctgtttcaaaaatagtttccatcatgagtctatcaatgagctcccacctctccagccagcctagaaagcaaacgagctgcccacaagtgtatagactggtaagccagacaggcctcctcccgcaagctgctaccttgctttcacctgtaccttggtccccgggcagctagctataaagcaagagggacaggagcccagaagagacactgaggacaagagatcacaccagagtacatgtctctgcctctgttttcagtgtggctttggacaggaatatatgaataaatcactgccatacaggttttccaatacacaagtgctagaaaatacacacaattccccaatgcgtaagttgtgctaatgtctttccaagttctgggttgggaagtggagggtggcagcgtttgtttgtgcgcaaccgtccagtcctgttcacagcgaggatttggagtcctccagggtctcatcatgggagtgatttgtcagcggacgcctctgccctgtctggcttcaggtccagggaagctttgaagcagtcaagccttgtctttgtaccccatgtgtcctgtctttgttgagtcactcagagatcactcctggacctctggggttggagttccagtgatggcttatggcggcccactcactatggtgggctgagtggaagctccttaaccatgtccccagagacactgaggtgctcgctcttttaatgtcctcgtttgttgccgtaagttctttgctaggtttcattttggcatttggcaaatcagcctggaagtctggccccatgacagcaatcactccctccccaccctcctgaagctagaggaagatttgctcagatccattaattaaagcaggaattggtgtgacaatgagctgcatggtttagggagtctttgggagccttggaagtcctgaaggacagacaatcttgtactaagaagtcacaggtgccctggctgcccttgctgcccctcggcctctttgacacaggggccccacctcctctgtagtgggttccatcgctggagctggagatcagcgttagctgtaaaatgagatggctgagcagatgtgccacctctgaccatggttggaactgaacccttgcaatcacgtaagcctttagcagctctcaagcttgctctcagccctctcagccctcagagggaacacagccatggctataagcaagaggatgagtaaggcctgggcgctgccagagctagaaacccaggccccgggagggagagctgacccacttcacacataggagaggaagaggcccaggccgcctgccagcagcacagaggacacagccaggaagccca

SEQ ID NO: 350346 - DNA, 2959 bp, Homo sapiens
tttagcttaagggcggcgtgttggccaatgagactttattgtgaaataaaatgccctcagtttcatttaactgagccaccatagaagagtagagaaatcgagttggccagatgagggagaggccattaagaggtattttagggattgaatgggctgggcacccagaggacagtggcatttggggtggtaatgagaaggaacattaggggcctccgcctccttccgttcctcctgtgctgagtcagtcagcacagaggctgcaggaggtatctctggttggctttggctgcctgtagggggcaccagctttggggaggtcagagggctctctcctgagctgctgtcctgcccacaatcacacctgcctgatgcctgtgaatggccgtctgagtctcttgggccttggtcacttctggcctgccctgcaccgaccagtaactgtgcctgatgactggaggtatgggaattcaccggactttattgttctttgtaggaatcaaagatcaactcccactgaggacaaatggacctgtaattccgggtgtgacgagagaacgagatttaccttcctgaattaaaaaacaggtcattaagcttgggccctgactcttctttgtgagaaggtacagagatggaaaccttacaatccgagactaaaacgagggtccttccctcatggctgacagcccaggtggctacaaagaatgtggcaccaatgaaggcccccaagaggatgagaatggcagcagtgccagtggcagcagcaaggtgcgacagctctggtcagaagactcctgcgaatctgactccctgcgacaaggactgtgtactgcatgaatgaggctgagatagttgatgttgctctgggaatcctgattgagagccgcaaacaggaaaaggcctgcgagcagccggccctggcgggggctgataacccagagcactcccctccctgctccgtgtcgcctcacacaagttctgggagcagcagtgaggaagaggacagtgggaaacaggcactggctccaggcctcagcccttcccagaggccggggggttccagctctgcctgtagcaggagccctgaggaggaggaggaagaggatgtgctgaaatacgtccgggagatctttttcagctagggcataaactgtgcactgaactgtctgccgagagcagctggaggacagctgagcttccactggtgctgctgggccgcccgcctgtgggaatggggctctctgtgctcctacctttgtgccttcttgggcctggcagattcacctcaggccagaagcccctggacactccgggccttggggctgccgttctgagtgtgcggaaggcaggactcaaaatgagatcccatttgactccctctgtatgtactgtgccctctcctggctcttgaggctctggagtcccaattgtctgtgttagtcagtgaccaggttccagggaaaatgatgtcatgtggtggtccaacttactggaaccaaagagacagtactttgcaaagaaaaggatcactgccaggtgcactggaattgctacagtttagtccgcatgatctctcctgaaggaggaagcctgtttcaaaaatagtttccatcatgagtctatcaatgagctcccacctctccagccagcctagaaagcaaacgagctgcccacagttctctgccctgtctgggaggttgaggccacagtgtatagactggtaagccagacaggcctcctcccgcaagctgctaccttgctttcacctgtaccttggtccccgggcagctagctataaagcaagagggacaggagcccagaagagacactgaggacaagagatcacaccagagtacatgtctctgcctctgttttcagtgtggctttggacaggaatatatgaataaatcactgccatacaggttttccaatacacaagtgctagaaaatacacacaattccccaatgcgtaagttgtgctaatgtctttccaagttctgggttgggaagtggagggtggcagcgtttgtttgtgcgcaaccgtccagtcctgttcacagcgaggatttggagtcctccagggtctcatcatgggagtgatttgtcagcggacgcctctgccctgtctggcttcaggtccagggaagctttgaagcagtcaagccttgtctttgtaccccatgtgtcctgtctttgttgagtcactcagagatcactcctggacctctggggttggagttccagtgatggcttatggcggcccactcactatggtgggctgagtggaagctccttaaccatgtccccagagacactgaggtgctcgctcttttaatgtcctcgtttgttgccgtaagttctttgctaggtttcattttggcatttggcaaatcagcctggaagtctggccccatgacagcaatcactccctccccaccctcctgaagctagaggaagatttgctcagatccattaattaaagcaggaattggtgtgacaatgagctgcatggtttagggagtctttgggagccttggaagtcctgaaggacagacaatcttgtactaagaagtcacaggtgccctggctgcccttgctgcccctcggcctctttgacacaggggccccacctcctctgtagtgggttccatcgctggagctggagatcagcgttagctgtaaaatgagatggctgagcagatgtgccacctctgaccatggttggaactgaacccttgcaatcacgtaagcctttagcagctctcaagcttgctctcagccctctcagccctcagagggaacacagccatggctataagcaagaggatgagtaaggcctgggcgctgccagagctagaaacccaggccccgggagggagagctgacccacttcacacataggagaggaagaggcccaggccgcctgccagcagcacagaggacacagccaggaagccca

SEQ ID NO: 350347 - DNA, 2598 bp, Homo sapiens
tttagcttaagggcggcgtgttggccaatgagactttattgtgaaataaaatgccctcagtttcatttaactgagccaccatagaagagtagagaaatcgagttggccagatgagggagaggccattaagaggaatcaaagatcaactcccactgaggacaaatggacctgtaattccgggtgtgacgagagaacgagatttaccttcctgaattaaaaaacaggtcattaagcttgggccctgactcttctttgtgagaaggtacagagatggaaaccttacaatccgagactaaaacgagggtccttccctcatggctgacagcccaggtggctacaaagaatgtggcaccaatgaaggcccccaagaggatgagaatggcagcagtgccagtggcagcagcaaggtgcgacagctctggtcagaagactcctgcgaatctgactccctgcgacaaggactgtgtactgcatgaatgaggctgagatagttgatgttgctctgggaatcctgattgagagccgcaaacaggaaaaggcctgcgagcagccggccctggcgggggctgataacccagagcactcccctccctgctccgtgtcgcctcacacaagttctgggagcagcagtgaggaagaggacagtgggaaacaggcactggctccaggcctcagcccttcccagaggccggggggttccagctctgcctgtagcaggagccctgaggaggaggaggaagaggatgtgctgaaatacgtccgggagatctttttcagctagggcataaactgtgcactgaactgtctgccgagagcagctggaggacagctgagcttccactggtgctgctgggccgcccgcctgtgggaatggggctctctgtgctcctacctttgtgccttcttgggcctggcagattcacctcaggccagaagcccctggacactccgggccttggggctgccgttctgagtgtgcggaaggcaggactcaaaatgagatcccatttgactccctctgtatgtactgtgccctctcctggctcttgaggctctggagtcccaattgtctgtgttagtcagtgaccaggttccagggaaaatgatgtcatgtggtggtccaacttactggaaccaaagagacagtactttgcaaagaaaaggatcactgccaggtgcactggaattgctacagtttagtccgcatgatctctcctgaaggaggaagcctgtttcaaaaatagtttccatcatgagtctatcaatgagctcccacctctccagccagcctagaaagcaaacgagctgcccacagttctctgccctgtctgggaggttgaggccacagtgtatagactggtaagccagacaggcctcctcccgcaagctgctaccttgctttcacctgtaccttggtccccgggcagctagctataaagcaagagggacaggagcccagaagagacactgaggacaagagatcacaccagagtacatgtctctgcctctgttttcagtgtggctttggacaggaatatatgaataaatcactgccatacaggttttccaatacacaagtgctagaaaatacacacaattccccaatgcgtaagttgtgctaatgtctttccaagttctgggttgggaagtggagggtggcagcgtttgtttgtgcgcaaccgtccagtcctgttcacagcgaggatttggagtcctccagggtctcatcatgggagtgatttgtcagcggacgcctctgccctgtctggcttcaggtccagggaagctttgaagcagtcaagccttgtctttgtaccccatgtgtcctgtctttgttgagtcactcagagatcactcctggacctctggggttggagttccagtgatggcttatggcggcccactcactatggtgggctgagtggaagctccttaaccatgtccccagagacactgaggtgctcgctcttttaatgtcctcgtttgttgccgtaagttctttgctaggtttcattttggcatttggcaaatcagcctggaagtctggccccatgacagcaatcactccctccccaccctcctgaagctagaggaagatttgctcagatccattaattaaagcaggaattggtgtgacaatgagctgcatggtttagggagtctttgggagccttggaagtcctgaaggacagacaatcttgtactaagaagtcacaggtgccctggctgcccttgctgcccctcggcctctttgacacaggggccccacctcctctgtagtgggttccatcgctggagctggagatcagcgttagctgtaaaatgagatggctgagcagatgtgccacctctgaccatggttggaactgaacccttgcaatcacgtaagcctttagcagctctcaagcttgctctcagccctctcagccctcagagggaacacagccatggctataagcaagaggatgagtaaggcctgggcgctgccagagctagaaacccaggccccgggagggagagctgacccacttcacacataggagaggaagaggcccaggccgcctgccagcagcacagaggacacagccaggaagccca

SEQ ID NO: 350348 - DNA, 2921 bp, Homo sapiens
aaaaaaaaaaaaaaaaacaggtactgagtataaaacaatatgagagggtctctctcttccctcgctttaactttcggagggctgaaattctttctagccttggttaatacagcaattcattccattctagctattgttatttctcttactataattttactattagtacttacgctattctattattttcttaattttccacttaattaggataacaaaccgaggccgggctcccatcctcctcaagcacacgaggggggcctggcccagcagggagcttcgcctggtttctgagggaattcccggcgggcctttccaaaacatgcccgttcccttccgctaacttcaggggcggagaattgaactttcaccctcctcaagccggtggcgctgcctcgctggcgttcccagcgcgcagccaaccggatgccagccggcggcattagcactgccagcatggggcgcccgcggacctccgactgaggcagctgccgggagccggaagtgtcccgggcgccgggactgcgagggggccgggagttccccaagaccggaagtgtcccgaggccgggagcccgcgggaccccggagcgcgcggggccggaagaggcgggcggccagtggaggtccgcagagtttgggcgccaggcgagacggcagggcttaaagttccgggaatcaaagatcaactcccactgaggacaaatggacctgtaattccgggtgtgacgagagaacgagatttaccttcctgaattaaaaaacagactccctgcgacaaggactgtgtactgcatgaatgaggctgagatagttgatgttgctctgggaatcctgattgagagccgcaaacaggaaaaggcctgcgagcagccggccctggcgggggctgataacccagagcactcccctccctgctccgtgtcgcctcacacaagttctgggagcagcagtgaggaagaggacagtgggaaacaggcactggctccaggcctcagcccttcccagaggccggggggttccagctctgcctgtagcaggagccctgaggaggaggaggaagaggatgtgctgaaatacgtccgggagatctttttcagctagggcataaactgtgcactgaactgtctgccgagagcagctggaggacagctgagcttccactggtgctgctgggccgcccgcctgtgggaatggggctctctgtgctcctacctttgtgccttcttgggcctggcagattcacctcaggccagaagcccctggacactccgggccttggggctgccgttctgagtgtgcggaaggcaggactcaaaatgagatcccatttgactccctctgtatgtactgtgccctctcctggctcttgaggctctggagtcccaattgtctgtgttagtcagtgaccaggttccagggaaaatgatgtcatgtggtggtccaacttactggaaccaaagagacagtactttgcaaagaaaaggatcactgccaggtgcactggaattgctacagtttagtccgcatgatctctcctgaaggaggaagcctgtttcaaaaatagtttccatcatgagtctatcaatgagctcccacctctccagccagcctagaaagcaaacgagctgcccacagttctctgccctgtctgggaggttgaggccacagtgtatagactggtaagccagacaggcctcctcccgcaagctgctaccttgctttcacctgtaccttggtccccgggcagctagctataaagcaagagggacaggagcccagaagagacactgaggacaagagatcacaccagagtacatgtctctgcctctgttttcagtgtggctttggacaggaatatatgaataaatcactgccatacaggttttccaatacacaagtgctagaaaatacacacaattccccaatgcgtaagttgtgctaatgtctttccaagttctgggttgggaagtggagggtggcagcgtttgtttgtgcgcaaccgtccagtcctgttcacagcgaggatttggagtcctccagggtctcatcatgggagtgatttgtcagcggacgcctctgccctgtctggcttcaggtccagggaagctttgaagcagtcaagccttgtctttgtaccccatgtgtcctgtctttgttgagtcactcagagatcactcctggacctctggggttggagttccagtgatggcttatggcggcccactcactatggtgggctgagtggaagctccttaaccatgtccccagagacactgaggtgctcgctcttttaatgtcctcgtttgttgccgtaagttctttgctaggtttcattttggcatttggcaaatcagcctggaagtctggccccatgacagcaatcactccctccccaccctcctgaagctagaggaagatttgctcagatccattaattaaagcaggaattggtgtgacaatgagctgcatggtttagggagtctttgggagccttggaagtcctgaaggacagacaatcttgtactaagaagtcacaggtgccctggctgcccttgctgcccctcggcctctttgacacaggggccccacctcctctgtagtgggttccatcgctggagctggagatcagcgttagctgtaaaatgagatggctgagcagatgtgccacctctgaccatggttggaactgaacccttgcaatcacgtaagcctttagcagctctcaagcttgctctcagccctctcagccctcagagggaacacagccatggctataagcaagaggatgagtaaggcctgggcgctgccagagctagaaacccaggccccgggagggagagctgacccacttcacacataggagaggaagaggcccaggccgcctgccagcagcacagaggacacagccaggaagccca

SEQ ID NO: 350349 - DNA, 1664 bp, Homo sapiens
gcgatctggctgcgacatctgtcacccattgatcgccagggttgattcggctgatctggctgccgttctgagtgtgcggaaggcaggactcaaaatgagatcccatttgactccctctgtatgtactgtgccctctcctggctcttgaggctctggagtcccaattgtctgtgttagtcagtgaccaggttccagggaaaatgatgtcatgtggtggtccaacttactggaaccaaagagacagtactttgcaaagaaaaggatcactgccaggtgcactggaattgctacagtttagtccgcatgatctctcctgaaggaggaagcctgtttcaaaaatagtttccatcatgagtctatcaatgagctcccacctctccagccagcctagaaagcaaacgagctgcccacaagtgtatagactggtaagccagacaggcctcctcccgcaagctgctaccttgctttcacctgtaccttggtccccgggcagctagctataaagcaagagggacaggagcccagaagagacactgaggacaagagatcacaccagagtacatgtctctgcctctgttttcagtgtggctttggacaggaatatatgaataaatcactgccatacaggttttccaatacacaagtgctagaaaatacacacaattccccaatgcgtaagttgtgctaatgtctttccaagttctgggttgggaagtggagggtggcagcgtttgtttgtgcgcaaccgtccagtcctgttcacagcgaggatttggagtcctccagggtctcatcatgggagtgatttgtcagcggacgcctctgccctgtctggcttcaggtccagggaagctttgaagcagtcaagccttgtctttgtaccccatgtgtcctgtctttgttgagtcactcagagatcactcctggacctctggggttggagttccagtgatggcttatggcggcccactcactatggtgggctgagtggaagctccttaaccatgtccccagagacactgaggtgctcgctcttttaatgtcctcgtttgttgccgtaagttctttgctaggtttcattttggcatttggcaaatcagcctggaagtctggccccatgacagcaatcactccctccccaccctcctgaagctagaggaagatttgctcagatccattaattaaagcaggaattggtgtgacaatgagctgcatggtttagggagtctttgggagccttggaagtcctgaaggacagacaatcttgtactaagaagtcacaggtgccctggctgcccttgctgcccctcggcctctttgacacaggggccccacctcctctgtagtgggttccatcgctggagctggagatcagcgttagctgtaaaatgagatggctgagcagatgtgccacctctgaccatggttggaactgaacccttgcaatcacgtaagcctttagcagctctcaagcttgctctcagccctctcagccctcagagggaacacagccatggctataagcaagaggatgagtaaggcctgggcgctgccagagctagaaacccaggccccgggagggagagctgacccacttcacacataggagaggaagaggcccaggccgcctgccagcagcacagaggacacagccaggaagccca

SEQ ID NO: 350350 - DNA, 2522 bp, Homo sapiens
aaaaaaaaaaaaaaaaacaggtactgagtataaaacaatatgagagggtctctctcttccctcgctttaactttcggagggctgaaattctttctagccttggttaatacagcaattcattccattctagctattgttatttctcttactataattttactattagtacttacgctattctattattttcttaattttccacttaattaggataacaaaccgaggccgggctcccatcctcctcaagcacacgaggggggcctggcccagcagggagcttcgcctggtttctgagggaattcccggcgggcctttccaaaacatgcccgttcccttccgctaacttcaggggcggagaattgaactttcaccctcctcaagccggtggcgctgcctcgctggcgttcccagcgcgcagccaaccggatgccagccggcggcattagcactgccagcatggggcgcccgcggacctccgactgaggcagctgccgggagccggaagtgtcccgggcgccgggactgcgagggggccgggagttccccaagaccggaagtgtcccgaggccgggagcccgcgggaccccggagcgcgcggggccggaagaggcgggcggccagtggaggtccgcagagtttgggcgccaggcgagacggcagggcttaaagttccgggtgaggcgtgggtcccacaaccgcttggaatttgcctcccggctccgctctggaagctaagaaggggcacgagagccggagacgggaacctgagagcagggaagccagtagccggccggaggagcgcgcggccgctccagtcggaaggagccgttgcagccctgcccggcgtgtggcggggtcagcgaggcccctgcggtgcttcgcccgcgccttccgctccgcactcacccgccctctgggcctcccacaggaatcaaagatcaactcccactgaggacaaatggacctgtaattccgggtgtgacgagagaacgagatttaccttcctgaattaaaaaacaggtcattaagcttgggccctgactcttctttgtgagaaggtacagagatggaaaccttacaatccgagactaaaacgagggtccttccctcatggctgacagcccaggtggctacaaagaatgtggcaccaatgaaggcccccaagaggatgagaatggcagcagtgccagtggcagcagcaaggtgcgacagctctggtcagaagactcctgcgaatctgactccctgcgacaaggactgtgtactgcatgaatgaggctgagatagttgatgttgctctgggaatcctgattgagagcaactaagaggtctttcttggctctatgagaacctggtgggattcctgaagataaagtccacaaaaatgaagctccagacaagactatggccaccaggagtttctcactttcaagctagtgcgcactcagcctctggcaatttgttaaaatcactgtttaagtgttcctaccagtttatgattctagcagcttctgcctcagacaagcagatctcagcagtgactccctggattcgtctgtctcttcagatttcagggtagtagtttacttgtcagcctcagttctctgatggatccaataagttgctgatttttagtttgttcagcttttttgttgttgtaaggacaggaatgttgactttcaagcattattcatgttgcagctaaaacgagaaggccccttattatctgtttaaatagtaagtctatattttcttctaagagtagttttaactcctacatttgtttctgtgatccattttttattatttttagtgtatggtataaggaacacggccaacttcattcttttgcatgtggatatccagttgtcccagtaccatttgctgaaaagactattttttttccccatccaattgtcctggcatctttgttgaaaaatcaattgaaatatatataaaggtttatttacatattttcaatcctatttcatttatctatatgtttacccttaggccagtaccacacagtctcaattactatagcttggtagtcagttttgaaatcaggaatccttaaacattgttctttatcaaaattgctttggttattctgggtcccttgtatttccatataaatttcagatttggtttgttagtttctgcacaaaaggtagctgacattttgatagggattgcactgaatctatcaatttgaggagtattgccatctagcaatattaaatcttctgatccatgaccagagttatcttgccatttatttaaagcttctttaatacagttcaactgtgttttttgtagttttcagtttataagtcttgtacttcttttgtaaaatttattcctaagtattttgttctttttgatgctaatgtaaatggaattgttttcttaatttcattttttaaatgttcattgctagtgtatagagatacaattgatttttataacaggtttttgagatgtaattcacataccatacagttcattcattacaactgaaa

SEQ ID NO: 350351 - DNA, 1763 bp, Homo sapiens
aaaaaaaaaaaaaaaaacaggtactgagtataaaacaatatgagagggtctctctcttccctcgctttaactttcggagggctgaaattctttctagccttggttaatacagcaattcattccattctagctattgttatttctcttactataattttactattagtacttacgctattctattattttcttaattttccacttaattaggataacaaaccgaggccgggctcccatcctcctcaagcacacgaggggggcctggcccagcagggagcttcgcctggtttctgagggaattcccggcgggcctttccaaaacatgcccgttcccttccgctaacttcaggggcggagaattgaactttcaccctcctcaagccggtggcgctgcctcgctggcgttcccagcgcgcagccaaccggatgccagccggcggcattagcactgccagcatggggcgcccgcggacctccgactgaggcagctgccgggagccggaagtgtcccgggcgccgggactgcgagggggccgggagttccccaagaccggaagtgtcccgaggccgggagcccgcgggaccccggagcgcgcggggccggaagaggcgggcggccagtggaggtccgcagagtttgggcgccaggcgagacggcagggcttaaagttccgggtgaggcgtgggtcccacaaccgcttggaatttgcctcccggctccgctctggaagctaagaaggggcacgagagccggagacgggaacctgagagcagggaagccagtagccggccggaggagcgcgcggccgctccagtcggaaggagccgttgcagccctgcccggcgtgtggcggggtcagcgaggcccctgcggtgcttcgcccgcgccttccgctccgcactcacccgccctctgggcctcccacaggtcggcgccgccagcggcgggtaccggcccgcagagggagggcgggctgtgaactggcagcacatcgcgttcccgcggggcccccattctgcccaggcagggagcggctgggatgggactgaggtcggtccgcgagcgcggtgccccagagacccggcttctggaagttgccgcggcctgctcttggggcccagaagtagggcggggaggcgcggggtctggagtctgcaggacctggctgcgaatccaaccagctgatttcaaacttttctgtgatcttctgcaagttaactaagtctcagttcctcgtttgcgaaatgtacttaataggcaccccagggtgaactaaatttgtccgcacagactgcagcattgcgcttgggaggcgccttagggggtaggagtcactaatatcactgagttttgacagaaatgaaggtgcattggcaaaggtgtgccccatggccgggcaggttaggaggagggcctggtaatattttttcttaaattgtaaacagccatctggatgagcaatacattatcaaattatgattcagagaggactatcgctgactactcttttttttgggcaaacctccgcttcaggagcttctggcttgattcctaagtggaaggtagagacctaggccctctgagtcacaactccatctctctgggtgaggactgagctccaggactgctgagtggaggcagaacaattgggatagggaaaagagaggccaaactagatcagaggctggcgtgggcttcagaatctacagactggcacagttaatgcctccgggcccctattgctgcttcaagtttgaccaat

SEQ ID NO: 350352 - DNA, 1597 bp, Homo sapiens
aaaaaaaaaaaaaaaaacaggtactgagtataaaacaatatgagagggtctctctcttccctcgctttaactttcggagggctgaaattctttctagccttggttaatacagcaattcattccattctagctattgttatttctcttactataattttactattagtacttacgctattctattattttcttaattttccacttaattaggataacaaaccgaggccgggctcccatcctcctcaagcacacgaggggggcctggcccagcagggagcttcgcctggtttctgagggaattcccggcgggcctttccaaaacatgcccgttcccttccgctaacttcaggggcggagaattgaactttcaccctcctcaagccggtggcgctgcctcgctggcgttcccagcgcgcagccaaccggatgccagccggcggcattagcactgccagcatggggcgcccgcggacctccgactgaggcagctgccgggagccggaagtgtcccgggcgccgggactgcgagggggccgggagttccccaagaccggaagtgtcccgaggccgggagcccgcgggaccccggagcgcgcggggccggaagaggcgggcggccagtggaggtccgcagagtttgggcgccaggcgagacggcagggcttaaagttccgggtgaggcgtgggtcccacaaccgcttggaatttgcctcccggctccgctctggaagctaagaaggggcacgagagccggagacgggaacctgagagcagggaagccagtagccggccggaggagcgcgcggccgctccagtcggaaggagccgttgcagccctgcccggcgtgtggcggggtcagcgaggcccctgcggtgcttcgcccgcgccttccgctccgcactcacccgccctctgggcctcccacaggaatcaaagatcaactcccactgaggacaaatggacctgtaattccgggtgtgacgagagaacgagatttaccttcctgaattaaaaaacaggtcattaagcttgggccctgactcttctttgtgagaaggtacagagatggaaaccttacaatccgagactaaaacgagggtccttccctcatggctgacagcccaggtggctacaaagaatgtggcaccaatgaaggcccccaagaggatgagaatggcagcagtgccagtggcagcagcaaggtgcgacagctctggtcagaagactcctgcgaatctggcaagtggagcaggggcctccatgacctgggccaggtcttccagcctaggcagaacagcaagatgggcgggtgtttcagtctgatcatctcttgagcttttagaaggtggaggggctgtgggcgggaggcaaagcgggttaaccctcgaggacaggcacccacttctgcctctgcactggtgagtgccctgccctcagcacacacagagtgggttctccatgtcagccagtctctgatgccagttgtccagaatgccagtctcttcctttacaacaaacatggtaacatcagatgggcaagatcagtggaagggtctgttctgagtggtgcctgcccctgtggacagacctttaggg

SEQ ID NO: 350353 - DNA, 1022 bp, Homo sapiens
  misc_feature (1014)..(1014): n is a, c, g, or t
aaaaaaaaaaaaaaaaacaggtactgagtataaaacaatatgagagggtctctctcttccctcgctttaactttcggagggctgaaattctttctagccttggttaatacagcaattcattccattctagctattgttatttctcttactataattttactattagtacttacgctattctattattttcttaattttccacttaattaggataacaaaccgaggccgggctcccatcctcctcaagcacacgaggggggcctggcccagcagggagcttcgcctggtttctgagggaattcccggcgggcctttccaaaacatgcccgttcccttccgctaacttcaggggcggagaattgaactttcaccctcctcaagccggtggcgctgcctcgctggcgttcccagcgcgcagccaaccggatgccagccggcggcattagcactgccagcatggggcgcccgcggacctccgactgaggcagctgccgggagccggaagtgtcccgggcgccgggactgcgagggggccgggagttccccaagaccggaagtgtcccgaggccgggagcccgcgggaccccggagcgcgcggggccggaagaggcgggcggccagtggaggtccgcagagtttgggcgccaggcgagacggcagggcttaaagttccgggtgaggcgtgggtcccacaaccgcttggaatttgcctcccggctccgctctggaagctaagaaggggcacgagagccggagacgggaacctgagagcagggaagccagtagccggccggaggagcgcgcggccgctccagtcggaaggagccgttgcagccctgcccggcgtgtggcggggtcagcgaggcccctgcggtgcttcgcccgcgccttccgctccgcactcacccgccctctgggcctcccacaggaatcaaagatcaactcccactgaggacaaatggacctgtaattccgggtgtgacgagagaacgagatttacaggtccatttgtcntcagtggg

SEQ ID NO: 350354 - DNA, 1162 bp, Homo sapiens
tttagcttaagggcggcgtgttggccaatgagactttattgtgaaataaaatgccctcagtttcatttaactgagccaccatagaagagtagagaaatcgagttggccagatgagggagaggccattaagaggtattttagggattgaatgggctgggcacccagaggacagtggcatttggggtggtaatgagaaggaacattaggggcctccgcctccttccgttcctcctgtgctgagtcagtcagcacagaggctgcaggaggtatctctggttggctttggctgcctgtagggggcaccagctttggggaggtcagagggctctctcctgagctgctgtcctgcccacaatcacacctgcctgatgcctgtgaatggccgtctgagtctcttgggccttggtcacttctggcctgccctgcaccgaccagtaactgtgcctgatgactggaggtatgggaattcaccggactttattgttctttgtaggaatcaaagatcaactcccactgaggacaaatggacctgtaattccgggtgtgacgagagaacgagatttaccttcctgaattaaaaaacaggtcattaagcttgggccctgactcttctttgtgagaaggtacagagatggaaaccttacaatccgagactaaaacgagggtccttccctcatggctgacagcccaggtggctacaaagaatgtggcaccaatgaaggcccccaagaggatgagaatggcagcagtgccagtggcagcagcaaggtgcgacagctctggtcagaagactcctgcgaatctggcaagtggagcaggggcctccatgacctgggccaggtcttccagcctaggcagaacagcaagatgggcgggtgtttcagtctgatcatctcttgagcttttagaaggtggaggggctgtgggcgggaggcaaagcgggttaaccctcgaggacaggcacccacttctgcctctgcactggtgagtgccctgccctcagcacacacagagtgggttctccatgtcagccagtctctgatgccagttgtccagaatgccagtctcttcctttacaacaaacatggtaacatcagatgggcaagatcagtggaagggtctgttctgagtggtgcctgcccctgtggacagacctttaggg

SEQ ID NO: 350355 - DNA, 2113 bp, Homo sapiens
aaaaaaaaaaaaaaaaacaggtactgagtataaaacaatatgagagggtctctctcttccctcgctttaactttcggagggctgaaattctttctagccttggttaatacagcaattcattccattctagctattgttatttctcttactataattttactattagtacttacgctattctattattttcttaattttccacttaattaggataacaaaccgaggccgggctcccatcctcctcaagcacacgaggggggcctggcccagcagggagcttcgcctggtttctgagggaattcccggcgggcctttccaaaacatgcccgttcccttccgctaacttcaggggcggagaattgaactttcaccctcctcaagccggtggcgctgcctcgctggcgttcccagcgcgcagccaaccggatgccagccggcggcattagcactgccagcatggggcgcccgcggacctccgactgaggcagctgccgggagccggaagtgtcccgggcgccgggactgcgagggggccgggagttccccaagaccggaagtgtcccgaggccgggagcccgcgggaccccggagcgcgcggggccggaagaggcgggcggccagtggaggtccgcagagtttgggcgccaggcgagacggcagggcttaaagttccgggaatcaaagatcaactcccactgaggacaaatggacctgtaattccgggtgtgacgagagaacgagatttaccttcctgaattaaaaaacaggtcattaagcttgggccctgactcttctttgtgagaaggtacagagatggaaaccttacaatccgagactaaaacgagggtccttccctcatggctgacagcccaggtggctacaaagaatgtggcaccaatgaaggcccccaagaggatgagaatggcagcagtgccagtggcagcagcaagactccctgcgacaaggactgtgtactgcatgaatgaggctgagatagttgatgttgctctgggaatcctgattgagagccgcaaacaggaaaaggcctgcgagcagccggccctggcgggggctgataacccagagcactcccctccctgctccgtgtcgcctcacacaagttctgggagcagcagtgaggaagaggacagtgggaaacaggcactggctccaggcctcagcccttcccagaggccggggggttccagctctgcctgtagcaggagccctgaggaggaggaggaagaggatgtgctgaaatacgtccgggagatctttttcagctagggcataaactgtgcactgaactgtctgccgagagcagctggaggacagctgagcttccactggtgctgctgggccgcccgcctgtgggaatggggctctctgtgctcctacctttgtgccttcttgggcctggcagattcacctcaggccagaagcccctggacactccgggccttggggctgccgttctgagtgtgcggaaggcaggactcaaaatgagatcccatttgactccctctgtatgtactgtgccctctcctggctcttgaggctctggagtcccaattgtctgtgttagtcagtgaccaggttccagggaaaatgatgtcatgtggtggtccaacttactggaaccaaagagacagtactttgcaaagaaaaggatcactgccaggtgcactggaattgctacagtttagtccgcatgatctctcctgaaggaggaagcctgtttcaaaaatagtttccatcatgagtctatcaatgagctcccacctctccagccagcctagaaagcaaacgagctgcccacagttctctgccctgtctgggaggttgaggccacagtgtatagactggtaagccagacaggcctcctcccgcaagctgctaccttgctttcacctgtaccttggtccccgggcagctagctataaagcaagagggacaggagcccagaagagacactgaggacaagagatcacaccagagtacatgtctctgcctctgttttcagtgtggctttggacaggaatatatgaataaatcactgccatacaggttttccaatacacaagtgctagaaaatacacacaattccccaatg

SEQ ID NO: 350356 - DNA, 3141 bp, Homo sapiens
aaaaaaaaaaaaaaaaacaggtactgagtataaaacaatatgagagggtctctctcttccctcgctttaactttcggagggctgaaattctttctagccttggttaatacagcaattcattccattctagctattgttatttctcttactataattttactattagtacttacgctattctattattttcttaattttccacttaattaggataacaaaccgaggccgggctcccatcctcctcaagcacacgaggggggcctggcccagcagggagcttcgcctggtttctgagggaattcccggcgggcctttccaaaacatgcccgttcccttccgctaacttcaggggcggagaattgaactttcaccctcctcaagccggtggcgctgcctcgctggcgttcccagcgcgcagccaaccggatgccagccggcggcattagcactgccagcatggggcgcccgcggacctccgactgaggcagctgccgggagccggaagtgtcccgggcgccgggactgcgagggggccgggagttccccaagaccggaagtgtcccgaggccgggagcccgcgggaccccggagcgcgcggggccggaagaggcgggcggccagtggaggtccgcagagtttgggcgccaggcgagacggcagggcttaaagttccgggaatcaaagatcaactcccactgaggacaaatggacctgtaattccgggtgtgacgagagaacgagatttaccttcctgaattaaaaaacaggtcattaagcttgggccctgactcttctttgtgagaaggtacagagatggaaaccttacaatccgagactaaaacgagggtccttccctcatggctgacagcccaggtggctacaaagaatgtggcaccaatgaaggcccccaagaggatgagaatggcagcagtgccagtggcagcagcaaggtgcgacagctctggtcagaagactcctgcgaatctgactccctgcgacaaggactgtgtactgcatgaatgaggctgagatagttgatgttgctctgggaatcctgattgagagccgcaaacaggaaaaggcctgcgagcagccggccctggcgggggctgataacccagagcactcccctccctgctccgtgtcgcctcacacaagttctgggagcagcagtgaggaagaggacagtgggaaacaggcactggctccaggcctcagcccttcccagaggccggggggttccagctctgcctgtagcaggagccctgaggaggaggaggaagaggatgtgctgaaatacgtccgggagatctttttcagctagggcataaactgtgcactgaactgtctgccgagagcagctggaggacagctgagcttccactggtgctgctgggccgcccgcctgtgggaatggggctctctgtgctcctacctttgtgccttcttgggcctggcagattcacctcaggccagaagcccctggacactccgggccttggggctgccgttctgagtgtgcggaaggcaggactcaaaatgagatcccatttgactccctctgtatgtactgtgccctctcctggctcttgaggctctggagtcccaattgtctgtgttagtcagtgaccaggttccagggaaaatgatgtcatgtggtggtccaacttactggaaccaaagagacagtactttgcaaagaaaaggatcactgccaggtgcactggaattgctacagtttagtccgcatgatctctcctgaaggaggaagcctgtttcaaaaatagtttccatcatgagtctatcaatgagctcccacctctccagccagcctagaaagcaaacgagctgcccacagttctctgccctgtctgggaggttgaggccacagtgtatagactggtaagccagacaggcctcctcccgcaagctgctaccttgctttcacctgtaccttggtccccgggcagctagctataaagcaagagggacaggagcccagaagagacactgaggacaagagatcacaccagagtacatgtctctgcctctgttttcagtgtggctttggacaggaatatatgaataaatcactgccatacaggttttccaatacacaagtgctagaaaatacacacaattccccaatgcgtaagttgtgctaatgtctttccaagttctgggttgggaagtggagggtggcagcgtttgtttgtgcgcaaccgtccagtcctgttcacagcgaggatttggagtcctccagggtctcatcatgggagtgatttgtcagcggacgcctctgccctgtctggcttcaggtccagggaagctttgaagcagtcaagccttgtctttgtaccccatgtgtcctgtctttgttgagtcactcagagatcactcctggacctctggggttggagttccagtgatggcttatggcggcccactcactatggtgggctgagtggaagctccttaaccatgtccccagagacactgaggtgctcgctcttttaatgtcctcgtttgttgccgtaagttctttgctaggtttcattttggcatttggcaaatcagcctggaagtctggccccatgacagcaatcactccctccccaccctcctgaagctagaggaagatttgctcagatccattaattaaagcaggaattggtgtgacaatgagctgcatggtttagggagtctttgggagccttggaagtcctgaaggacagacaatcttgtactaagaagtcacaggtgccctggctgcccttgctgcccctcggcctctttgacacaggggccccacctcctctgtagtgggttccatcgctggagctggagatcagcgttagctgtaaaatgagatggctgagcagatgtgccacctctgaccatggttggaactgaacccttgcaatcacgtaagcctttagcagctctcaagcttgctctcagccctctcagccctcagagggaacacagccatggctataagcaagaggatgagtaaggcctgggcgctgccagagctagaaacccaggccccgggagggagagctgacccacttcacacataggagaggaagaggcccaggccgcctgccagcagcacagaggacacagccaggaagccca

SEQ ID NO: 350357 - DNA, 3242 bp, Homo sapiens
  misc_feature (1073)..(1073): n is a, c, g, or t
  misc_feature (1079)..(1080): n is a, c, g, or t
  misc_feature (1082)..(1082): n is a, c, g, or t
  misc_feature (1084)..(1084): n is a, c, g, or t
  misc_feature (1090)..(1090): n is a, c, g, or t
acgagccggcctggtgcgcgcgactgactggtcgaacggctaggcgagtgcgggcgaggcgagctcgcgagccgacggcgacggtggcggcggcctcgaccttgacgcgggacatcacgacgggccggccgtggttcgactgatgggtcgcggcgcgtgagtgcgggacggcgcggtgaagtagggagtgaggcggctggagcgacgtgttggcgcgcgaggcactgtaggtggttgagtgtgaggggaaggaggggtgaggggggggaggaggggtggtgagtgcatgtgtgttggtagaggtgtaatctatgtggagtggtaaataagtgtttgaagcgggatcgtgtgacgcaccactgatcgcgacagggatcaggcactggccagagatgcatatggtgtgagccttgatcactggagcaccatcgatcatacgataggatggttagtgctcaggcgtcggcgggcgaagtgtcagcgcatgcgagcagagctagcagccgcttctttttgccagtcgcggctccccccttgtgtattaaaagagtgtgtcgacatagtctgtgttctcggctggggcgcggggtgctttctttgaggaggcgcgggggggcggatcgtcgcgtgggtttggttgtgacgccccggttatggcgcgcggttggaaacactgtggttagtgttgtaccccctcgggtggcggccggcttgagggtttcgcctgtgcgtgggggggttgggtgttgcgccccagttttttgttcgtccgccccccccctcgctggtgtcgtttgggggtgcgttcgtttctccgcagtgtggtgctactggtgtgcgcgagtgtttttctccacgtcgctggctcgtttggtgtttttagaccgcccgcggcgcctctgtcgcttggctgttatttataacagcggctgctcagctattttggggcgcccccctttgttcacacaagagctactggggtgcgtcgcgattacttttggggccccccggggggaaattaggaggcgccgccccccctttttttttttttgttttttttttttttttttttntttttnntntntttttnttttttactgacagatcagcatgttagggaaataaaacacgtatgttgagcctgcgttttcccgtactccacagagccgcaaacaggaaaaggcctgcgagcagccggccctggcgggggctgataacccagagcactcccctccctgctccgtgtcgcctcacacaagttctgggagcagcagtgaggaagaggacagtgggaaacaggcactggctccaggcctcagcccttcccagaggccggggggttccagctctgcctgtagcaggagccctgaggaggaggaggaagaggatgtgctgaaatacgtccgggagatctttttcagctagggcataaactgtgcactgaactgtctgccgagagcagctggaggacagctgagcttccactggtgctgctgggccgcccgcctgtgggaatggggctctctgtgctcctacctttgtgccttcttgggcctggcagattcacctcaggccagaagcccctggacactccgggccttggggctgccgttctgagtgtgcggaaggcaggactcaaaatgagatcccatttgactccctctgtatgtactgtgccctctcctggctcttgaggctctggagtcccaattgtctgtgttagtcagtgaccaggttccagggaaaatgatgtcatgtggtggtccaacttactggaaccaaagagacagtactttgcaaagaaaaggatcactgccaggtgcactggaattgctacagtttagtccgcatgatctctcctgaaggaggaagcctgtttcaaaaatagtttccatcatgagtctatcaatgagctcccacctctccagccagcctagaaagcaaacgagctgcccacagttctctgccctgtctgggaggttgaggccacagtgtatagactggtaagccagacaggcctcctcccgcaagctgctaccttgctttcacctgtaccttggtccccgggcagctagctataaagcaagagggacaggagcccagaagagacactgaggacaagagatcacaccagagtacatgtctctgcctctgttttcagtgtggctttggacaggaatatatgaataaatcactgccatacaggttttccaatacacaagtgctagaaaatacacacaattccccaatgcgtaagttgtgctaatgtctttccaagttctgggttgggaagtggagggtggcagcgtttgtttgtgcgcaaccgtccagtcctgttcacagcgaggatttggagtcctccagggtctcatcatgggagtgatttgtcagcggacgcctctgccctgtctggcttcaggtccagggaagctttgaagcagtcaagccttgtctttgtaccccatgtgtcctgtctttgttgagtcactcagagatcactcctggacctctggggttggagttccagtgatggcttatggcggcccactcactatggtgggctgagtggaagctccttaaccatgtccccagagacactgaggtgctcgctcttttaatgtcctcgtttgttgccgtaagttctttgctaggtttcattttggcatttggcaaatcagcctggaagtctggccccatgacagcaatcactccctccccaccctcctgaagctagaggaagatttgctcagatccattaattaaagcaggaattggtgtgacaatgagctgcatggtttagggagtctttgggagccttggaagtcctgaaggacagacaatcttgtactaagaagtcacaggtgccctggctgcccttgctgcccctcggcctctttgacacaggggccccacctcctctgtagtgggttccatcgctggagctggagatcagcgttagctgtaaaatgagatggctgagcagatgtgccacctctgaccatggttggaactgaacccttgcaatcacgtaagcctttagcagctctcaagcttgctctcagccctctcagccctcagagggaacacagccatggctataagcaagaggatgagtaaggcctgggcgctgccagagctagaaacccaggccccgggagggagagctgacccacttcacacataggagaggaagaggcccaggccgcctgccagcagcacagaggacacagccaggaagccca

SEQ ID NO: 350358 - DNA, 3042 bp, Homo sapiens
aaaaaaaaaaaaaaaaacaggtactgagtataaaacaatatgagagggtctctctcttccctcgctttaactttcggagggctgaaattctttctagccttggttaatacagcaattcattccattctagctattgttatttctcttactataattttactattagtacttacgctattctattattttcttaattttccacttaattaggataacaaaccgaggccgggctcccatcctcctcaagcacacgaggggggcctggcccagcagggagcttcgcctggtttctgagggaattcccggcgggcctttccaaaacatgcccgttcccttccgctaacttcaggggcggagaattgaactttcaccctcctcaagccggtggcgctgcctcgctggcgttcccagcgcgcagccaaccggatgccagccggcggcattagcactgccagcatggggcgcccgcggacctccgactgaggcagctgccgggagccggaagtgtcccgggcgccgggactgcgagggggccgggagttccccaagaccggaagtgtcccgaggccgggagcccgcgggaccccggagcgcgcggggccggaagaggcgggcggccagtggaggtccgcagagtttgggcgccaggcgagacggcagggcttaaagttccgggaatcaaagatcaactcccactgaggacaaatggacctgtaattccgggtgtgacgagagaacgagatttaccttcctgaattaaaaaacaggtcattaagcttgggccctgactcttctttgtgagaaggtacagagatggaaaccttacaatccgagactaaaacgagggtccttccctcatggctgacagcccaggtggctacaaagaatgtggcaccaatgaaggcccccaagaggatgagaatggcagcagtgccagtggcagcagcaaggtgcgacagctctggtcagaagactcctgcgaatctgactccctgcgacaaggactgtgtactgcatgaatgaggctgagatagttgatgttgctctgggaatcctgattgagagccgcaaacaggaaaaggcctgcgagcagccggccctggcgggggctgataacccagagcactcccctccctgctccgtgtcgcctcacacaagttctgggagcagcagtgaggaagaggacagtgggaaacaggcactggctccaggcctcagcccttcccagaggccggggggttccagctctgcctgtagcaggagccctgaggaggaggaggaagaggatgtgctgaaatacgtccgggagatctttttcagctagggcataaactgtgcactgaactgtctgccgagagcagctggaggacagctgagcttccactggtgctgctgggccgcccgcctgtgggaatggggctctctgtgctcctacctttgtgccttcttgggcctggcagattcacctcaggccagaagcccctggacactccgggccttggggctgccgttctgagtgtgcggaaggcaggactcaaaatgagatcccatttgactccctctgtatgtactgtgccctctcctggctcttgaggctctggagtcccaattgtctgtgttagtcagtgaccaggttccagggaaaatgatgtcatgtggtggtccaacttactggaaccaaagagacagtactttgcaaagaaaaggatcactgccaggtgcactggaattgctacagtttagtccgcatgatctctcctgaaggaggaagcctgtttcaaaaatagtttccatcatgagtctatcaatgagctcccacctctccagccagcctagaaagcaaacgagctgcccacagttctctgccctgtctgggaggttgaggccacagtgtatagactggtaagccagacaggcctcctcccgcaagctgctaccttgctttcacctgtaccttggtccccgggcagctagctataaagcaagagggacaggagcccagaagagacactgaggacaagagatcacaccagagtacatgtctctgcctctgttttcagtgtggctttggacaggaatatatgaataaatcactgccatacaggttttccaatacacaagtgctagaaaatacacacaattccccaatgcgtaagttgtgctaatgtctttccaagttctgggttgggaagtggagggtggcagcgtttgtttgtgcgcaaccgtccagtcctgttcacagcgaggatttggagtcctccagggtctcatcatgggagtgatttgtcagcggacgcctctgccctgtctggcttcaggagttccagtgatggcttatggcggcccactcactatggtgggctgagtggaagctccttaaccatgtccccagagacactgaggtgctcgctcttttaatgtcctcgtttgttgccgtaagttctttgctaggtttcattttggcatttggcaaatcagcctggaagtctggccccatgacagcaatcactccctccccaccctcctgaagctagaggaagatttgctcagatccattaattaaagcaggaattggtgtgacaatgagctgcatggtttagggagtctttgggagccttggaagtcctgaaggacagacaatcttgtactaagaagtcacaggtgccctggctgcccttgctgcccctcggcctctttgacacaggggccccacctcctctgtagtgggttccatcgctggagctggagatcagcgttagctgtaaaatgagatggctgagcagatgtgccacctctgaccatggttggaactgaacccttgcaatcacgtaagcctttagcagctctcaagcttgctctcagccctctcagccctcagagggaacacagccatggctataagcaagaggatgagtaaggcctgggcgctgccagagctagaaacccaggccccgggagggagagctgacccacttcacacataggagaggaagaggcccaggccgcctgccagcagcacagaggacacagccaggaagccca

SEQ ID NO: 350359 - DNA, 2007 bp, Homo sapiens
aaaaaaaaaaaaaaaaacaggtactgagtataaaacaatatgagagggtctctctcttccctcgctttaactttcggagggctgaaattctttctagccttggttaatacagcaattcattccattctagctattgttatttctcttactataattttactattagtacttacgctattctattattttcttaattttccacttaattaggataacaaaccgaggccgggctcccatcctcctcaagcacacgaggggggcctggcccagcagggagcttcgcctggtttctgagggaattcccggcgggcctttccaaaacatgcccgttcccttccgctaacttcaggggcggagaattgaactttcaccctcctcaagccggtggcgctgcctcgctggcgttcccagcgcgcagccaaccggatgccagccggcggcattagcactgccagcatggggcgcccgcggacctccgactgaggcagctgccgggagccggaagtgtcccgggcgccgggactgcgagggggccgggagttccccaagaccggaagtgtcccgaggccgggagcccgcgggaccccggagcgcgcggggccggaagaggcgggcggccagtggaggtccgcagagtttgggcgccaggcgagacggcagggcttaaagttccgggaatcaaagatcaactcccactgaggacaaatggacctgtaattccgggtgtgacgagagaacgagatttaccttcctgaattaaaaaacaggtcattaagcttgggccctgactcttctttgtgagaaggtacagagatggaaaccttacaatccgagactaaaacgagggtccttccctcatggctgacagcccaggtggctacaaagaatgtggcaccaatgaaggcccccaagaggatgagaatggcagcagtgccagtggcagcagcaaggtgcgacagctctggtcagaagactcctgcgaatctgactccctgcgacaaggactgtgtactgcatgaatgaggctgagatagttgatgttgctctgggaatcctgattgagagccgcaaacaggaaaaggcctgcgagcagccggccctggcgggggctgataacccagagcactcccctccctgctccgtgtcgcctcacacaagttctgggagcagcagtgaggaagaggacagtgggaaacaggcactggctccaggcctcagcccttcccagaggccggggggttccagctctgcctgtagcaggagccctgaggaggaggaggaagaggatgtgctgaaatacgtccgggagatctttttcagctagggcataaactgtgcactgaactgtctgccgagagcagctggaggacagctgagcttccactggtgctgctgggccgcccgcctgtgggaatggggctctctgtgctcctacctttgtgccttcttgggcctggcagattcacctcaggccagaagcccctggacactccgggccttggggctgccgttctgagtgtgcggaaggcaggactcaaaatgagatcccatttgactccctctgtatgtactgtgccctctcctggctcttgaggctctggagtcccaattgtctgtgttagtcagtgaccaggttccagggaaaatgatgtcatgtggtggtccaacttactggaaccaaagagacagtactttgcaaagaaaaggatcactgccaggtgcactggaattgctacagtttagtccgcatgatctctcctgaaggaggaagcctgtttcaaaaatagtttccatcatgagtctatcaatgagctcccacctctccagccagctataaagcaagagggacaggagcccagaagagacactgaggacaagagatcacaccagagtacatgtctctgcctctgttttcagtgtggctttggacaggaatatatgaataaatcactgccatacaggttttccaatacacaagtgctagaaaatacacacaattccccaatg

SEQ ID NO: 350360 - DNA, 804 bp, Homo sapiens
tgtttgtgtgctttttgagtcatgcaaatgtagcgcctatttaaaaaccagaatttctaaaactcagaacctctgctgctcagtagctccctggcctttatttgacagtttttatcacttctcttggcaatgattttgttgttaagccaacaacattctcaaattcatgacacactatcaaatgccaccctcagtccaaatgacatttattccattttctctgtgggacatccagctaaagaggaaaaagaacgtattttcaaattattctgtctcttagccatagttacctagggaaggagtgaaagccattgagagtccacagacagaactcgcagccctggctcccctgcccctgtaggaggcggggaaggagtgagcttcaggccaggagggtccacggccccctgcagccatcctgcagcttccagtcctcctcctggaccatccctgcactcagaccttctccccggcccaccttccttcctcctctgggatcagacttcggtactgtgtcctcagggaccttcctctgtggccggcacccagtgatccctggctcctcagcacacccagctcagaggtcggcagcccctgcccacgagctccagccggccctgcatggccttatgctggaaccagcctcctgagtagttgggattacagcagtgcaccaccacgcccaactaattttttgcatttttagtagagatggggtttcactatgttagccaggctggtctcgaactcctggcctcaagtgattggcccaccttggcctcccaaagtgctgggattataggc

SEQ ID NO: 350361 - DNA, 617 bp, Homo sapiens
tgaaacaaggggcaaggatgggtttgtgtcaccaaaaacaggttccttgttgttatttaaggagttactttttttttctatatttgcatacttagaggacctgtccatataaaaatttttgagtttttcaaagaccacactatttttaataacatcagtaaaattcagtcaaaattgtcccatcactctaagacctgcccagcaggaaaggctctgacgtgtccaggctggccctggcacagtgagaagctcaagctatcctccttagctctagttcagcacccaggaaaacatctcagggtactccctgggtggaacgtggaggcctggagctcccctcacacctccgcctcccccgtcctgccctcccgcgtggtccaggcgcttctcgtccctgaagacgttcctctggttcctgctgccgctgctcttgctgacgtgcctgacgtatgcgagtaccatcctgggccagggagaggctgacctttaaagctgctctgagcatctcggttagggttaaaggctaggcctggggcatctgccgtccaccttcagcgaggagacagccaatggcctgagcggggccctcctcccgtgcgggagcccaccctgccttc

SEQ ID NO: 350362 - DNA, 353 bp, Homo sapiens
ctgcttgtttttcagaggaggactttctagctggactaaccagaccttcgggtttctgcagcctgggttgggaagtggacttctatactcaccacacaacccagagaactggtcatttaagtatcaaccaggaatattagaagtgatcaaaagtcacaagcaagtgctaggaattcccaagtgactttgttgtacgggccagcagaggcactaacgttgagactccccatgttggcagtcggggactttgaattcgggtgtctagacctgagtggttcattaatcttcctcatgtcacagaatgctacctcttgccagatctttgcactttggcttcctttgtcctcattatc

SEQ ID NO: 350363 - DNA, 3974 bp, Homo sapiens
ggttttgtgccagacaggccgtttccagggacaggcagttcccagcctctgcctgtcagaactcagggcctcagaggaaggcccgttttgttcagttctaaaacaaaacaaaacaaagcaatggggggcgcggtgtgacttagagagccaggaggcgcgcctttggtgacaatttctgcaggtgtcacctccttcagcaggacagaggctaagaggagtccctgtgtgggcagctggagccttcagattctcttcaggggaagagtccacatcccacctcatcatgtcccgaagaagccagcgcctcacgcgctactcccagggtgacgatgacggcagcagcagcagcggagggagctcggtggctgggagtcagagcaccctgtttaaagacagtcctctcaggaccttgaagaggaaatccagcaacatgaagcgcctgtccccagcgccacagctgggcccgtcctctgatgcacacacctcctactacagtgagtcgctggtccacgagtcctggttcccacccaggagctccctggaggaactgcatggtgacgccaactggggtgaggacctgcgggtgcggaggaggagaggcacgggtggctcagagagcagcagggccagcgggcttgtggggcgcaaggccaccgaggacttcctgggctcttcctcgggctactcctctgaggacgactacgtgggctactcggatgtggaccagcagagttccagctcgcggctccgaagcgccgtctcacgggcgggctccttactctggatggtggccacttcgccaggccggctcttcagacttctctactggtgggctggcaccacctggtaccgcctgaccacagctgcctccctccttgacgtcttcgttttaaccaggcgcttctcgtccctgaagacgttcctctggttcctgctgccgctgctcttgctgacgtgcctgacgtatggtgcttggtatttctacccctatgggctgcagacattccaccctgctttggtttcctggtgggcagcgaaggacagcaggaggccggatgagggctgggaagccagagactcatcgccacatttccaggctgagcagcgtgttatgtcccgggtacactctctggagcggcgtctggaagctcttgctgctgaattttcctccaactggcagaaggaggccatgcggctggaacgtctggagctgcggcaaggggctcctggccagggaggtggtggtggcctgagccacgaggacaccctggcgctgctggaggggctagtgagccgccgtgaagctgccctgaaggaggatttccgcagggaaactgctgctcgcatccaggaagaactgtctgccctgagagcagagcatcagcaagactcagaagacctcttcaagaagatcgtccgggcctcccaggagtccgaggctcgcatccagcagctgaagtcagagtggcaaagcatgacccaggagtccttccaggagagctctgtgaaggagctgaggcggctggaggaccagctggccggcctgcagcaggagctggcggctctggcactgaagcagagctcggtggcggaagaagtgggcctgctgccccagcagatccaggccgtgcgggacgacgtggaatctcagttcccggcctggatcagtcagttccttgcccgaggtggagggggccgcgtggggctccttcagagagaggagatgcaagctcagctgcgagagctggagagcaagatcctcacccatgtggcagagatgcagggcaagtcggccagggaagccgcggcctccctgagcctgacgctgcagaaagaaggtgtgattggagtgacagaggagcaggtgcaccacatcgtgaagcaggccctgcagcgctacagtgaggaccgcatcgggctggcagactacgccctggagtcaggaggggccagcgtcatcagcacccgatgttctgagacctacgagaccaagacggccctcctcagcctcttcggcatccccctgtggtaccactcccagtcaccccgagtcatcctccagccagatgtgcacccaggcaactgctgggccttccaggggccacaaggcttcgccgtggtccgcctctctgcccgcatccgccccacagccgttaccttagagcatgtgcccaaggccttgtcacccaacagcactatctccagtgcccccaaggacttcgccatctttgggtttgacgaagacctgcagcaggaggggacactccttggcaagttcacttacgatcaggacggcgagcctattcagacgtttcactttcaggcccctacgatggccacgtaccaggtggtggagctgcggatcctgactaactggggccaccccgagtacacctgcatctaccgcttcagagtgcatggggagcccgcccactagccctgcttactggtgcctgctgccagccatctgggagtgggtgaacagcaccccgccgcttcccccacacgcttgctcggcgctctgacttctaggagcacaagagaggagcctgtggccccatgcagatgaaaaggacgggcagggtctcctgagcagcaggtggctcgaggcggttagcaggctccagcagctcccttcttccttccctctgtgcccgtggcgtctgcttcccatcctgggagtgtgtatatatgtagcatatcatgggggactgggaagttgggagaggtaggacctgactggtcttggctggggtcaggggctggtgcctgggagctgatgaagcaggtgccagggctgtgggaggggcaagctacggcctgggctaggtgagctgcctctgcccctgggcaaggaagcgaggccctctgggaggagggtgcttagctccagagcaggatgggacttccccaggcaggaagcacttgatggagagctgcccagctctcctacaaggttagtgccctccacctagggaagcctgaaccacagggtccctgagggccttcgacaaaagtgtgtatttgtcccggggagggtagcagtgggccatggggcttcttgtgccctaaaggggactggctgctgtgatcttctaaggggcccagggccaaccctgtaggcttcccctctgctggggacggtagttgcttttctctctcctgatgctaggttggggcccaccctgctccctgttcctgctagggcctgccagtgcccctgagcttgctttccacattctcccagggtatggagacctagacctgtctttggggccattagcatctggggttatagcaagaagagtggggagcatggaactcctgggctcttgtggggacgttcagggtatcggggtgcgaggtctgtctgcaccggcccccacatctaaccaggccctgatgtaggggtcgtccgctcaggctgcccccttgggctcttgcagctcttgttcaggtagtcgcccttctggtttgttctctgtggggcagttggtgggggctgggggaagaggctggcagaagttaccctggatagggaagggggaggaggggacttttagagccagcaggccccactgtattatgtatatatttttcaaggtctgtttttctaactgaaaagctaagggcttgattcctagccccgttctgtggggcactgggtgatactcagtttcttgttcctggccgtggagaggggcctggggcactggttccggctgtgtctggtggtctggctgcggggaaggggcaagaaggcgggcaggccttcactgcagcactgagcctcaaatccgctctggagcatgaggctggatgcagtggtggtgaggccgccccgctccatcccgaggcagccagggtttgttttgcgctctcctgtcacaaatgctgcactattggttcttaagttttttatctccagatcctaatttatgcctatgcaaaaaataaatgacgcccaagagctg

SEQ ID NO: 350364 - DNA, 3836 bp, Homo sapiens
ggttttgtgccagacaggccgtttccagggacaggcagttcccagcctctgcctgtcagaactcagggcctcagaggaaggcccgttttgttcagttctaaaacaaaacaaaacaaagcaatggggggcgcggtgtgacttagagagccaggaggcgcgcctttggtgacaatttctgcaggtgtcacctccttcagcaggacagaggctaagaggagtccctgtgtgggcagctggagccttcagattctcttcaggggaagagtccacatcccacctcatcatgtcccgaagaagccagcgcctcacgcgctactcccagggtgacgatgacggcagcagcagcagcggagggagctcggtggctgggagtcagagcaccctgtttaaagacagtcctctcaggaccttgaagaggaaatccagcaacatgaagcgcctgtccccagcgccacagctgggcccgtcctctgatgcacacacctcctactacagtgagtcgctggtccacgagtcctggttcccacccaggagctccctggaggaactgcatggtgacgccaactggggctactcggatgtggaccagcagagttccagctcgcggctccgaagcgccgtctcacgggcgggctccttactctggatggtggccacttcgccaggccggctcttcagacttctctactggtgggctggcaccacctggtaccgcctgaccacagctgcctccctccttgacgtcttcgttttaaccaggcgcttctcgtccctgaagacgttcctctggttcctgctgccgctgctcttgctgacgtgcctgacgtatggtgcttggtatttctacccctatgggctgcagacattccaccctgctttggtttcctggtgggcagcgaaggacagcaggaggccggatgagggctgggaagccagagactcatcgccacatttccaggctgagcagcgtgttatgtcccgggtacactctctggagcggcgtctggaagctcttgctgctgaattttcctccaactggcagaaggaggccatgcggctggaacgtctggagctgcggcaaggggctcctggccagggaggtggtggtggcctgagccacgaggacaccctggcgctgctggaggggctagtgagccgccgtgaagctgccctgaaggaggatttccgcagggaaactgctgctcgcatccaggaagaactgtctgccctgagagcagagcatcagcaagactcagaagacctcttcaagaagatcgtccgggcctcccaggagtccgaggctcgcatccagcagctgaagtcagagtggcaaagcatgacccaggagtccttccaggagagctctgtgaaggagctgaggcggctggaggaccagctggccggcctgcagcaggagctggcggctctggcactgaagcagagctcggtggcggaagaagtgggcctgctgccccagcagatccaggccgtgcgggacgacgtggaatctcagttcccggcctggatcagtcagttccttgcccgaggtggagggggccgcgtggggctccttcagagagaggagatgcaagctcagctgcgagagctggagagcaagatcctcacccatgtggcagagatgcagggcaagtcggccagggaagccgcggcctccctgagcctgacgctgcagaaagaaggtgtgattggagtgacagaggagcaggtgcaccacatcgtgaagcaggccctgcagcgctacagtgaggaccgcatcgggctggcagactacgccctggagtcaggaggggccagcgtcatcagcacccgatgttctgagacctacgagaccaagacggccctcctcagcctcttcggcatccccctgtggtaccactcccagtcaccccgagtcatcctccagccagatgtgcacccaggcaactgctgggccttccaggggccacaaggcttcgccgtggtccgcctctctgcccgcatccgccccacagccgttaccttagagcatgtgcccaaggccttgtcacccaacagcactatctccagtgcccccaaggacttcgccatctttgggtttgacgaagacctgcagcaggaggggacactccttggcaagttcacttacgatcaggacggcgagcctattcagacgtttcactttcaggcccctacgatggccacgtaccaggtggtggagctgcggatcctgactaactggggccaccccgagtacacctgcatctaccgcttcagagtgcatggggagcccgcccactagccctgcttactggtgcctgctgccagccatctgggagtgggtgaacagcaccccgccgcttcccccacacgcttgctcggcgctctgacttctaggagcacaagagaggagcctgtggccccatgcagatgaaaaggacgggcagggtctcctgagcagcaggtggctcgaggcggttagcaggctccagcagctcccttcttccttccctctgtgcccgtggcgtctgcttcccatcctgggagtgtgtatatatgtagcatatcatgggggactgggaagttgggagaggtaggacctgactggtcttggctggggtcaggggctggtgcctgggagctgatgaagcaggtgccagggctgtgggaggggcaagctacggcctgggctaggtgagctgcctctgcccctgggcaaggaagcgaggccctctgggaggagggtgcttagctccagagcaggatgggacttccccaggcaggaagcacttgatggagagctgcccagctctcctacaaggttagtgccctccacctagggaagcctgaaccacagggtccctgagggccttcgacaaaagtgtgtatttgtcccggggagggtagcagtgggccatggggcttcttgtgccctaaaggggactggctgctgtgatcttctaaggggcccagggccaaccctgtaggcttcccctctgctggggacggtagttgcttttctctctcctgatgctaggttggggcccaccctgctccctgttcctgctagggcctgccagtgcccctgagcttgctttccacattctcccagggtatggagacctagacctgtctttggggccattagcatctggggttatagcaagaagagtggggagcatggaactcctgggctcttgtggggacgttcagggtatcggggtgcgaggtctgtctgcaccggcccccacatctaaccaggccctgatgtaggggtcgtccgctcaggctgcccccttgggctcttgcagctcttgttcaggtagtcgcccttctggtttgttctctgtggggcagttggtgggggctgggggaagaggctggcagaagttaccctggatagggaagggggaggaggggacttttagagccagcaggccccactgtattatgtatatatttttcaaggtctgtttttctaactgaaaagctaagggcttgattcctagccccgttctgtggggcactgggtgatactcagtttcttgttcctggccgtggagaggggcctggggcactggttccggctgtgtctggtggtctggctgcggggaaggggcaagaaggcgggcaggccttcactgcagcactgagcctcaaatccgctctggagcatgaggctggatgcagtggtggtgaggccgccccgctccatcccgaggcagccagggtttgttttgcgctctcctgtcacaaatgctgcactattggttcttaagttttttatctccagatcctaatttatgcctatgcaaaaaataaatgacgcccaagagctg

SEQ ID NO: 350365 - DNA, 3458 bp, Homo sapiens
tgaaacaaggggcaaggatgggtttgtgtcaccaaaaacaggttccttgttgttatttaaggagttactttttttttctatatttgcatacttagaggacctgtccatataaaaatttttgagtttttcaaagaccacactatttttaataacatcagtaaaattcagtcaaaattgtcccatcactctaagacctgcccagcaggaaaggctctgacgtgtccaggctggccctggcacagtgagaagctcaagctatcctccttagctctagttcagcacccaggaaaacatctcagggtactccctgggtggaacgtggaggcctggagctcccctcacacctccgcctcccccgtcctgccctcccgcgtggtccaggcgcttctcgtccctgaagacgttcctctggttcctgctgccgctgctcttgctgacgtgcctgacgtatggtgcttggtatttctacccctatgggctgcagacattccaccctgctttggtttcctggtgggcagcgaaggacagcaggaggccggatgagggctgggaagccagagactcatcgccacatttccaggctgagcagcgtgttatgtcccgggtacactctctggagcggcgtctggaagctcttgctgctgaattttcctccaactggcagaaggaggccatgcggctggaacgtctggagctgcggcaaggggctcctggccagggaggtggtggtggcctgagccacgaggacaccctggcgctgctggaggggctagtgagccgccgtgaagctgccctgaaggaggatttccgcagggaaactgctgctcgcatccaggaagaactgtctgccctgagagcagagcatcagcaagactcagaagacctcttcaagaagatcgtccgggcctcccaggagtccgaggctcgcatccagcagctgaagtcagagtggcaaagcatgacccaggagtccttccaggagagctctgtgaaggagctgaggcggctggaggaccagctggccggcctgcagcaggagctggcggctctggcactgaagcagagctcggtggcggaagaagtgggcctgctgccccagcagatccaggccgtgcgggacgacgtggaatctcagttcccggcctggatcagtcagttccttgcccgaggtggagggggccgcgtggggctccttcagagagaggagatgcaagctcagctgcgagagctggagagcaagatcctcacccatgtggcagagatgcagggcaagtcggccagggaagccgcggcctccctgagcctgacgctgcagaaagaaggtgtgattggagtgacagaggagcaggtgcaccacatcgtgaagcaggccctgcagcgctacagtgaggaccgcatcgggctggcagactacgccctggagtcaggaggggccagcgtcatcagcacccgatgttctgagacctacgagaccaagacggccctcctcagcctcttcggcatccccctgtggtaccactcccagtcaccccgagtcatcctccagccagatgtgcacccaggcaactgctgggccttccaggggccacaaggcttcgccgtggtccgcctctctgcccgcatccgccccacagccgttaccttagagcatgtgcccaaggccttgtcacccaacagcactatctccagtgcccccaaggacttcgccatctttgggtttgacgaagacctgcagcaggaggggacactccttggcaagttcacttacgatcaggacggcgagcctattcagacgtttcactttcaggcccctacgatggccacgtaccaggtggtggagctgcggatcctgactaactggggccaccccgagtacacctgcatctaccgcttcagagtgcatggggagcccgcccactagccctgcttactggtgcctgctgccagccatctgggagtgggtgaacagcaccccgccgcttcccccacacgcttgctcggcgctctgacttctaggagcacaagagaggagcctgtggccccatgcagatgaaaaggacgggcagggtctcctgagcagcaggtggctcgaggcggttagcaggctccagcagctcccttcttccttccctctgtgcccgtggcgtctgcttcccatcctgggagtgtgtatatatgtagcatatcatgggggactgggaagttgggagaggtaggacctgactggtcttggctggggtcaggggctggtgcctgggagctgatgaagcaggtgccagggctgtgggaggggcaagctacggcctgggctaggtgagctgcctctgcccctgggcaaggaagcgaggccctctgggaggagggtgcttagctccagagcaggatgggacttccccaggcaggaagcacttgatggagagctgcccagctctcctacaaggttagtgccctccacctagggaagcctgaaccacagggtccctgagggccttcgacaaaagtgtgtatttgtcccggggagggtagcagtgggccatggggcttcttgtgccctaaaggggactggctgctgtgatcttctaaggggcccagggccaaccctgtaggcttcccctctgctggggacggtagttgcttttctctctcctgatgctaggttggggcccaccctgctccctgttcctgctagggcctgccagtgcccctgagcttgctttccacattctcccagggtatggagacctagacctgtctttggggccattagcatctggggttatagcaagaagagtggggagcatggaactcctgggctcttgtggggacgttcagggtatcggggtgcgaggtctgtctgcaccggcccccacatctaaccaggccctgatgtaggggtcgtccgctcaggctgcccccttgggctcttgcagctcttgttcaggtagtcgcccttctggtttgttctctgtggggcagttggtgggggctgggggaagaggctggcagaagttaccctggatagggaagggggaggaggggacttttagagccagcaggccccactgtattatgtatatatttttcaaggtctgtttttctaactgaaaagctaagggcttgattcctagccccgttctgtggggcactgggtgatactcagtttcttgttcctggccgtggagaggggcctggggcactggttccggctgtgtctggtggtctggctgcggggaaggggcaagaaggcgggcaggccttcactgcagcactgagcctcaaatccgctctggagcatgaggctggatgcagtggtggtgaggccgccccgctccatcccgaggcagccagggtttgttttgcgctctcctgtcacaaatgctgcactattggttcttaagttttttatctccagatcctaatttatgcctatgcaaaaaataaatgacgcccaagagctg

SEQ ID NO: 350366 - DNA, 4202 bp, Homo sapiens
tgtttgtgtgctttttgagtcatgcaaatgtagcgcctatttaaaaaccagaatttctaaaactcagaacctctgctgctcagtagctccctggcctttatttgacagtttttatcacttctcttggcaatgattttgttgttaagccaacaacattctcaaattcatgacacactatcaaatgccaccctcagtccaaatgacatttattccattttctctgtgggacatccagctaaagaggaaaaagaacgtattttcaaattattctgtctcttagccatagttacctagggaaggagtgaaagccattgagagtccacagacagaactcgcagccctggctcccctgcccctgtaggaggcggggaaggagtgagcttcaggccaggagggtccacggccccctgcagccatcctgcagcttccagtcctcctcctggaccatccctgcactcagaccttctccccggcccaccttccttcctcctctgggatcagacttcggtactgtgtcctcagggaccttcctctgtggccggcacccagtgatccctggctcctcagcacacccagctcagaggtcggcagcccctgcccacgagctccagccggccctgcatggccttatgctggaacgtctctggaatcttttccctttctttctgtgttggctgtgtcggggtggtctttgggaagcactatcatccaagggtccctcactccgtggctctctctctgcccttccaggctgagcagcgtgttatgtcccgggtacactctctggagcggcgtctggaagctcttgctgctgaattttcctccaactggcagaaggaggccatgcggctggaacgtctggagctgcggcaaggggctcctggccagggaggtggtggtggcctgagccacgaggacaccctggcgctgctggaggggctagtgagccgccgtgaagctgccctgaaggaggatttccgcagggaaactgctgctcgcatccaggaagaactgtctgccctgagagcagagcatcagcaagactcagaagacctcttcaagaagatcgtccgggcctcccaggagtccgaggctcgcatccagcagctgaagtcagagtggcaaaggtactgggcgccaccagctggcctcggcctgctcctccccagccccacccactctccaggcaggactggggagcagagccgcagagcagagagttctgatcatcttgccaagcagatggtagggggaggggttgaaacccagctcaggacccctgcccagggcctgtctttgaggtgccatggaggttagcaggggggtcctgagggcggggggcaggctgtgtgagaggaccgggattcatttatagacacagcatcctttcttacagcctcacataactgccttctcatgccccagatgtccatgcttgtggaggatgtgagaggctgaggcagagtacattctggactctgggcttagaaagggagcaggctcagaattagctccttgggacaggcaggggttctgcagccagaacccccaggagaggccttgccccttctcaggttcacaatgagtgctgggcacccgctctcctgacgggagcccactagggggtcctctttcatctttggtgtggccttacctcccaccaaagagatccgaggcttactcttctctctctgggaccagcatgacccaggagtccttccaggagagctctgtgaaggagctgaggcggctggaggaccagctggccggcctgcagcaggagctggcggctctggcactgaagcagagctcggtggcggaagaagtgggcctgctgccccagcagatccaggccgtgcgggacgacgtggaatctcagttcccggcctggatcagtcagttccttgcccgaggtggagggggccgcgtggggctccttcagagagaggagatgcaagctcagctgcgagagctggagagcaagatcctcacccatgtggcagagatgcagggcaagtcggccagggaagccgcggcctccctgagcctgacgctgcagaaagaaggtgtgattggagtgacagaggagcaggtgcaccacatcgtgaagcaggccctgcagcgctacagtgaggaccgcatcgggctggcagactacgccctggagtcaggaggggccagcgtcatcagcacccgatgttctgagacctacgagaccaagacggccctcctcagcctcttcggcatccccctgtggtaccactcccagtcaccccgagtcatcctccagccagatgtgcacccaggcaactgctgggccttccaggggccacaaggcttcgccgtggtccgcctctctgcccgcatccgccccacagccgttaccttagagcatgtgcccaaggccttgtcacccaacagcactatctccagtgcccccaaggacttcgccatctttgggtttgacgaagacctgcagcaggaggggacactccttggcaagttcacttacgatcaggacggcgagcctattcagacgtttcactttcaggcccctacgatggccacgtaccaggtggtggagctgcggatcctgactaactggggccaccccgagtacacctgcatctaccgcttcagagtgcatggggagcccgcccactagccctgcttactggtgcctgctgccagccatctgggagtgggtgaacagcaccccgccgcttcccccacacgcttgctcggcgctctgacttctaggagcacaagagaggagcctgtggccccatgcagatgaaaaggacgggcagggtctcctgagcagcaggtggctcgaggcggttagcaggctccagcagctcccttcttccttccctctgtgcccgtggcgtctgcttcccatcctgggagtgtgtatatatgtagcatatcatgggggactgggaagttgggagaggtaggacctgactggtcttggctggggtcaggggctggtgcctgggagctgatgaagcaggtgccagggctgtgggaggggcaagctacggcctgggctaggtgagctgcctctgcccctgggcaaggaagcgaggccctctgggaggagggtgcttagctccagagcaggatgggacttccccaggcaggaagcacttgatggagagctgcccagctctcctacaaggttagtgccctccacctagggaagcctgaaccacagggtccctgagggccttcgacaaaagtgtgtatttgtcccggggagggtagcagtgggccatggggcttcttgtgccctaaaggggactggctgctgtgatcttctaaggggcccagggccaaccctgtaggcttcccctctgctggggacggtagttgcttttctctctcctgatgctaggttggggcccaccctgctccctgttcctgctagggcctgccagtgcccctgagcttgctttccacattctcccagggtatggagacctagacctgtctttggggccattagcatctggggttatagcaagaagagtggggagcatggaactcctgggctcttgtggggacgttcagggtatcggggtgcgaggtctgtctgcaccggcccccacatctaaccaggccctgatgtaggggtcgtccgctcaggctgcccccttgggctcttgcagctcttgttcaggtagtcgcccttctggtttgttctctgtggggcagttggtgggggctgggggaagaggctggcagaagttaccctggatagggaagggggaggaggggacttttagagccagcaggccccactgtattatgtatatatttttcaaggtctgtttttctaactgaaaagctaagggcttgattcctagccccgttctgtggggcactgggtgatactcagtttcttgttcctggccgtggagaggggcctggggcactggttccggctgtgtctggtggtctggctgcggggaaggggcaagaaggcgggcaggccttcactgcagcactgagcctcaaatccgctctggagcatgaggctggatgcagtggtggtgaggccgccccgctccatcccgaggcagccagggtttgttttgcgctctcctgtcacaaatgctgcactattggttcttaagttttttatctccagatcctaatttatgcctatgcaaaaaataaatgacgcccaagagctg

SEQ ID NO: 350367 - DNA, 3772 bp, Homo sapiens
tgtttgtgtgctttttgagtcatgcaaatgtagcgcctatttaaaaaccagaatttctaaaactcagaacctctgctgctcagtagctccctggcctttatttgacagtttttatcacttctcttggcaatgattttgttgttaagccaacaacattctcaaattcatgacacactatcaaatgccaccctcagtccaaatgacatttattccattttctctgtgggacatccagctaaagaggaaaaagaacgtattttcaaattattctgtctcttagccatagttacctagggaaggagtgaaagccattgagagtccacagacagaactcgcagccctggctcccctgcccctgtaggaggcggggaaggagtgagcttcaggccaggagggtccacggccccctgcagccatcctgcagcttccagtcctcctcctggaccatccctgcactcagaccttctccccggcccaccttccttcctcctctgggatcagacttcggtactgtgtcctcagggaccttcctctgtggccggcacccagtgatccctggctcctcagcacacccagctcagaggtcggcagcccctgcccacgagctccagccggccctgcatggccttatgctggaacgtctctggaatcttttccctttctttctgtgttggctgtgtcggggtggtctttgggaagcactatcatccaagggtccctcactccgtggctctctctctgcccttccaggctgagcagcgtgttatgtcccgggtacactctctggagcggcgtctggaagctcttgctgctgaattttcctccaactggcagaaggaggccatgcggctggaacgtctggagctgcggcaaggggctcctggccagggaggtggtggtggcctgagccacgaggacaccctggcgctgctggaggggctagtgagccgccgtgaagctgccctgaaggaggatttccgcagggaaactgctgctcgcatccaggaagaactgtctgccctgagagcagagcatcagcaagactcagaagacctcttcaagaagatcgtccgggcctcccaggagtccgaggctcgcatccagcagctgaagtcagagtggcaaagcatgacccaggagtccttccaggagagctctgtgaaggagctgaggcggctggaggaccagctggccggcctgcagcaggagctggcggctctggcactgaagcagagctcggtggcggaagaagtgggcctgctgccccagcagatccaggccgtgcgggacgacgtggaatctcagttcccggcctggatcagtcagttccttgcccgaggtggagggggccgcgtggggctccttcagagagaggagatgcaagctcagctgcgagagctggagagcaagatcctcacccatgtggcagagatgcagggcaagtcggccagggaagccgcggcctccctgagcctgacgctgcagaaagaaggtgtgattggagtgacagaggagcaggtgcaccacatcgtgaagcaggccctgcagcgctacagtgaggaccgcatcgggctggcagactacgccctggagtcaggaggggccagcgtcatcagcacccgatgttctgagacctacgagaccaagacggccctcctcagcctcttcggcatccccctgtggtaccactcccagtcaccccgagtcatcctccagccagatgtgcacccaggcaactgctgggccttccaggggccacaaggcttcgccgtggtccgcctctctgcccgcatccgccccacagccgttaccttagagcatgtgcccaaggccttgtcacccaacagcactatctccagtgcccccaaggacttcgccatctttgggtttgacgaagacctgcagcaggaggggacactccttggcaagttcacttacgatcaggacggcgagcctattcagacgtttcactttcaggcccctacgatggccacgtaccaggtggtggagctgcggatcctgactaactggggccaccccgagtacacctgcatctaccgcttcagagtgcatggggagcccgcccactagccctgcttactggtgcctgctgccagccatctgggagtgggtgaacagcaccccgccgcttcccccacacgcttgctcggcgctctgacttctaggagcacaagagaggagcctgtggccccatgcagatgaaaaggacgggcagggtctcctgagcagcaggtggctcgaggcggttagcaggctccagcagctcccttcttccttccctctgtgcccgtggcgtctgcttcccatcctgggagtgtgtatatatgtagcatatcatgggggactgggaagttgggagaggtaggacctgactggtcttggctggggtcaggggctggtgcctgggagctgatgaagcaggtgccagggctgtgggaggggcaagctacggcctgggctaggtgagctgcctctgcccctgggcaaggaagcgaggccctctgggaggagggtgcttagctccagagcaggatgggacttccccaggcaggaagcacttgatggagagctgcccagctctcctacaaggttagtgccctccacctagggaagcctgaaccacagggtccctgagggccttcgacaaaagtgtgtatttgtcccggggagggtagcagtgggccatggggcttcttgtgccctaaaggggactggctgctgtgatcttctaaggggcccagggccaaccctgtaggcttcccctctgctggggacggtagttgcttttctctctcctgatgctaggttggggcccaccctgctccctgttcctgctagggcctgccagtgcccctgagcttgctttccacattctcccagggtatggagacctagacctgtctttggggccattagcatctggggttatagcaagaagagtggggagcatggaactcctgggctcttgtggggacgttcagggtatcggggtgcgaggtctgtctgcaccggcccccacatctaaccaggccctgatgtaggggtcgtccgctcaggctgcccccttgggctcttgcagctcttgttcaggtagtcgcccttctggtttgttctctgtggggcagttggtgggggctgggggaagaggctggcagaagttaccctggatagggaagggggaggaggggacttttagagccagcaggccccactgtattatgtatatatttttcaaggtctgtttttctaactgaaaagctaagggcttgattcctagccccgttctgtggggcactgggtgatactcagtttcttgttcctggccgtggagaggggcctggggcactggttccggctgtgtctggtggtctggctgcggggaaggggcaagaaggcgggcaggccttcactgcagcactgagcctcaaatccgctctggagcatgaggctggatgcagtggtggtgaggccgccccgctccatcccgaggcagccagggtttgttttgcgctctcctgtcacaaatgctgcactattggttcttaagttttttatctccagatcctaatttatgcctatgcaaaaaataaatgacgcccaagagctgaaaaaaaaaaaaaaatgaacataatcagaaaaaaaaaggggggggggaaaaaatatcccggggggccattgggcacctttttgaaaggggcccaggggggggaataaaaagaggggggggggtgaagggggggggagaaacggg

SEQ ID NO: 350368 - DNA, 2280 bp, Homo sapiens
ggccccactcgcgcagcgcgggcctccgccggccgcattgtccgcccgcccgcgcttgtcccgcgtcgccgctcttcgcgtgcccgctgcgccccgggcccggccgctgtgtcgccctgagcggagcgccgcccgcgggatccccacgcggaaagggggcgcgccccggcggcggcctggcctcggacgcccccggccgggctagaagccgccgcggcagcagattctcttcaggggaagagtccacatcccacctcatcatgtcccgaagaagccagcgcctcacgcgctactcccagggtgacgatgacggcagcagcagcagcggagggagctcggtggctgggagtcagagcaccctgtttaaagacagtcctctcaggaccttgaagaggaaatccagcaacatgaagcgcctgtccccagcgccacagctgggcccgtcctctgatgcacacacctcctactacagtgagtcgctggtccacgagtcctggttcccacccaggagctccctggaggaactgcatggtgacgccaactggggtgaggacctgcgggtgcggaggaggagaggcacgggtggctcagagagcagcagggccagcgggcttgtggggcgcaaggccaccgaggacttcctgggctcttcctcgggctactcctctgaggacgactacgtgggctactcggatgtggaccagcagagttccagctcgcggctccgaagcgccgcccactagccctgcttactggtgcctgctgccagccatctgggagtgggtgaacagcaccccgccgcttcccccacacgcttgctcggcgctctgacttctaggagcacaagagaggagcctgtggccccatgcagatgaaaaggacgggcagggtctcctgagcagcaggtggctcgaggcggttagcaggctccagcagctcccttcttccttccctctgtgcccgtggcgtctgcttcccatcctgggagtgtgtatatatgtagcatatcatgggggactgggaagttgggagaggtaggacctgactggtcttggctggggtcaggggctggtgcctgggagctgatgaagcaggtgccagggctgtgggaggggcaagctacggcctgggctaggtgagctgcctctgcccctgggcaaggaagcgaggccctctgggaggagggtgcttagctccagagcaggatgggacttccccaggcaggaagcacttgatggagagctgcccagctctcctacaaggttagtgccctccacctagggaagcctgaaccacagggtccctgagggccttcgacaaaagtgtgtatttgtcccggggagggtagcagtgggccatggggcttcttgtgccctaaaggggactggctgctgtgatcttctaaggggcccagggccaaccctgtaggcttcccctctgctggggacggtagttgcttttctctctcctgatgctaggttggggcccaccctgctccctgttcctgctagggcctgccagtgcccctgagcttgctttccacattctcccagggtatggagacctagacctgtctttggggccattagcatctggggttatagcaagaagagtggggagcatggaactcctgggctcttgtggggacgttcagggtatcggggtgcgaggtctgtctgcaccggcccccacatctaaccaggccctgatgtaggggtcgtccgctcaggctgcccccttgggctcttgcagctcttgttcaggtagtcgcccttctggtttgttctctgtggggcagttggtgggggctgggggaagaggctggcagaagttaccctggatagggaagggggaggaggggacttttagagccagcaggccccactgtattatgtatatatttttcaaggtctgtttttctaactgaaaagctaagggcttgattcctagccccgttctgtggggcactgggtgatactcagtttcttgttcctggccgtggagaggggcctggggcactggttccggctgtgtctggtggtctggctgcggggaaggggcaagaaggcgggcaggccttcactgcagcactgagcctcaaatccgctctggagcatgaggctggatgcagtggtggtgaggccgccccgctccatcccgaggcagccagggtttgttttgcgctctcctgtcacaaatgctgcactattggttcttaagttttttatctccagatcctaatttatgcctatgcaaaaaataaatgacgcccaagagctg

SEQ ID NO: 350369 - DNA, 2587 bp, Homo sapiens
tgtttgtgtgctttttgagtcatgcaaatgtagcgcctatttaaaaaccagaatttctaaaactcagaacctctgctgctcagtagctccctggcctttatttgacagtttttatcacttctcttggcaatgattttgttgttaagccaacaacattctcaaattcatgacacactatcaaatgccaccctcagtccaaatgacatttattccattttctctgtgggacatccagctaaagaggaaaaagaacgtattttcaaattattctgtctcttagccatagttacctagggaaggagtgaaagccattgagagtccacagacagaactcgcagccctggctcccctgcccctgtaggaggcggggaaggagtgagcttcaggccaggagggtccacggccccctgcagccatcctgcagcttccagtcctcctcctggaccatccctgcactcagaccttctccccggcccaccttccttcctcctctgggatcagacttcggtactgtgtcctcagggaccttcctctgtggccggcacccagtgatccctggctcctcagcacacccagctcagaggtcggcagcccctgcccacgagctccagccggccctgcatggccttatgctggaacgtctctggaatcttttccctttctttctgtgttggctgtgtcggggtggtctttgggaagcactatcatccaagggtccctcactccgtggctctctctctgcccttccaggctgagcagcgtgttatgtcccgggtacactctctggagcggcgtctggaagctcttgctgctgaattttcctccaactggcagaaggaggccatgcggctggaacgtctggagctgcggcaaggggctcctggccagggaggtggtggtggcctgagccacgaggacaccctggcgctgctggaggggctagtgagccgccgtgaagctgccctgaaggaggatttccgcagggaaactgctgctcgcatccaggaagaactgtctgccctgagagcagagcatcagcaagactcagaagacctcttcaagaagatcgtccgggcctcccaggagtccgaggctcgcatccagcagctgaagtcagagtggcaaagcatgacccaggagtccttccaggagagctctgtgaaggagctgaggcggctggaggaccagctggccggcctgcagcaggagctggcggctctggcactgaagcagagctcggtggcggaagaagtgggcctgctgccccagcagatccaggccgtgcgggacgacgtggaatctcagttcccggcctggatcagtcagttccttgcccgaggtggagggggccgcgtggggctccttcagagagaggagatgcaagctcagctgcgagagctggagagcaagatcctcacccatgtggcagagatgcagggcaagtcggccagggaagccgcggcctccctgagcctgacgctgcagaaagaaggtgtgattggagtgacagaggagcaggtgcaccacatcgtgaagcaggccctgcagcgctacagtgaggaccgcatcgggctggcagactacgccctggagtcaggaggggccagcgtcatcagcacccgatgttctgagacctacgagaccaagacggccctcctcagcctcttcggcatccccctgtggtaccactcccagtcaccccgagtcatcctccagccagatgtgcacccaggcaactgctgggccttccaggggccacaaggcttcgccgtggtccgcctctctgcccgcatccgccccacagccgttaccttagagcatgtgcccaaggccttgtcacccaacagcactatctccagtgcccccaaggacttcgccatctttgggtttgacgaagacctgcagcaggaggggacactccttggcaagttcacttacgatcaggacggcgagcctattcagacgtttcactttcaggtctgtctgcaccggcccccacatctaaccaggccctgatgtaggggtcgtccgctcaggctgcccccttgggctcttgcagctcttgttcaggtagtcgcccttctggtttgttctctgtggggcagttggtgggggctgggggaagaggctggcagaagttaccctggatagggaagggggaggaggggacttttagagccagcaggccccactgtattatgtatatatttttcaaggtctgtttttctaactgaaaagctaagggcttgattcctagccccgttctgtggggcactgggtgatactcagtttcttgttcctggccgtggagaggggcctggggcactggttccggctgtgtctggtggtctggctgcggggaaggggcaagaaggcgggcaggccttcactgcagcactgagcctcaaatccgctctggagcatgaggctggatgcagtggtggtgaggccgccccgctccatcccgaggcagccagggtttgttttgcgctctcctgtcacaaatgctgcactattggttcttaagttttttatctccagatcctaatttatgcctatgcaaaaaataaatgacgcccaagagctg

SEQ ID NO: 350370 - DNA, 1687 bp, Homo sapiens
tgtttgtgtgctttttgagtcatgcaaatgtagcgcctatttaaaaaccagaatttctaaaactcagaacctctgctgctcagtagctccctggcctttatttgacagtttttatcacttctcttggcaatgattttgttgttaagccaacaacattctcaaattcatgacacactatcaaatgccaccctcagtccaaatgacatttattccattttctctgtgggacatccagctaaagaggaaaaagaacgtattttcaaattattctgtctcttagccatagttacctagggaaggagtgaaagccattgagagtccacagacagaactcgcagccctggctcccctgcccctgtaggaggcggggaaggagtgagcttcaggccaggagggtccacggccccctgcagccatcctgcagcttccagtcctcctcctggaccatccctgcactcagaccttctccccggcccaccttccttcctcctctgggatcagacttcggtactgtgtcctcagggaccttcctctgtggccggcacccagtgatccctggctcctcagcacacccagctcagaggtcggcagcccctgcccacgagctccagccggccctgcatggccttatgctggaacgtctctggaatcttttccctttctttctgtgttggctgtgtcggggtggtctttgggaagcactatcatccaagggtccctcactccgtggctctctctctgcccttccaggctgagcagcgtgttatgtcccgggtacactctctggagcggcgtctggaagctcttgctgctgaattttcctccaactggcagaaggaggccatgcggctggaacgtctggagctgcggcaaggggctcctggccagggaggtggtggtggcctgagccacgaggacaccctggcgctgctggaggggctagtgagccgccgtgaagctgccctgaaggaggatttccgcagggaaactgctgctcgcatccaggaagaactgtctgccctgagagcagagcatcagcaagactcagaagacctcttcaagaagatcgtccgggcctcccaggagtccgaggctcgcatccagcagctgaagtcagagtggcaaagcatgacccaggagtccttccaggagagctctgtgaaggagctgaggcggctggaggaccagctggccggcctgcagcaggagctggcggctctggcactgaagcagagctcggtggcggaagaagtgggcctgctgccccagcagatccaggccgtgcgggacgacgtggaatctcagttcccggcctggatcagtcagttccttgcccgaggtggagggggccgcgtggggctccttcagagagaggagatgcaagctcagctgcgagagctggagagcaagatcctcacccatgtggcagagatgcagggcaagtcggccagggaagccgcggcctccctgagcctgacgctgcagaaagaaggtgtgattggagtgacagaggaggtgaggcccacatgcccctctccacacacccacccacagctctcctccctgggagccctggacagtcccacactgccagctccctggcaggttccaggatggaagtgccaagcaggaggctttgcatgctgtggggctggcatgggtgggtggcagtgtgcccacatctgcc

SEQ ID NO: 350371 - DNA, 258 bp, Homo sapiens
ctggtgggcagcgaaggacagcaggaggccggatgagggctgggaagccagagactcatcgccacatttccaggtgagtctctgagggtggtagctcccaagagcttagcaataattaggtgacggtgaaagtggtgggtgcgccctcagcctgcctcacaccgtacacacaaagctgaggcgtactgttagttgccatcttacaaggcacagaaaacagaaagaaaaggaatccaacaaattatcttgtctgctttg

SEQ ID NO: 350372 - DNA, 156 bp, Homo sapiens
ctcctgctgtccctgcaagccccccagggtgacacccctttgggttcctataggtggaatctcagttcccggcctggatcagtcagttccttgcccgaggtggagggggccgcgtggggctccttcagagagaggagatgcaagctcagctgcgag

SEQ ID NO: 350373 - DNA, 422 bp, Homo sapiens
aaacactgctcaggaggctaaagataggagcttttgaagcctggttctcttcagagccccagggaaggagcaggggagccatctggccctaggcgaggctgtctccccttcccaccttctctgtcagtgaggcctcacaggtctctgatgctcttaatccctttcttctctacccaggcccctacgatggccacgtaccaggtggtggagctgcggatcctgactaactggggccaccccgagtacacctgcatctaccgcttcagagtgcatggggagcccgcccactagccctgcttactggtgcctgctgccagccatctgggagtgggtgaacagcaccccgccgcttcccccacacgcttgctcggcgctctgacttctaggagcacaagagaggagcctgtggccccatgcagatg

SEQ ID NO: 350374 - DNA, 728 bp, Homo sapiens
tggtttaagtctgaagatggatggagatgtttgtgatggggaagggcggaattgagaaaggaagtcgcccagctgagaagtggggaaggatgctttccgatgagcgtttcctaactgattgttagggaggaggtggggcgggggtggtgtctattatgattcgcagtagtagatttcagctcccagaggctcacttcttgttttggagaatggggcctcgacctttttcatcttgtgaaacccagactcaatggtaaactgttttgtgatgccaggatgccgcaggaaagactgagaggcatctctgggagttctgggagggcggaggcgggtgctgacagttttcagcactccccgctcaacctccatcagaatatttagttcttcccagcggcagcttgggtatggtataaacatgttgccttgtttctgccctgggcaaaggtgtcacctccttcagcaggacagaggctaagaggagtccctgtgtgggcagctggagccttcaggtagggaccgtacgggcggggcagggaggggggaggggagattaccttataaggacaggaatagagacaaggacccaggccaacttcctgcttttcctactaccaatcggtcccttttccaacaccagctaaaagtagaggggatgccagatgggcgtctgacctgggaagatgccaacaaggccaggacatgaggctgcttgtttttcagaggaggac

SEQ ID NO: 350375 - DNA, 3628 bp, Homo sapiens
tgtttgtgtgctttttgagtcatgcaaatgtagcgcctatttaaaaaccagaatttctaaaactcagaacctctgctgctcagtagctccctggcctttatttgacagtttttatcacttctcttggcaatgattttgttgttaagccaacaacattctcaaattcatgacacactatcaaatgccaccctcagtccaaatgacatttattccattttctctgtgggacatccagctaaagaggaaaaagaacgtattttcaaattattctgtctcttagccatagttacctagggaaggagtgaaagccattgagagtccacagacagaactcgcagccctggctcccctgcccctgtaggaggcggggaaggagtgagcttcaggccaggagggtccacggccccctgcagccatcctgcagcttccagtcctcctcctggaccatccctgcactcagaccttctccccggcccaccttccttcctcctctgggatcagacttcggtactgtgtcctcagggaccttcctctgtggccggcacccagtgatccctggctcctcagcacacccagctcagaggtcggcagcccctgcccacgagctccagccggccctgcatggccttatgctggaacgtctctggaatcttttccctttctttctgtgttggctgtgtcggggtggtctttgggaagcactatcatccaagggtccctcactccgtggctctctctctgcccttccaggctgagcagcgtgttatgtcccgggtacactctctggagcggcgtctggaagctcttgctgctgaattttcctccaactggcagaaggaggccatgcggctggaacgtctggagctgcggcaaggggctcctggccagggaggtggtggtggcctgagccacgaggacaccctggcgctgctggaggggctagtgagccgccgtgaagctgccctgaaggaggatttccgcagggaaactgctgctcgcatccaggaagaactgtctgccctgagagcagagcatcagcaagactcagaagacctcttcaagaagatcgtccgggcctcccaggagtccgaggctcgcatccagcagctgaagtcagagtggcaaagcatgacccaggagtccttccaggagagctctgtgaaggagctgaggcggctggaggaccagctggccggcctgcagcaggagctggcggctctggcactgaagcagagctcggtggcggaagaagtgggcctgctgccccagcagatccaggccgtgcgggacgacgtggaatctcagttcccggcctggatcagtcagttccttgcccgaggtggagggggccgcgtggggctccttcagagagaggagatgcaagctcagctgcgagagctggagagcaagatcctcacccatgtggcagagatgcagggcaagtcggccagggaagccgcggcctccctgagcctgacgctgcagaaagaaggtgtgattggagtgacagaggagcaggtgcaccacatcgtgaagcaggccctgcagcgctacagtgaggaccgcatcgggctggcagactacgccctggagtcaggaggggccagcgtcatcagcacccgatgttctgagacctacgagaccaagacggccctcctcagcctcttcggcatccccctgtggtaccactcccagtcaccccgagtcatcctccagccagatgtgcacccaggcaactgctgggccttccaggggccacaaggcttcgccgtggtccgcctctctgcccgcatccgccccacagccgttaccttagagcatgtgcccaaggccttgtcacccaacagcactatctccagtgcccccaaggacttcgccatctttgggtttgacgaagacctgcagcaggaggggacactccttggcaagttcacttacgatcaggacggcgagcctattcagacgtttcactttcaggcccctacgatggccacgtaccaggtggtggagctgcggatcctgactaactggggccaccccgagtacacctgcatctaccgcttcagagtgcatggggagcccgcccactagccctgcttactggtgcctgctgccagccatctgggagtgggtgaacagcaccccgccgcttcccccacacgcttgctcggcgctctgacttctaggagcacaagagaggagcctgtggccccatgcagatgaaaaggacgggcagggtctcctgagcagcaggtggctcgaggcggttagcaggctccagcagctcccttcttccttccctctgtgcccgtggcgtctgcttcccatcctgggagtgtgtatatatgtagcatatcatgggggactgggaagttgggagaggtaggacctgactggtcttggctggggtcaggggctggtgcctgggagctgatgaagcaggtgccagggctgtgggaggggcaagctacggcctgggctaggtgagctgcctctgcccctgggcaaggaagcgaggccctctgggaggagggtgcttagctccagagcaggatgggacttccccaggcaggaagcacttgatggagagctgcccagctctcctacaaggttagtgccctccacctagggaagcctgaaccacagggtccctgagggccttcgacaaaagtgtgtatttgtcccggggagggtagcagtgggccatggggcttcttgtgccctaaaggggactggctgctgtgatcttctaaggggcccagggccaaccctgtaggcttcccctctgctggggacggtagttgcttttctctctcctgatgctaggttggggcccaccctgctccctgttcctgctagggcctgccagtgcccctgagcttgctttccacattctcccagggtatggagacctagacctgtctttggggccattagcatctggggttatagcaagaagagtggggagcatggaactcctgggctcttgtggggacgttcagggtatcggggtgcgaggtctgtctgcaccggcccccacatctaaccaggccctgatgtaggggtcgtccgctcaggctgcccccttgggctcttgcagctcttgttcaggtagtcgcccttctggtttgttctctgtggggcagttggtgggggctgggggaagaggctggcagaagttaccctggatagggaagggggaggaggggacttttagagccagcaggccccactgtattatgtatatatttttcaaggtctgtttttctaactgaaaagctaagggcttgattcctagccccgttctgtggggcactgggtgatactcagtttcttgttcctggccgtggagaggggcctggggcactggttccggctgtgtctggtggtctggctgcggggaaggggcaagaaggcgggcaggccttcactgcagcactgagcctcaaatccgctctggagcatgaggctggatgcagtggtggtgaggccgccccgctccatcccgaggcagccagggtttgttttgcgctctcctgtcacaaatgctgcactattggttcttaagttttttatctccagatcctaatttatgcctatgcaaaaaataaatgacgcccaagagctg

SEQ ID NO: 350376 - DNA, 3892 bp, Homo sapiens
gaatggggcctcgacctttttcatcttgtgaaacccagactcaatggtgtcacctccttcagcaggacagaggctaagaggagtccctgtgtgggcagctggagccttcagattctcttcaggggaagagtccacatcccacctcatcatgtcccgaagaagccagcgcctcacgcgctactcccagggtgacgatgacggcagcagcagcagcggagggagctcggtggctgggagtcagagcaccctgtttaaagacagtcctctcaggaccttgaagaggaaatccagcaacatgaagcgcctgtccccagcgccacagctgggcccgtcctctgatgcacacacctcctactacagtgagtcgctggtccacgagtcctggttcccacccaggagctccctggaggaactgcatggtgacgccaactggggtgagtgtggagccctccgtcccggggctttgcttcctcggcctcccgcgagatactcctcacagtgtcccctgcagtccccgggattccctcctcagagcacctctctgcccagaccccacttttcagaagctcttggaggcccagaagagcccctggttcttccctgcacaggtgaggacctgcgggtgcggaggaggagaggcacgggtggctcagagagcagcagggccagcgggcttgtggggcgcaaggccaccgaggacttcctgggctcttcctcgggctactcctctgaggacgactacgtgggtgggctggcaccacctggtaccgcctgaccacagctgcctccctccttgacgtcttcgttttaaccaggcgcttctcgtccctgaagacgttcctctggttcctgctgccgctgctcttgctgacgtgcctgacgtatggtgcttggtatttctacccctatgggctgcagacattccaccctgctttggtttcctggtgggcagcgaaggacagcaggaggccggatgagggctgggaagccagagactcatcgccacatttccaggctgagcagcgtgttatgtcccgggtacactctctggagcggcgtctggaagctcttgctgctgaattttcctccaactggcagaaggaggccatgcggctggaacgtctggagctgcggcaaggggctcctggccagggaggtggtggtggcctgagccacgaggacaccctggcgctgctggaggggctagtgagccgccgtgaagctgccctgaaggaggatttccgcagggaaactgctgctcgcatccaggaagaactgtctgccctgagagcagagcatcagcaagactcagaagacctcttcaagaagatcgtccgggcctcccaggagtccgaggctcgcatccagcagctgaagtcagagtggcaaagcatgacccaggagtccttccaggagagctctgtgaaggagctgaggcggctggaggaccagctggccggcctgcagcaggagctggcggctctggcactgaagcagagctcggtggcggaagaagtgggcctgctgccccagcagatccaggccgtgcgggacgacgtggaatctcagttcccggcctggatcagtcagttccttgcccgaggtggagggggccgcgtggggctccttcagagagaggagatgcaagctcagctgcgagagctggagagcaagatcctcacccatgtggcagagatgcagggcaagtcggccagggaagccgcggcctccctgagcctgacgctgcagaaagaaggtgtgattggagtgacagaggagcaggtgcaccacatcgtgaagcaggccctgcagcgctacagtgaggaccgcatcgggctggcagactacgccctggagtcaggaggggccagcgtcatcagcacccgatgttctgagacctacgagaccaagacggccctcctcagcctcttcggcatccccctgtggtaccactcccagtcaccccgagtcatcctccagccagatgtgcacccaggcaactgctgggccttccaggggccacaaggcttcgccgtggtccgcctctctgcccgcatccgccccacagccgttaccttagagcatgtgcccaaggccttgtcacccaacagcactatctccagtgcccccaaggacttcgccatctttgggtttgacgaagacctgcagcaggaggggacactccttggcaagttcacttacgatcaggacggcgagcctattcagacgtttcactttcaggcccctacgatggccacgtaccaggtggtggagctgcggatcctgactaactggggccaccccgagtacacctgcatctaccgcttcagagtgcatggggagcccgcccactagccctgcttactggtgcctgctgccagccatctgggagtgggtgaacagcaccccgccgcttcccccacacgcttgctcggcgctctgacttctaggagcacaagagaggagcctgtggccccatgcagatgaaaaggacgggcagggtctcctgagcagcaggtggctcgaggcggttagcaggctccagcagctcccttcttccttccctctgtgcccgtggcgtctgcttcccatcctgggagtgtgtatatatgtagcatatcatgggggactgggaagttgggagaggtaggacctgactggtcttggctggggtcaggggctggtgcctgggagctgatgaagcaggtgccagggctgtgggaggggcaagctacggcctgggctaggtgagctgcctctgcccctgggcaaggaagcgaggccctctgggaggagggtgcttagctccagagcaggatgggacttccccaggcaggaagcacttgatggagagctgcccagctctcctacaaggttagtgccctccacctagggaagcctgaaccacagggtccctgagggccttcgacaaaagtgtgtatttgtcccggggagggtagcagtgggccatggggcttcttgtgccctaaaggggactggctgctgtgatcttctaaggggcccagggccaaccctgtaggcttcccctctgctggggacggtagttgcttttctctctcctgatgctaggttggggcccaccctgctccctgttcctgctagggcctgccagtgcccctgagcttgctttccacattctcccagggtatggagacctagacctgtctttggggccattagcatctggggttatagcaagaagagtggggagcatggaactcctgggctcttgtggggacgttcagggtatcggggtgcgaggtctgtctgcaccggcccccacatctaaccaggccctgatgtaggggtcgtccgctcaggctgcccccttgggctcttgcagctcttgttcaggtagtcgcccttctggtttgttctctgtggggcagttggtgggggctgggggaagaggctggcagaagttaccctggatagggaagggggaggaggggacttttagagccagcaggccccactgtattatgtatatatttttcaaggtctgtttttctaactgaaaagctaagggcttgattcctagccccgttctgtggggcactgggtgatactcagtttcttgttcctggccgtggagaggggcctggggcactggttccggctgtgtctggtggtctggctgcggggaaggggcaagaaggcgggcaggccttcactgcagcactgagcctcaaatccgctctggagcatgaggctggatgcagtggtggtgaggccgccccgctccatcccgaggcagccagggtttgttttgcgctctcctgtcacaaatgctgcactattggttcttaagttttttatctccagatcctaatttatgcctatgcaaaaaataaatgacgcccaagagctg

SEQ ID NO: 350377 - DNA, 3830 bp, Homo sapiens
ggccccactcgcgcagcgcgggcctccgccggccgcattgtccgcccgcccgcgcttgtcccgcgtcgccgctcttcgcgtgcccgctgcgccccgggcccggccgctgtgtcgccctgagcggagcgccgcccgcgggatccccacgcggaaagggggcgcgccccggcggcggcctggcctcggacgcccccggccgggctagaagccgccgcggcagcagattctcttcaggggaagagtccacatcccacctcatcatgtcccgaagaagccagcgcctcacgcgctactcccagggtgacgatgacggcagcagcagcagcggagggagctcggtggctgggagtcagagcaccctgtttaaagacagtcctctcaggaccttgaagaggaaatccagcaacatgaagcgcctgtccccagcgccacagctgggcccgtcctctgatgcacacacctcctactacagtgagtcgctggtccacgagtcctggttcccacccaggagctccctggaggaactgcatggtgacgccaactggggtgaggacctgcgggtgcggaggaggagaggcacgggtggctcagagagcagcagggccagcgggcttgtggggcgcaaggccaccgaggacttcctgggctcttcctcgggctactcctctgaggacgactacgtgggtgggctggcaccacctggtaccgcctgaccacagctgcctccctccttgacgtcttcgttttaaccaggcgcttctcgtccctgaagacgttcctctggttcctgctgccgctgctcttgctgacgtgcctgacgtatggtgcttggtatttctacccctatgggctgcagacattccaccctgctttggtttcctggtgggcagcgaaggacagcaggaggccggatgagggctgggaagccagagactcatcgccacatttccaggctgagcagcgtgttatgtcccgggtacactctctggagcggcgtctggaagctcttgctgctgaattttcctccaactggcagaaggaggccatgcggctggaacgtctggagctgcggcaaggggctcctggccagggaggtggtggtggcctgagccacgaggacaccctggcgctgctggaggggctagtgagccgccgtgaagctgccctgaaggaggatttccgcagggaaactgctgctcgcatccaggaagaactgtctgccctgagagcagagcatcagcaagactcagaagacctcttcaagaagatcgtccgggcctcccaggagtccgaggctcgcatccagcagctgaagtcagagtggcaaagcatgacccaggagtccttccaggagagctctgtgaaggagctgaggcggctggaggaccagctggccggcctgcagcaggagctggcggctctggcactgaagcagagctcggtggcggaagaagtgggcctgctgccccagcagatccaggccgtgcgggacgacgtggaatctcagttcccggcctggatcagtcagttccttgcccgaggtggagggggccgcgtggggctccttcagagagaggagatgcaagctcagctgcgagagctggagagcaagatcctcacccatgtggcagagatgcagggcaagtcggccagggaagccgcggcctccctgagcctgacgctgcagaaagaaggtgtgattggagtgacagaggagcaggtgcaccacatcgtgaagcaggccctgcagcgctacagtgaggaccgcatcgggctggcagactacgccctggagtcaggaggggccagcgtcatcagcacccgatgttctgagacctacgagaccaagacggccctcctcagcctcttcggcatccccctgtggtaccactcccagtcaccccgagtcatcctccagccagatgtgcacccaggcaactgctgggccttccaggggccacaaggcttcgccgtggtccgcctctctgcccgcatccgccccacagccgttaccttagagcatgtgcccaaggccttgtcacccaacagcactatctccagtgcccccaaggacttcgccatctttgggtttgacgaagacctgcagcaggaggggacactccttggcaagttcacttacgatcaggacggcgagcctattcagacgtttcactttcaggcccctacgatggccacgtaccaggtggtggagctgcggatcctgactaactggggccaccccgagtacacctgcatctaccgcttcagagtgcatggggagcccgcccactagccctgcttactggtgcctgctgccagccatctgggagtgggtgaacagcaccccgccgcttcccccacacgcttgctcggcgctctgacttctaggagcacaagagaggagcctgtggccccatgcagatgaaaaggacgggcagggtctcctgagcagcaggtggctcgaggcggttagcaggctccagcagctcccttcttccttccctctgtgcccgtggcgtctgcttcccatcctgggagtgtgtatatatgtagcatatcatgggggactgggaagttgggagaggtaggacctgactggtcttggctggggtcaggggctggtgcctgggagctgatgaagcaggtgccagggctgtgggaggggcaagctacggcctgggctaggtgagctgcctctgcccctgggcaaggaagcgaggccctctgggaggagggtgcttagctccagagcaggatgggacttccccaggcaggaagcacttgatggagagctgcccagctctcctacaaggttagtgccctccacctagggaagcctgaaccacagggtccctgagggccttcgacaaaagtgtgtatttgtcccggggagggtagcagtgggccatggggcttcttgtgccctaaaggggactggctgctgtgatcttctaaggggcccagggccaaccctgtaggcttcccctctgctggggacggtagttgcttttctctctcctgatgctaggttggggcccaccctgctccctgttcctgctagggcctgccagtgcccctgagcttgctttccacattctcccagggtatggagacctagacctgtctttggggccattagcatctggggttatagcaagaagagtggggagcatggaactcctgggctcttgtggggacgttcagggtatcggggtgcgaggtctgtctgcaccggcccccacatctaaccaggccctgatgtaggggtcgtccgctcaggctgcccccttgggctcttgcagctcttgttcaggtagtcgcccttctggtttgttctctgtggggcagttggtgggggctgggggaagaggctggcagaagttaccctggatagggaagggggaggaggggacttttagagccagcaggccccactgtattatgtatatatttttcaaggtctgtttttctaactgaaaagctaagggcttgattcctagccccgttctgtggggcactgggtgatactcagtttcttgttcctggccgtggagaggggcctggggcactggttccggctgtgtctggtggtctggctgcggggaaggggcaagaaggcgggcaggccttcactgcagcactgagcctcaaatccgctctggagcatgaggctggatgcagtggtggtgaggccgccccgctccatcccgaggcagccagggtttgttttgcgctctcctgtcacaaatgctgcactattggttcttaagttttttatctccagatcctaatttatgcctatgcaaaaaataaatgacgcccaagagctg

SEQ ID NO: 350378 - DNA, 2995 bp, Homo sapiens
ggatttaggaatatgtaagaaactcaacacataatataaatgcaatgaatgtttttcttctttaaatttaaagttagtatctacagatggaattgtatctacaaccaaatgcctcttatccctgaattcagagtgataattttataagtgtgaaacttaattatgtagggctccccccgtctgaatagaattaattccttaaagtctagttagggtcctgctgtctgtcatgttgccttgtaacggatgtttccacctccttctccaacctctaccccaccattagtgtattttactataaaaacagtggaaccacagccctaaagtcctgctgatataaagtccttttgtcttaattgtatttaaaaaaaaaaaaaaagggcggccgtcgcgatctagcatcagcaagactcagaagacctcttcaagaagatcgtccgggcctcccaggagtccgaggctcgcatccagcagctgaagtcagagtggcaaagcatgacccaggagtccttccaggagagctctgtgaaggagctgaggcggctggaggaccagctggccggcctgcagcaggagctggcggctctggcactgaagcagagctcggtggcggaagaagtgggcctgctgccccagcagatccaggccgtgcgggacgacgtggaatctcagttcccggcctggatcagtcagttccttgcccgaggtggagggggccgcgtggggctccttcagagagaggagatgcaagctcagctgcgagagctggagagcaagatcctcacccatgtggcagagatgcagggcaagtcggccagggaagccgcggcctccctgagcctgacgctgcagaaagaaggtgtgattggagtgacagaggagcaggtgcaccacatcgtgaagcaggccctgcagcgctacagtgaggaccgcatcgggctggcagactacgccctggagtcaggaggggccagcgtcatcagcacccgatgttctgagacctacgagaccaagacggccctcctcagcctcttcggcatccccctgtggtaccactcccagtcaccccgagtcatcctccagccagatgtgcacccaggcaactgctgggccttccaggggccacaaggcttcgccgtggtccgcctctctgcccgcatccgccccacagccgttaccttagagcatgtgcccaaggccttgtcacccaacagcactatctccagtgcccccaaggacttcgccatctttgggtttgacgaagacctgcagcaggaggggacactccttggcaagttcacttacgatcaggacggcgagcctattcagacgtttcactttcaggcccctacgatggccacgtaccaggtggtggagctgcggatcctgactaactggggccaccccgagtacacctgcatctaccgcttcagagtgcatggggagcccgcccactagccctgcttactggtgcctgctgccagccatctgggagtgggtgaacagcaccccgccgcttcccccacacgcttgctcggcgctctgacttctaggagcacaagagaggagcctgtggccccatgcagatgaaaaggacgggcagggtctcctgagcagcaggtggctcgaggcggttagcaggctccagcagctcccttcttccttccctctgtgcccgtggcgtctgcttcccatcctgggagtgtgtatatatgtagcatatcatgggggactgggaagttgggagaggtaggacctgactggtcttggctggggtcaggggctggtgcctgggagctgatgaagcaggtgccagggctgtgggaggggcaagctacggcctgggctaggtgagctgcctctgcccctgggcaaggaagcgaggccctctgggaggagggtgcttagctccagagcaggatgggacttccccaggcaggaagcacttgatggagagctgcccagctctcctacaaggttagtgccctccacctagggaagcctgaaccacagggtccctgagggccttcgacaaaagtgtgtatttgtcccggggagggtagcagtgggccatggggcttcttgtgccctaaaggggactggctgctgtgatcttctaaggggcccagggccaaccctgtaggcttcccctctgctggggacggtagttgcttttctctctcctgatgctaggttggggcccaccctgctccctgttcctgctagggcctgccagtgcccctgagcttgctttccacattctcccagggtatggagacctagacctgtctttggggccattagcatctggggttatagcaagaagagtggggagcatggaactcctgggctcttgtggggacgttcagggtatcggggtgcgaggtctgtctgcaccggcccccacatctaaccaggccctgatgtaggggtcgtccgctcaggctgcccccttgggctcttgcagctcttgttcaggtagtcgcccttctggtttgttctctgtggggcagttggtgggggctgggggaagaggctggcagaagttaccctggatagggaagggggaggaggggacttttagagccagcaggccccactgtattatgtatatatttttcaaggtctgtttttctaactgaaaagctaagggcttgattcctagccccgttctgtggggcactgggtgatactcagtttcttgttcctggccgtggagaggggcctggggcactggttccggctgtgtctggtggtctggctgcggggaaggggcaagaaggcgggcaggccttcactgcagcactgagcctcaaatccgctctggagcatgaggctggatgcagtggtggtgaggccgccccgctccatcccgaggcagccagggtttgttttgcgctctcctgtcacaaatgctgcactattggttcttaagttttttatctccagatcctaatttatgcctatgcaaaaaataaatgacgcccaagagctg

SEQ ID NO: 350379 - DNA, 3650 bp, Homo sapiens
tgtttgtgtgctttttgagtcatgcaaatgtagcgcctatttaaaaaccagaatttctaaaactcagaacctctgctgctcagtagctccctggcctttatttgacagtttttatcacttctcttggcaatgattttgttgttaagccaacaacattctcaaattcatgacacactatcaaatgccaccctcagtccaaatgacatttattccattttctctgtgggacatccagctaaagaggaaaaagaacgtattttcaaattattctgtctcttagccatagttacctagggaaggagtgaaagccattgagagtccacagacagaactcgcagccctggctcccctgcccctgtaggaggcggggaaggagtgagcttcaggccaggagggtccacggccccctgcagccatcctgcagcttccagtcctcctcctggaccatccctgcactcagaccttctccccggcccaccttccttcctcctctgggatcagacttcggtactgtgtcctcagggaccttcctctgtggccggcacccagtgatccctggctcctcagcacacccagctcagaggtcggcagcccctgcccacgagctccagccggccctgcatggccttatgctggaacgtctctggaatcttttccctttctttctgtgttggctgtgtcggggtggtctttgggaagcactatcatccaagggtccctcactccgtggctctctctctgcccttccaggctgagcagcgtgttatgtcccgggtacactctctggagcggcgtctggaagctcttgctgctgaattttcctccaactggcagaaggaggccatgcggctggaacgtctggagctgcggcaaggggctcctggccagggaggtggtggtggcctgagccacgaggacaccctggcgctgctggaggggctagtgagccgccgtgaagctgccctgaaggaggatttccgcagggaaactgctgctcgcatccaggaagaactgtctgccctgagagcagagcatcagcaagactcagaagacctcttcaagaagatcgtccgggcctcccaggagtccgaggctcgcatccagcagctgaagtcagagtggcaaagcatgacccaggagtccttccaggagagctctgtgaaggagctgaggcggctggaggaccagctggccggcctgcagcaggagctggcggctctggcactgaagcagagctcggtggcggaagaagtgggcctgctgccccagcagatccaggccgtgcgggacgacgtggaatctcagttcccggcctggatcagtcagttccttgcccgaggtggagggggccgcgtggggctccttcagagagaggagatgcaagctcagctgcgagagctggagagcaagatcctcacccatgtggcagagatgcagggcaagtcggccagggaagccgcggcctccctgagcctgacgctgcagaaagaaggtgtgattggagtgacagaggagcaggtgcaccacatcgtgaagcaggccctgcagcgctacagtgaggaccgcatcgggctggcagactacgccctggagtcaggaggggccagcgtcatcagcacccgatgttctgagacctacgagaccaagacggccctcctcagcctcttcggcatccccctgtggtaccactcccagtcaccccgagtcatcctccagccagatgtgcacccaggcaactgctgggccttccaggggccacaaggcttcgccgtggtccgcctctctgcccgcatccgccccacagccgttaccttagagcatgtgcccaaggccttgtcacccaacagcactatctccagtgcccccaaggacttcgccatctttgggtttgacgaagacctgcagcaggaggggacactccttggcaagttcacttacgatcaggacggcgagcctattcagacgtttcactttcaggcccctacgatggccacgtaccaggtggtggagctgcggatcctgactaactggggccaccccgagtacacctgcatctaccgcttcagagtgcatggggagcccgcccactagccctgcttactggtgcctgctgccagccatctgggagtgggtgaacagcaccccgccgcttcccccacacgcttgctcggcgctctgacttctaggagcacaagagaggagcctgtggccccatgcagatgaaaaggacgggcagggtctcctgagcagcaggtggctcgaggcggttagcaggctccagcagctcccttcttccttccctctgtgcccgtggcgtctgcttcccatcctgggagtgtgtatatatgtagcatatcatgggggactgggaagttgggagaggtaggacctgactggtcttggctggggtcaggggctggtgcctgggagctgatgaagcaggtgccagggctgtgggaggggcaagctacggcctgggctaggtgagctgcctctgcccctgggcaaggaagcgaggccctctgggaggagggtgcttagctccagagcaggatgggacttccccaggcaggaagcacttgatggagagctgcccagctctcctacaaggttagtgccctccacctagggaagcctgaaccacagggtccctgagggccttcgacaaaagtgtgtatttgtcccggggagggtagcagtgggccatggggcttcttgtgccctaaaggggactggctgctgtgatcttctaaggggcccagggccaaccctgtaggcttcccctctgctggggacggtagttgcttttctctctcctgatgctaggttggggcccaccctgctccctgttcctgctagggcctgccagtgcccctgagcttgctttccacattctcccagggtatggagacctagacctgtctttggggccattagcatctggggttatagcaagaagagtggggagcatggaactcctgggctcttgtggggacgttcagggtatcggggtgcgaggtctgtctgcaccggcccccacatctaaccaggccctgatgtaggggtcgtccgctcaggctgcccccttgggctcttgcagctcttgttcaggtagtcgcccttctggtttgttctctgtggggcagttggtgggggctgggggaagaggctggcagaagttaccctggatagggaagggggaggaggggacttttagagccagcaggccccactgtattatgtatatatttttcaaggtctgtttttctaactgaaaagctaagggcttgattcctagccccgttctgtggggcactgggtgatactcagtttcttgttcctggccgtggagaggggcctggggcactggttccggctgtgtctggtggtctggctgcggggaaggggcaagaaggcgggcaggccttcactgcagcactgagcctcaaatccgctctggagcatgaggctggatgcagtggtggtgaggccgccccgctccatcccgaggcagccagggtttgttttgcgctctcctgtcacaaatgctgcactattggttcttaagttttttatctccagatcctaatttatgcctatgcaaaaaataaatgacgcccaagagctgtgggatgtggctttcatgtggc

SEQ ID NO: 350380 - DNA, 2847 bp, Homo sapiens
tgtttgtgtgctttttgagtcatgcaaatgtagcgcctatttaaaaaccagaatttctaaaactcagaacctctgctgctcagtagctccctggcctttatttgacagtttttatcacttctcttggcaatgattttgttgttaagccaacaacattctcaaattcatgacacactatcaaatgccaccctcagtccaaatgacatttattccattttctctgtgggacatccagctaaagaggaaaaagaacgtattttcaaattattctgtctcttagccatagttacctagggaaggagtgaaagccattgagagtccacagacagaactcgcagccctggctcccctgcccctgtaggaggcggggaaggagtgagcttcaggccaggagggtccacggccccctgcagccatcctgcagcttccagtcctcctcctggaccatccctgcactcagaccttctccccggcccaccttccttcctcctctgggatcagacttcggtactgtgtcctcagggaccttcctctgtggccggcacccagtgatccctggctcctcagcacacccagctcagaggtcggcagcccctgcccacgagctccagccggccctgcatggccttatgctggaacgtctctggaatcttttccctttctttctgtgttggctgtgtcggggtggtctttgggaagcactatcatccaagggtccctcactccgtggctctctctctgcccttccaggctgagcagcgtgttatgtcccgggtacactctctggagcggcgtctggaagctcttgctgctgaattttcctccaactggcagaaggaggccatgcggctggaacgtctggagctgcggcaaggggctcctggccagggaggtggtggtggcctgagccacgaggacaccctggcgctgctggaggggctagtgagccgccgtgaagctgccctgaaggaggatttccgcagggaaactgctgctcgcatccaggaagaactgtctgccctgagagcagagcatcagcaagactcagaagacctcttcaagaagatcgtccgggcctcccaggagtccgaggctcgcatccagcagctgaagtcagagtggcaaagcatgacccaggagtccttccaggagagctctgtgaaggagctgaggcggctggaggaccagctggccggcctgcagcaggagctggcggctctggcactgaagcagagctcggtggcggaagaagtgggcctgctgccccagcagatccaggccgtgcgggacgacgtggaatctcagttcccggcctggatcagtcagttccttgcccgaggtggagggggccgcgtggggctccttcagagagaggagatgcaagctcagctgcgagagctggagagcaagatcctcacccatgtggcagagatgcagggcaagtcggccagggaagccgcggcctccctgagcctgacgctgcagaaagaaggtgtgattggagtgacagaggagcaggtgcaccacatcgtgaagcaggccctgcagcgctacagtgaggaccgcatcgggctggcagactacgccctggagtcaggaggggccagcgtcatcagcacccgatgttctgagacctacgagaccaagacggccctcctcagcctcttcggcatccccctgtggtaccactcccagtcaccccgagtcatcctccagccagatgtgcacccaggcaactgctgggccttccaggggccacaaggcttcgccgtggtccgcctctctgcccgcatccgccccacagccgttaccttagagcatgtgcccaaggccttgtcacccaacagcactatctccagtgcccccaaggacttcgccatctttgggtttgacgaagacctgcagcaggaggggacactccttggcaagttcacttacgatcaggacggcgagcctattcagacgtttcactttcaggcccctacgatggccacgtaccaggtggtggagctgcggatcctgactaactggggccaccccgagtacacctgcatctaccgcttcagagtgcatggggagcccgcccactagccctgcttactggtgcctgctgccagccatctgggagtgggtgaacagcaccccgccgcttcccccacacgcttgctcggcgctctgacttctaggagcacaagagaggagcctgtggccccatgcagatgaaaaggacgggcagggtctcctgagcagcaggtggctcgaggcggttagcaggctccagcagctcccttcttccttccctctgtgcccgtggcgtctgcttcccatcctgggagtgtgtatatatgtagcatatcatgggggactgggaagttgggagaggtaggacctgactggtcttggctggggtcaggggctggtgcctgggccttccaggggccacaaggcttcgccgtggtccgcctctctgcccgcatccgccccgcagccgttaccttagagcatgtgctccaaagccttgtcacccaacagcactgggtgatactcagtttcttgttcctggccgtggagaggggcctggggcactggttccggctgtgtctggtggtctggctgcggggaaggggcaagaaggcgggcaggccttcactgcagcactgagcctcaaatccgctctggagcatgaggctggatgcagtggtggtgaggccgccccgctccatcccgaggcagccagggtttgttttgcgctctcctgtcacaaatgctgcactattggttcttaagttttttatctccagatcctaatttatgcctatgcaaaaaataaatgacgcccaagagctg

SEQ ID NO: 350381 - DNA, 1146 bp, Homo sapiens
ggccccactcgcgcagcgcgggcctccgccggccgcattgtccgcccgcccgcgcttgtcccgcgtcgccgctcttcgcgtgcccgctgcgccccgggcccggccgctgtgtcgccctgagcggagcgccgcccgcgggatccccacgcggaaagggggcgcgccccggcggcggcctggcctcggacgcccccggccgggctagaagccgccgcggcagcagattctcttcaggggaagagtccacatcccacctcatcatgtcccgaagaagccagcgcctcacgcgctactcccagggtgacgatgacggcagcagcagcagcggagggagctcggtggctgggagtcagagcaccctgtttaaagacagtcctctcaggaccttgaagaggaaatccagcaacatgaagcgcctgtccccagcgccacagctgggcccgtcctctgatgcacacacctcctactacagtgagtcgctggtccacgagtcctggttcccacccaggagctccctggaggaactgcatggtgacgccaactggggtgaggacctgcgggtgcggaggaggagaggcacgggtggctcagagagcagcagggccagcgggcttgtggggcgcaaggccaccgaggacttcctgggctcttcctcgggctactcctctgaggacgactacgtgggctactcggatgtggaccagcagagttccagctcgcggctccgaagcgccgtctcacgggcgggctccttactctggatggtggccacttcgccaggccggctcttcagacttctctactggtgggctggcaccacctggtaccgcctgaccacagctgcctccctccttgacgtcttcgttttaaccaggcgcttctcgtccctgaagacgttcctctggttcctgctgccgctgctcttgctgacgtgcctgacgtatggtgcttggtatttctacccctatgggctgcagacattccaccctgctttggtttcctggtgggcagcgaaggacagcaggaggccggatgagggctgggaagccagagactcatcgccacatttccaggcagggtttcaagagagaaccaaggcaaccagacctttgaggccttgatccagaaccagcacaccgtcactcc

SEQ ID NO: 350382 - DNA, 523 bp, Homo sapiens
cccagggaaagctacaagcagcaaacagtccgcatgggtcatccccttcactcccagctcagagcccaggccaggggcccccaagaaaggctctggtggagaacctctgcatgaaggctgtcaaccagtccataggcaagcctggctgcctccagctgggtggacagacgggctggagaaggggagaagaggaaagggggttgcctgccctgtctcctacctgaggctgaggaaggagaaggggatgcactgttggggaggcagctgtaactcaaagccttagcctctgttcccacgaaggcagggccatcaggcaccaaagggattctgccagcatagtgctcctggaccagtgatacacccggcaccctgtcctggacaagctgttggcctggatctgagccctcgtggaggtcaaagccacctttggttctgccattgctgctgtgtggaagttcactcctgccttttcctttccctagagcctccaccaccccgagatcacatttctcactgccttttg

SEQ ID NO: 350383 - DNA, 517 bp, Homo sapiens
ggtagagacagggtcttgctacattgcccaggctagtcttgagctcctgacctcaagcgatcctcctgcttcggcctctcaaagtgttgggattataggcgtgagccaccgcgcctggctagcaatttttaaatatgaattgctgcatgatctgctcttctttgttagaacagacttacaagaacactcattcaaatatagatctgactgaatatgttaaaaagtagaatagttggctggaggctgaggtgggcagatcacctgaggttgggagttcgagatgagcctgaccaacatggagaaactctgtttctactagaaatacaaaattagccaggcatggtggcacatgcctgtaatcccaactacttgggaggctgaggcaggagaatcacttgaacccggaaggtggaggttgcagtgagccgagattgcaccattgcactccagcctgggcaacaagagtgaagctccgtctcaaaaaaaaaaaaggtagaatagttaatttggaaatttc

SEQ ID NO: 350384 - DNA, 767 bp, Homo sapiens
gtgaagactgagttttcagttcatgcgagatctgattgtttaaaagagtgcagcacttcctccaccttgctccctctcttgccactgatgtgcctgcttccccttcaccttctgcctggattgtaagctccctgagaacctcaccagaagcagatgccagcaccacgcttcctatacagcctgccaaaatgagctcctgaatttcacagacaaatccagacccctgtgtggaaagcctgcggtggtgttctccgtcttcccacaggactccctgcagccaggaattctaggggagcacctgacgcgaggtatatgcccagatggcctgaagtaactgaagaatcacaaaagaagtgaaaatgtcctgccccgccttaactgatgacattccaccacaaaggaagtgtcaatggctggtccttgccttaactgatgacattccaccgcaaaagaagtgaaaatggccggtccttgccttaactgatgacattccaccgcaaaagaagtgaaaatggccggtccttgccttaagtgatggcattaccttgtgaaagtccttttcctggctcattctggctcaaaatcacccccactgagcaccttgtgacccccactcctgcccgccagggaacaatccccctttgactgtaattttcctttacctacccaaatcttataaaatggccccacccctatctccctttgctgactctctttttggactcagcctgcctgcatccaggtgattaaaagcttttattgctcac

SEQ ID NO: 350385 - DNA, 2126 bp, Homo sapiens
gtcaggtgcgtgcccctgtccggcagccgaggagaccccgcgcagtgctgccaacgccccggtggagaagctgaggtcatcatcagatttgaaatatttaaagtggatacaaaactatttcagcaatgcagacaattaagtgtgttgttgtgggcgatggtgctgttggtaaaacatgtctcctgatatcctacacaacaaacaaatttccatcggaatatgtaccgactgtttttgacaactatgcagtcacagttatgattggtggagaaccatatactcttggactttttgatactgcagggcaagaggattatgacagattacgaccgctgagttatccacaaacagatgtatttctagtctgtttttcagtggtctctccatcttcatttgaaaacgtgaaagaaaagtgggtgcctgagataactcaccactgtccaaagactcctttcttgcttgttgggactcaaattgatctcagagatgacccctctactattgagaaacttgccaagaacaaacagaagcctatcactccagagactgctgaaaagctggcccgtgacctgaaggctgtcaagtatgtggagtgttctgcacttacacagaaaggcctaaagaatgtatttgacgaagcaatattggctgccctggagcctccagaaccgaagaagagccgcaggtgtgtgctgctatgaacatctctccagagccctttctgcacagctggtgtcggcatcatactaaaagcaatgtttaaatcaaactaaagattaaaaattaaaattcgtttttgcaataatgacaaatgccctgcacctacccacatgcactcgtgtgagacaaggcccataggtatggccccccccttccccctcccagtactagttaattttgagtaattgtattgtcagaaaagtgattagtactatttttttttgttgtttcaaaaaaaaaatttttgtgtgtgtgtttttttttttttttttttttgttgtttaaaagcaaggcatgcttgtggatgactctgtaacagactaattggaattgttgaagctgctccctggttccactctggagagtaatctgggacatcttagtgttttgttttgtttttttccctcctcttttttttgggggggagtgtgtgtggggtttgttttttagtcttgtttttttaattcattaaccagtggttagcccttaaggggaggaggacggattgattccacattccacttcctagatctagtttagaaaacatgttccccatctggtgctcttaggaaggagtatagtaaatgcctcatttaataacatactcctttttgaaagttgccttttctctccacccttgagtagatccagtatttgatgaaactcatgaaagtgggtggagcccatcttgcccctcctcttttctaggacgcactatatgtgactgtgactttcaaggacatttgtttgccatttgctgatttttttgggaagttaatttctaacttctttcactgataaatgaagaaaagtattgcacctttgaaatgcaccaaatgaattgagtttgtaattaaaaaaatttttttccctttcagtcattgtcttatatgcttagcatagatttgcagctcagtagtatatggtgttcctagaatgcagctgaagacctgttatgtagaggaaatacgaggggtggtgctagaagacagacatctgtggaatgattcacatcctctcaagttaggaggatggaggcctgcttcattaagaagctgggggtagggtgggggtggggagaacacttaacaacatggggaccagtcaggggaatccccttatttctgttttgcatatgaggaaccctagagcagccaggtgaggctctctagtttaataaaaatcatggaaagactcttaatgcagactcttcttaagtgttaatagggattttttcagcttattttggttgcagtttccaatttttaaaaatgttgaggtaatctttcccaccttcccaaacctaattcttgtagatgcattagtgttgaaccaatgctttctcatgtctcaattctttgtatatgcattcttttcagatgtattaaacaaacaaaaacccttca

SEQ ID NO: 350386 - DNA, 1672 bp, Homo sapiens
gtcaggtgcgtgcccctgtccggcagccgaggagaccccgcgcagtgctgccaacgccccggtggagaagctgaggtcatcatcagatttgaaatatttaaagtggatacaaaactatttcagcaatgcagacaattaagtgtgttgttgtgggcgatggtgctgttggtaaaacatgtctcctgatatcctacacaacaaacaaatttccatcggaatatgtaccgactgtttttgacaactatgcagtcacagttatgattggtggagaaccatatactcttggactttttgatactgcagggcaagaggattatgacagattacgaccgctgagttatccacaaacagatgtatttctagtctgtttttcagtggtctctccatcttcatttgaaaacgtgaaagaaaagtgggtgcctgagataactcaccactgtccaaagactcctttcttgcttgttgggactcaaattgatctcagagatgacccctctactattgagaaacttgccaagaacaaacagaagcctatcactccagagactgctgaaaagctggcccgtgacctgaaggctgtcaagtatgtggagtgttctgcacttacacagagaggtctgaagaatgtgtttgatgaggctatcctagctgccctcgagcctccggaaactcaacccaaaaggaagtgctgtatattctaaactgttttctccttcccttctttgctgctgcttcctgtcccactactgtagaaagatcgtttaaaaacaaaggaataaaaccatcctgtttgaaagcctctgcgtctttttactcaccaccttagagcaacctctgtattagtttttgatcaagaatgcaatatcatataaattttttgtgatcagtagtcaagttggacttgttttaacgttctgctgcttgagttgcctgatgctcagagctttttggtttggattactattgcaaaagggaacttggtctggctttaagaatgtcctcttggagaaaataacaagagttttaacacttctagatcttagttctagatggagaaagtaacacaaacatcattttactcttatgatcaattgttaattgtaattgcatgacaaaccttatggaaaaggggtgacctagtagagtgtaatggggaagggaggattcttttctggttttcctttgtgcggtgaaactttgtgttgctgttgctttggctgtctgtgctgtagtggagtatttgtcagtctggggtggggaagatattgatgtatctgctactgctttatgagttcatttgttacattatcttttaagaataacatccatttaaacagttgacttacagtttgttaatgctgagatgtaaagctgccacctttatattttcctgcttctgattttattgtgagggaaatatacaattgtggttaccttcaaattttgaaattaaaaatatacaaccgtttgtaaaaatgcctgatgaagctttattcctgttgcactgactggctctaattttacgtatgtatcaggtacccacatttttgctcccttgaatctccttgactctgtctaactggtgggataaagggagttcaaagtgactatctttgcagctaccataatcaccctctctctctctttgcctgtgccttccatagaataagga

SEQ ID NO: 350387 - DNA, 787 bp, Homo sapiens
gtcaggtgcgtgcccctgtccggcagccgaggagaccccgcgcagtgctgccaacgccccggtggagaagctgaggtcatcatcagatttgaaatatttaaagtggatacaaaactatttcagcaatgcagacaattaagtgtgttgttgtgggcgatggtgctgttggtaaaacatgtctcctgatatcctacacaacaaacaaatttccatcggaatatgtaccgactgtttttgacaactatgcagtcacagttatgattggtggagaaccatatactcttggactttttgatactgcagggcaagaggattatgacagattacgaccgctgagttatccacaaacagatgtatttctagtctgtttttcagtggtctctccatcttcatttgaaaacgtgaaagaaaagtgggtgcctgagataactcaccactgtccaaagactcctttcttgcttgttgggactcaaattgatctcagagatgacccctctactattgagaaacttgccaagaacaaacagaagcctatcactccagagactgctgaaaagctggcccgtgacctgaaggctgtcaagtatgtggagtgttctgcacttacacagagtaagaatggcatgaaaccccatgtgtatttatggtcgagtcatttattagagcattaggatacaggagttatttctaacagtgatcagcagtgctcaaagatgcccagcaagaatatgaacagcttcatattgtatgttcttttgttagaggcctctgtgttttttggagaata

SEQ ID NO: 350388 - DNA, 913 bp, Homo sapiens
tgttattatataaatctattttatttttaataaaacaactaagccaccctcccacccctaaccaaaatttttttatattcatttataattttgatgtagggtgggggtggggagaacacttaacaacatggggaccagtcaggggaatccccttatttctgttttgcatatgaggaaccctagagcagccaggtgaggctctctagtttaataaaaatcatggaaagactcttaatgcagactcttcttaagtgttaatagggattttttcagcttattttggttgcagtttccaatttttaaaaatgttgaggtaatctttcccaccttcccaaacctaattcttgtagatgcattagtgttgaaccaatgctttctcatgtctcaattctttgtatatgcattcttttcagatgtattaaacaaacaaaaacccttcaaaaaaaaaaaaaaaaaaagaaccaaacacaaaaaaaaaaaaacacaaaaaaacaaaaaaaaaaacaaaaaaaagacagcagaccagaaagaaaaaacaagaaagaagggcgaaagcaacatcacaaacgaggaagcaacaaaaaaaaacaaggggagtggcaacgaacccaaacaaaaggaacaagcaacgacagacagtacggtgagtgacccggggagcaagaatcataacagcaagtaatagaagggggggagccagacgcaaaccacaagaaacggaagcagcgacagaaagaggagagagtctgagaaacaacaaataagaggctacgaggggagaacagaaggcaaaatgaacaaaaacagaaggacacacggcgtggggaaatagcaaatctcacggaagaggaaccaaggcacgagagaaataaaaacaagcacaggcggagggaggaaaacaagagggagggga

SEQ ID NO: 350389 - DNA, 830 bp, Homo sapiens
actagttctagatcgcgagcggcgccctttttttcagcttattttggttgcagtttccaatttttaaaaatgttgaggtaatctttcccaccttcccaaacctaattcttgtagatgcattagtgttgaaccaatgctttctcatgtctcaattctttgtatatgcattcttttcagatgtattaaacaaacaaaaacccttcaaaaaaaaaaaaaaaaaaacaaaaaaaaaaaaaaaaaaaaaaagaaaagaaaaaaaaaaaaaaaaataaacaaacaataaaccgaaagaaaacgaaaaagaaaaaaggaaaatagaaaacaagaaaacaagcgaggagggggggggggcgccccaaggaatatgctttactggccggggggggggcacgccacgttccggcgacaccacctctcgtattgactaaacgagagacgtgcttcctacagttagggatagagctataaatctaacaacacacacagcgcgcacgacggtatcaatcaaccactaaacgccgttgtatcggacaatgaaaacagccggatctaagtagcgcgttatatgttgttagggagccacaccaccatactttcttggtcttggagcgagagtgttaatacaaataacgaacaaaccacactatgccatcatgagtatacatcgcgcccgaagagggtaatactatcttagtatgtggtcatgtgtgtctgatggttgctcaaccaccgcgaatcattcgtcggtgtgaagaggaaactcgacttctagccaaggatatgttatagtgcaaaaaatttttacaagacggcgtttatattaataagcg

SEQ ID NO: 350390 - DNA, 331 bp, Homo sapiens
  misc_feature (1)..(2): n is a, c, g, or t
  misc_feature (182)..(183): n is a, c, g, or t
  misc_feature (209)..(210): n is a, c, g, or t
  misc_feature (214)..(214): n is a, c, g, or t
nnttgcgcatcttcataacagatttgtttacaagtcctggattttctgcagagcttcattatttcagttacttctctgataaggagaatagagttcactagcagctttcacatttccaagcaccaaactcatcttgtttgttcaattttgtcccttctgtcgtcttctcgcagcccgttaanngcacgcgcgaattcgcggccgcgtcnncacnacagaagggcaaacctaattcttgtagatgcattagtgttgaaccaatgctttctcatgtctcaattctttgtatatgcattcttttcagatgtattaaacaaacaaaaacccttca

SEQ ID NO: 350391 - DNA, 2170 bp, Homo sapiens
gtcaggtgcgtgcccctgtccggcagccgaggagaccccgcgcagtgctgccaacgccccggtggagaagctgaggtcatcatcagatttgaaatatttaaagtggatacaaaactatttcagcaatgcagacaattaagtgtgttgttgtgggcgatggtgctgttggtaaaacatgtctcctgatatcctacacaacaaacaaatttccatcggaatatgtaccgactgtttttgacaactatgcagtcacagttatgattggtggagaaccatatactcttggactttttgatactgcagggcaagaggattatgacagattacgaccgctgagttatccacaaacagatgtatttctagtctgtttttcagtggtctctccatcttcatttgaaaacgtgaaagaaaagtgggtgcctgagataactcaccactgtccaaagactcctttcttgcttgttgggactcaaattgatctcagagatgacccctctactattgagaaacttgccaagaacaaacagaagcctatcactccagagactgctgaaaagctggcccgtgacctgaaggctgtcaagtatgtggagtgttctgcacttacacagaaaggcctaaagaatgtatttgacgaagcaatattggctgccctggagcctccagaaccgaagaagagccgcaggtgtgtgctgctatgaacatctctccagagccctttctgcacagctggtgtcggcatcatactaaaagcaatgtttaaatcaaactaaagattaaaaattaaaattcgtttttgcaataatgacaaatgccctgcacctacccacatgcactcgtgtgagacaaggcccataggtatggccccccccttccccctcccagtactagttaattttgagtaattgtattgtcagaaaagtgattagtactatttttttttgttgtttcaaaaaaaaaatttttgtgtgtgtgtttttttttttttttttttttgttgtttaaaagcaaggcatgcttgtggatgactctgtaacagactaattggaattgttgaagctgctccctggttccactctggagagtaatctgggacatcttagtgttttgttttgtttttttccctcctcttttttttgggggggagtgtgtgtggggtttgttttttagtcttgtttttttaattcattaaccagtggttagcccttaaggggaggaggacggattgattccacattccacttcctagatctagtttagaaaacatgttccccatctggtgctcttaggaaggagtatagtaaatgcctcatttaataacatactcctttttgaaagttgccttttctctccacccttgagtagatccagtatttgatgaaactcatgaaagtgggtggagcccatcttgcccctcctcttttctaggacgcactatatgtgactgtgactttcaaggacatttgtttgccatttgctgatttttttgggaagttaatttctaacttctttcactgataaatgaagaaaagtattgcacctttgaaatgcaccaaatgaattgagtttgtaattaaaaaaatttttttccctttcagtcattgtcttatatgcttagcatagatttgcagctcagtagtatatggtgttcctagaatgcagctgaagacctgttatgtagaggaaatacgaggggtggtgctagaagacagacatctgtggaatgattcacatcctctcaagttaggaggatggaggcctgcttcattaagaagctgggggtagggtgggggtggggagaacacttaacaacatggggaccagtcaggggaatccccttatttctgttttgcatatgaggaaccctagagcagccaggtgaggctctctagtttaataaaaatcatggaaagactcttaatgcagactcttcttaagtgttaatagggattttttcagcttattttggttgcagtttccaatttttaaaaatgttgaggtaatctttcccaccttcccaaacctaattcttgtagatgcattagtgttgaaccaatgctttctcatgtctcaattctttgtatatgcattcttttcagatgtattaaacaaacaaaaacccttcaaaaaaaaaaggaagcaggggaaccctcaagagtcgcctggcggg

SEQ ID NO: 350392 - DNA, 2071 bp, Homo sapiens
gtcaggtgcgtgcccctgtccggcagccgaggagaccccgcgcagtgctgccaacgccccggtggagaagctgaggtcatcatcagatttgaaatatttaaagtggatacaaaactatttcagcaatgcagacaattaagtgtgttgttgtgggcgatggtgctgttggtaaaacatgtctcctgatatcctacacaacaaacaaatttccatcggaatatgtaccgactgtttttgacaactatgcagtcacagttatgattggtggagaaccatatactcttggactttttgatactgcagggcaagaggattatgacagattacgaccgctgagttatccacaaacagatgtatttctagtctgtttttcagtggtctctccatcttcatttgaaaacgtgaaagaaaagtgggtgcctgagataactcaccactgtccaaagactcctttcttgcttgttgggactcaaattgatctcagagatgacccctctactattgagaaacttgccaagaacaaacagaagcctatcactccagagactgctgaaaagctggcccgtgacctgaaggctgtcaagtatgtggagtgttctgcacttacacagaaaggcctaaagaatgtatttgacgaagcaatattggctgccctggagcctccagaaccgaagaagagccgcaggtgtgtgctgctatgaacatctctccagagccctttctgcacagctggtgtcggcatcatactaaaagcaatgtttaaatcaaactaaagattaaaaattaaaattcgtttttgcaataatgacaaatgccctgcacctacccacatgcactcgtgtgagacaaggcccataggtatggccccccccttccccctcccagtactagttaattttgagtaattgtattgtcagaaaagtgattagtactatttttttttgttgtttcaaaaaaaaaatttttgtgtgtgtgtttttttttttttttttttttgttgtttaaaagcaaggcatgcttgtggatgactctgtaacagactaattggaattgttgaagctgctccctggttccactctggagagtaatctgggacatcttagtgttttgttttgtttttttccctcctcttttttttgggggggagtgtgtgtggggtttgttttttagtcttgtttttttaattcattaaccagtggttagcccttaaggggaggaggacggattgattccacattccacttcctagatctagtttagaaaacatgttccccatctggtgctcttaggaaggagtatagtaaatgcctcatttaataacatactcctttttgaaagttgccttttctctccacccttgagtagatccagtatttgatgaaactcatgaaagtgggtggagcccatcttgcccctcctcttttctaggacgcactatatgtgactgtgactttcaaggacatttgtttgccatttgctgatttttttgggaagttaatttctaacttctttcactgataaatgaagaaaagtattgcacctttgaaatgcaccaaatgaattgagtttgtaattaaaaaaatttttttccctttcagtcattgtcttatatgcttagcatagatttgcagctcagtagtatatggtgttcctagaatgcagctgaagacctgttatgtagaggaaatacgaggggtggtgctagaagacagacatctgtggaatgattcacatcctctcaagttaggaggatggaggcctgcttcattaagaagctgggggtagggtgggggtggggagaacacttaacaacatggggaccagtcaggggaatccccttatttctgttttgcatatgaggaaccctagagcagccaggtgaggctctctagtttaataaaaatcatggaaagactcttaatgcagactcttcttaagtgttaatagggattttttcagcttattttggttgcagtttccaatttttaaatgttgaaccaatgctttctcatgtctcaattctttgtatatgcattcttttcagatgtattaaacaaacaaaaacccttca

SEQ ID NO: 350393 - DNA, 2266 bp, Homo sapiens
gcggccgcggcggggcggtggcaggagggcagctcgctggctgctcgcggcggtgcctgtccgagctcccctccgcgccggccgcgtcctctgggcggggtggccccgagccacggcctccaggctgctcttcctttcggaggtcgagttcctagcatttccatccgctcctccagcccgctccctgccggtttagctgaagcttccctttcgaggtcatcatcagatttgaaatatttaaagtggatacaaaactatttcagcaatgcagacaattaagtgtgttgttgtgggcgatggtgctgttggtaaaacatgtctcctgatatcctacacaacaaacaaatttccatcggaatatgtaccgactgtttttgacaactatgcagtcacagttatgattggtggagaaccatatactcttggactttttgatactgcagggcaagaggattatgacagattacgaccgctgagttatccacaaacagatgtatttctagtctgtttttcagtggtctctccatcttcatttgaaaacgtgaaagaaaagtgggtgcctgagataactcaccactgtccaaagactcctttcttgcttgttgggactcaaattgatctcagagatgacccctctactattgagaaacttgccaagaacaaacagaagcctatcactccagagactgctgaaaagctggcccgtgacctgaaggctgtcaagtatgtggagtgttctgcacttacacagaaaggcctaaagaatgtatttgacgaagcaatattggctgccctggagcctccagaaccgaagaagagccgcaggtgtgtgctgctatgaacatctctccagagccctttctgcacagctggtgtcggcatcatactaaaagcaatgtttaaatcaaactaaagattaaaaattaaaattcgtttttgcaataatgacaaatgccctgcacctacccacatgcactcgtgtgagacaaggcccataggtatggccccccccttccccctcccagtactagttaattttgagtaattgtattgtcagaaaagtgattagtactatttttttttgttgtttcaaaaaaaaaatttttgtgtgtgtgtttttttttttttttttttttgttgtttaaaagcaaggcatgcttgtggatgactctgtaacagactaattggaattgttgaagctgctccctggttccactctggagagtaatctgggacatcttagtgttttgttttgtttttttccctcctcttttttttgggggggagtgtgtgtggggtttgttttttagtcttgtttttttaattcattaaccagtggttagcccttaaggggaggaggacggattgattccacattccacttcctagatctagtttagaaaacatgttccccatctggtgctcttaggaaggagtatagtaaatgcctcatttaataacatactcctttttgaaagttgccttttctctccacccttgagtagatccagtatttgatgaaactcatgaaagtgggtggagcccatcttgcccctcctcttttctaggacgcactatatgtgactgtgactttcaaggacatttgtttgccatttgctgatttttttgggaagttaatttctaacttctttcactgataaatgaagaaaagtattgcacctttgaaatgcaccaaatgaattgagtttgtaattaaaaaaatttttttccctttcagtcattgtcttatatgcttagcatagatttgcagctcagtagtatatggtgttcctagaatgcagctgaagacctgttatgtagaggaaatacgaggggtggtgctagaagacagacatctgtggaatgattcacatcctctcaagttaggaggatggaggcctgcttcattaagaagctgggggtagggtgggggtggggagaacacttaacaacatggggaccagtcaggggaatccccttatttctgttttgcatatgaggaaccctagagcagccaggtgaggctctctagtttaataaaaatcatggaaagactcttaatgcagactcttcttaagtgttaatagggattttttcagcttattttggttgcagtttccaatttttaaaaatgttgaggtaatctttcccaccttcccaaacctaattcttgtagatgcattagtgttgaaccaatgctttctcatgtctcaattctttgtatatgcattcttttcagatgtattaaacaaacaaaaacccttca

SEQ ID NO: 350394 - DNA, 2174 bp, Homo sapiens
ggtcagccgaggagaccccgcgcagtgctgccaacgccccggtggagaagctgcagtgcgcctctgccccccgagttcaagcgattctcctgcctcaggctcctgagtagctgggactacaaggtcatcatcagatttgaaatatttaaagtggatacaaaactatttcagcaatgcagacaattaagtgtgttgttgtgggcgatggtgctgttggtaaaacatgtctcctgatatcctacacaacaaacaaatttccatcggaatatgtaccgactgtttttgacaactatgcagtcacagttatgattggtggagaaccatatactcttggactttttgatactgcagggcaagaggattatgacagattacgaccgctgagttatccacaaacagatgtatttctagtctgtttttcagtggtctctccatcttcatttgaaaacgtgaaagaaaagtgggtgcctgagataactcaccactgtccaaagactcctttcttgcttgttgggactcaaattgatctcagagatgacccctctactattgagaaacttgccaagaacaaacagaagcctatcactccagagactgctgaaaagctggcccgtgacctgaaggctgtcaagtatgtggagtgttctgcacttacacagaaaggcctaaagaatgtatttgacgaagcaatattggctgccctggagcctccagaaccgaagaagagccgcaggtgtgtgctgctatgaacatctctccagagccctttctgcacagctggtgtcggcatcatactaaaagcaatgtttaaatcaaactaaagattaaaaattaaaattcgtttttgcaataatgacaaatgccctgcacctacccacatgcactcgtgtgagacaaggcccataggtatggccccccccttccccctcccagtactagttaattttgagtaattgtattgtcagaaaagtgattagtactatttttttttgttgtttcaaaaaaaaaatttttgtgtgtgtgtttttttttttttttttttttgttgtttaaaagcaaggcatgcttgtggatgactctgtaacagactaattggaattgttgaagctgctccctggttccactctggagagtaatctgggacatcttagtgttttgttttgtttttttccctcctcttttttttgggggggagtgtgtgtggggtttgttttttagtcttgtttttttaattcattaaccagtggttagcccttaaggggaggaggacggattgattccacattccacttcctagatctagtttagaaaacatgttccccatctggtgctcttaggaaggagtatagtaaatgcctcatttaataacatactcctttttgaaagttgccttttctctccacccttgagtagatccagtatttgatgaaactcatgaaagtgggtggagcccatcttgcccctcctcttttctaggacgcactatatgtgactgtgactttcaaggacatttgtttgccatttgctgatttttttgggaagttaatttctaacttctttcactgataaatgaagaaaagtattgcacctttgaaatgcaccaaatgaattgagtttgtaattaaaaaaatttttttccctttcagtcattgtcttatatgcttagcatagatttgcagctcagtagtatatggtgttcctagaatgcagctgaagacctgttatgtagaggaaatacgaggggtggtgctagaagacagacatctgtggaatgattcacatcctctcaagttaggaggatggaggcctgcttcattaagaagctgggggtagggtgggggtggggagaacacttaacaacatggggaccagtcaggggaatccccttatttctgttttgcatatgaggaaccctagagcagccaggtgaggctctctagtttaataaaaatcatggaaagactcttaatgcagactcttcttaagtgttaatagggattttttcagcttattttggttgcagtttccaatttttaaaaatgttgaggtaatctttcccaccttcccaaacctaattcttgtagatgcattagtgttgaaccaatgctttctcatgtctcaattctttgtatatgcattcttttcagatgtattaaacaaacaaaaacccttca

SEQ ID NO: 350395 - DNA, 2198 bp, Homo sapiens
gcggccgcggcggggcggtggcaggagggcagctcgctggctgctcgcggcggtgcctgtccgagctcccctccgcgccggccgcgtcctctgggcggggtggccccgagccacggcctccaggctgctcttcctttcggaggtcaggtcatcatcagatttgaaatatttaaagtggatacaaaactatttcagcaatgcagacaattaagtgtgttgttgtgggcgatggtgctgttggtaaaacatgtctcctgatatcctacacaacaaacaaatttccatcggaatatgtaccgactgtttttgacaactatgcagtcacagttatgattggtggagaaccatatactcttggactttttgatactgcagggcaagaggattatgacagattacgaccgctgagttatccacaaacagatgtatttctagtctgtttttcagtggtctctccatcttcatttgaaaacgtgaaagaaaagtgggtgcctgagataactcaccactgtccaaagactcctttcttgcttgttgggactcaaattgatctcagagatgacccctctactattgagaaacttgccaagaacaaacagaagcctatcactccagagactgctgaaaagctggcccgtgacctgaaggctgtcaagtatgtggagtgttctgcacttacacagaaaggcctaaagaatgtatttgacgaagcaatattggctgccctggagcctccagaaccgaagaagagccgcaggtgtgtgctgctatgaacatctctccagagccctttctgcacagctggtgtcggcatcatactaaaagcaatgtttaaatcaaactaaagattaaaaattaaaattcgtttttgcaataatgacaaatgccctgcacctacccacatgcactcgtgtgagacaaggcccataggtatggccccccccttccccctcccagtactagttaattttgagtaattgtattgtcagaaaagtgattagtactatttttttttgttgtttcaaaaaaaaaatttttgtgtgtgtgtttttttttttttttttttttgttgtttaaaagcaaggcatgcttgtggatgactctgtaacagactaattggaattgttgaagctgctccctggttccactctggagagtaatctgggacatcttagtgttttgttttgtttttttccctcctcttttttttgggggggagtgtgtgtggggtttgttttttagtcttgtttttttaattcattaaccagtggttagcccttaaggggaggaggacggattgattccacattccacttcctagatctagtttagaaaacatgttccccatctggtgctcttaggaaggagtatagtaaatgcctcatttaataacatactcctttttgaaagttgccttttctctccacccttgagtagatccagtatttgatgaaactcatgaaagtgggtggagcccatcttgcccctcctcttttctaggacgcactatatgtgactgtgactttcaaggacatttgtttgccatttgctgatttttttgggaagttaatttctaacttctttcactgataaatgaagaaaagtattgcacctttgaaatgcaccaaatgaattgagtttgtaattaaaaaaatttttttccctttcagtcattgtcttatatgcttagcatagatttgcagctcagtagtatatggtgttcctagaatgcagctgaagacctgttatgtagaggaaatacgaggggtggtgctagaagacagacatctgtggaatgattcacatcctctcaagttaggaggatggaggcctgcttcattaagaagctgggggtagggtgggggtggggagaacacttaacaacatggggaccagtcaggggaatccccttatttctgttttgcatatgaggaaccctagagcagccaggtgaggctctctagtttaataaaaatcatggaaagactcttaatgcagactcttcttaagtgttaatagggattttttcagcttattttggttgcagtttccaatttttaaaaatgttgaggtaatctttcccaccttcccaaacctaattcttgtagatgcattagtgttgaaccaatgctttctcatgtctcaattctttgtatatgcattcttttcagatgtattaaacaaacaaaaacccttca

SEQ ID NO: 350396 - DNA, 1571 bp, Homo sapiens
gtcaggtgcgtgcccctgtccggcagccgaggagaccccgcgcagtgctgccaacgccccggtggagaagctgaggtcatcatcagatttgaaatatttaaagtggatacaaaactatttcagcaatgcagacaattaagtgtgttgttgtgggcgatggtgctgttggtaaaacatgtctcctgatatcctacacaacaaacaaatttccatcggaatatgtaccgactgtttttgacaactatgcagtcacagttatgattggtggagaaccatatactcttggactttttgatactgcagggcaagaggattatgacagattacgaccgctgagttatccacaaacagatgtatttctagtctgtttttcagtggtctctccatcttcatttgaaaacgtgaaagaaaagtgggtgcctgagataactcaccactgtccaaagactcctttcttgcttgttgggactcaaattgatctcagagatgacccctctactattgagaaacttgccaagaacaaacagaagcctatcactccagagactgctgaaaagctggcccgtgacctgaaggctgtcaagtatgtggagtgttctgcacttacacagaaaggcctaaagaatgtatttgacgaagcaatattggctgccctggagcctccagaaccgaagaagagccgcaggtgtgtgctgctatgaacatctctccagagccctttctgcacagctggtgtcggcatcatactaaaagcaatgtttaaatcaaactaaagattaaaaattaaaattcgtttttgcaataatgacaaatgccctgcacctacccacatgcactcgtgtgagacaaggcccataggtatggccccccccttccccctcccagtactagttaattttgagtaattgtattgtcagaaaagtgattagtactatttttttttgttgtttcaaaaaaaaaatttttgtgtgtgtgttttttttttttttttttttttgtggtggtttataaaaccagggccttgcttgtgtgtggtgtgaacttgtgttaaccaaattactgtgggaagtctgtggctggacaccgtctgctctccgtgtgtgtctcccacatctgtgtggaagagagttcactctgtgggggccacctcttttaaaggtgtctcgtgtgtcttgtgggttttttttctccccctctcctttcttttttctttggtggggggcgggaagtgtggctgtgtgtgcgggtgggatgtggttctctttctgacacttgtgtgtgttgtttctcagaattttctcataattacaccacccagcagtgggtgtgtttagaccgcccccctttaaaggggggggagcaagtagagtgcgacgcgtagtgtgtgaggtgtctcccaaatgattctccacatacttttctccctggtacgcactacttcctacgtggtgtctgcaggagaaacaacactgttttgttgttgtccctcccatacttctgttgtgggtgcggctcctttatagaagaggaaagcgggagttgtataataaagagaaacaaaaatgcgcgca

SEQ ID NO: 350397 - DNA, 2009 bp, Homo sapiens
gtcaggtgcgtgcccctgtccggcagccgaggagaccccgcgcagtgctgccaacgccccggtggagaagctgaggtcatcatcagatttgaaatatttaaagtggatacaaaactatttcagcaatgcagacaattaagtgtgttgttgtgggcgatggtgctgttggtaaaacatgtctcctgatatcctacacaacaaacaaatttccatcggaatatgtaccgactgtttttgacaactatgcagtcacagttatgattggtggagaaccatatactcttggactttttgatactgcagggcaagaggattatgacagattacgaccgctgagttatccacaaacagatgtatttctagtctgtttttcagtggtctctccatcttcatttgaaaacgtgaaagaaaagtgggtgcctgagataactcaccactgtccaaagactcctttcttgcttgttgggactcaaattgatctcagagatgacccctctactattgagaaacttgccaagaacaaacagaagcctatcactccagagactgctgaaaagctggcccgtgacctgaaggctgtcaagtatgtggagtgttctgcacttacacagaaaggcctaaagaatgtatttgacgaagcaatattggctgccctggagcctccagaaccgaagaagagccgcaggtgtgtgctgctatgaacatctctccagaggcactcgtgtgagacaaggcccataggtatggccccccccttccccctcccagtactagttaattttgagtaattgtattgtcagaaaagtgattagtactatttttttttgttgtttcaaaaaaaaaatttttgtgtgtgtgtttttttttttttttttttttgttgtttaaaagcaaggcatgcttgtggatgactctgtaacagactaattggaattgttgaagctgctccctggttccactctggagagtaatctgggacatcttagtgttttgttttgtttttttccctcctcttttttttgggggggagtgtgtgtggggtttgttttttagtcttgtttttttaattcattaaccagtggttagcccttaaggggaggaggacggattgattccacattccacttcctagatctagtttagaaaacatgttccccatctggtgctcttaggaaggagtatagtaaatgcctcatttaataacatactcctttttgaaagttgccttttctctccacccttgagtagatccagtatttgatgaaactcatgaaagtgggtggagcccatcttgcccctcctcttttctaggacgcactatatgtgactgtgactttcaaggacatttgtttgccatttgctgatttttttgggaagttaatttctaacttctttcactgataaatgaagaaaagtattgcacctttgaaatgcaccaaatgaattgagtttgtaattaaaaaaatttttttccctttcagtcattgtcttatatgcttagcatagatttgcagctcagtagtatatggtgttcctagaatgcagctgaagacctgttatgtagaggaaatacgaggggtggtgctagaagacagacatctgtggaatgattcacatcctctcaagttaggaggatggaggcctgcttcattaagaagctgggggtagggtgggggtggggagaacacttaacaacatggggaccagtcaggggaatccccttatttctgttttgcatatgaggaaccctagagcagccaggtgaggctctctagtttaataaaaatcatggaaagactcttaatgcagactcttcttaagtgttaatagggattttttcagcttattttggttgcagtttccaatttttaaaaatgttgaggtaatctttcccaccttcccaaacctaattcttgtagatgcattagtgttgaaccaatgctttctcatgtctcaattctttgtatatgcattcttttcagatgtattaaacaaacaaaaacccttca

SEQ ID NO: 350398 - DNA, 1717 bp, Homo sapiens
gtctacctcgtgttcatcacctctcaattccatgccttaccggatcctaactgcaggcatctcctgacctctctatactctaaccgattgcttggtctcagtgcaatgcatgattgcattaaaagcacgtccagagactgctgaaaagctggcccgtgacctgaaggctgtcaagtatgtggagtgttctgcacttacacagaaaggcctaaagaatgtatttgacgaagcaatattggctgccctggagcctccagaaccgaagaagagccgcaggtgtgtgctgctatgaacatctctccagagccctttctgcacagctggtgtcggcatcatactaaaagcaatgtttaaatcaaactaaagattaaaaattaaaattcgtttttgcaataatgacaaatgccctgcacctacccacatgcactcgtgtgagacaaggcccataggtatggccccccccttccccctcccagtactagttaattttgagtaattgtattgtcagaaaagtgattagtactatttttttttgttgtttcaaaaaaaaaatttttgtgtgtgtgtttttttttttttttttttttgttgtttaaaagcaaggcatgcttgtggatgactctgtaacagactaattggaattgttgaagctgctccctggttccactctggagagtaatctgggacatcttagtgttttgttttgtttttttccctcctcttttttttgggggggagtgtgtgtggggtttgttttttagtcttgtttttttaattcattaaccagtggttagcccttaaggggaggaggacggattgattccacattccacttcctagatctagtttagaaaacatgttccccatctggtgctcttaggaaggagtatagtaaatgcctcatttaataacatactcctttttgaaagttgccttttctctccacccttgagtagatccagtatttgatgaaactcatgaaagtgggtggagcccatcttgcccctcctcttttctaggacgcactatatgtgactgtgactttcaaggacatttgtttgccatttgctgatttttttgggaagttaatttctaacttctttcactgataaatgaagaaaagtattgcacctttgaaatgcaccaaatgaattgagtttgtaattaaaaaaatttttttccctttcagtcattgtcttatatgcttagcatagatttgcagctcagtagtatatggtgttcctagaatgcagctgaagacctgttatgtagaggaaatacgaggggtggtgctagaagacagacatctgtggaatgattcacatcctctcaagttaggaggatggaggcctgcttcattaagaagctgggggtagggtgggggtggggagaacacttaacaacatggggaccagtcaggggaatccccttatttctgttttgcatatgaggaaccctagagcagccaggtgaggctctctagtttaataaaaatcatggaaagactcttaatgcagactcttcttaagtgttaatagggattttttcagcttattttggttgcagtttccaatttttaaaaatgttgaggtaatctttcccaccttcccaaacctaattcttgtagatgcattagtgttgaaccaatgctttctcatgtctcaattctttgtatatgcattcttttcagatgtattaaacaaacaaaaacccttca

SEQ ID NO: 350399 - DNA, 1685 bp, Homo sapiens
agtgccctggacaaatcttggtgaagtgagattattgtgttgagattcagggttgtttttaatgtttctttctttgccaactcttgggggtttgaatgttttaaatttgaactccaactttattatactgaaaatcagaccgcccattttttctttctaccccttttcagaaaggcctaaagaatgtatttgacgaagcaatattggctgccctggagcctccagaaccgaagaagagccgcaggtgtgtgctgctatgaacatctctccagagccctttctgcacagctggtgtcggcatcatactaaaagcaatgtttaaatcaaactaaagattaaaaattaaaattcgtttttgcaataatgacaaatgccctgcacctacccacatgcactcgtgtgagacaaggcccataggtatggccccccccttccccctcccagtactagttaattttgagtaattgtattgtcagaaaagtgattagtactatttttttttgttgtttcaaaaaaaaaatttttgtgtgtgtgtttttttttttttttttttttgttgtttaaaagcaaggcatgcttgtggatgactctgtaacagactaattggaattgttgaagctgctccctggttccactctggagagtaatctgggacatcttagtgttttgttttgtttttttccctcctcttttttttgggggggagtgtgtgtggggtttgttttttagtcttgtttttttaattcattaaccagtggttagcccttaaggggaggaggacggattgattccacattccacttcctagatctagtttagaaaacatgttccccatctggtgctcttaggaaggagtatagtaaatgcctcatttaataacatactcctttttgaaagttgccttttctctccacccttgagtagatccagtatttgatgaaactcatgaaagtgggtggagcccatcttgcccctcctcttttctaggacgcactatatgtgactgtgactttcaaggacatttgtttgccatttgctgatttttttgggaagttaatttctaacttctttcactgataaatgaagaaaagtattgcacctttgaaatgcaccaaatgaattgagtttgtaattaaaaaaatttttttccctttcagtcattgtcttatatgcttagcatagatttgcagctcagtagtatatggtgttcctagaatgcagctgaagacctgttatgtagaggaaatacgaggggtggtgctagaagacagacatctgtggaatgattcacatcctctcaagttaggaggatggaggcctgcttcattaagaagctgggggtagggtgggggtggggagaacacttaacaacatggggaccagtcaggggaatccccttatttctgttttgcatatgaggaaccctagagcagccaggtgaggctctctagtttaataaaaatcatggaaagactcttaatgcagactcttcttaagtgttaatagggattttttcagcttattttggttgcagtttccaatttttaaaaatgttgaggtaatctttcccaccttcccaaacctaattcttgtagatgcattagtgttgaaccaatgctttctcatgtctcaattctttgtatatgcattcttttcagatgtattaaacaaacaaaaacccttca

SEQ ID NO: 350400 - DNA, 1026 bp, Homo sapiens
cgatggaacctcactacacactccctcctcttttttttgggggggagtgtgtgtggggtttgttttttagtcttgtttttttaattcattaaccagtggttagcccttaaggggaggaggacggattgattccacattccacttcctagatctagtttagaaaacatgttccccatctggtgctcttaggaaggagtatagtaaatgcctcatttaataacatactcctttttgaaagttgccttttctctccacccttgagtagatccagtatttgatgaaactcatgaaagtgggtggagcccatcttgcccctcctcttttctaggacgcactatatgtgactgtgactttcaaggacatttgtttgccatttgctgatttttttgggaagttaatttctaacttctttcactgataaatgaagaaaagtattgcacctttgaaatgcaccaaatgaattgagtttgtaattaaaaaaatttttttccctttcagtcattgtcttatatgcttagcatagatttgcagctcagtagtatatggtgttcctagaatgcagctgaagacctgttatgtagaggaaatacgaggggtggtgctagaagacagacatctgtggaatgattcacatcctctcaagttaggaggatggaggcctgcttcattaagaagctgggggtagggtgggggtggggagaacacttaacaacatggggaccagtcaggggaatccccttatttctgttttgcatatgaggaaccctagagcagccaggtgaggctctctagtttaataaaaatcatggaaagactcttaatgcagactcttcttaagtgttaatagggattttttcagcttattttggttgcagtttccaatttttaaaaatgttgaggtaatctttcccaccttcccaaacctaattcttgtagatgcattagtgttgaaccaatgctttctcatgtctcaattctttgtatatgcattcttttcagatgtattaaacaaacaaaaacccttca

SEQ ID NO: 350401 - DNA, 868 bp, Homo sapiens
gtcaggtgcgtgcccctgtccggcagccgaggagaccccgcgcagtgctgccaacgccccggtggagaagctgaggtcatcatcagatttgaaatatttaaagtggatacaaaactatttcagcaatgcagacaattaagtgtgttgttgtgggcgatggtgctgttggtaaaacatgtctcctgatatcctacacaacaaacaaatttccatcggaatatgtaccgactgtttttgacaactatgcagtcacagttatgattggtggagaaccatatactcttggactttttgatactgcagggcaagaggattatgacagattacgaccgctgagttatccacaaacagatgtatttctagtctgtttttcagtggtctctccatcttcatttgaaaacgtgaaagaaaagtgggtgcctgagataactcaccactgtccaaagactcctttcttgcttgttgggactcaaattgatctcagagatgacccctctactattgagaaacttgccaagaacaaacagaagcctatcactccagagactgctgaaaagctggcccgtgacctgaaggctgtcaagtatgtggagtgttctgcacttacacagaaaggcctaaagaatgtatttgacgaagcaatattggctgccctggagcctccagaaccgaagaagagccgcaggtgtgtgctgctatgaacatctctccagagccttttggaaaggtggggtggggatcatataaaagcatgtaatcaactaagataaattaatcgtttgatatgaaagctgactaacaatgatcgttaaagctagtgtggcccttcctcaatagtaatgggatggtggaaaggggaatttggggc

SEQ ID NO: 350402 - DNA, 1352 bp, Homo sapiens
cataagcctgaaattgtaatagatttatttccaaaatgtgttagaagtcaacatattgcattttaataaaaattgctttcctgctcagttaaccttgcttgaggtgaagtttttggtcagttatctactctcctggttataatgggcttaagatctagcattctagcgtttttattaaggcacattgcttctgtgaattcagctcatttaatccggactgctgttgtacctgctagtctttctaatcctctaacctggctgctattctctctcctcccctctgtcttgtagagaggtctgaagaatgtgtttgatgaggctatcctagctgccctcgagcctccggaaactcaacccaaaaggaagtgctgtatattctaaactgttttctccttcccttctttgctgctgcttcctgtcccactactgtagaaagatcgtttaaaaacaaaggaataaaaccatcctgtttgaaagcctctgcgtctttttactcaccaccttagagcaacctctgtattagtttttgatcaagaatgcaatatcatataaattttttgtgatcagtagtcaagttggacttgttttaacgttctgctgcttgagttgcctgatgctcagagctttttggtttggattactattgcaaaagggaacttggtctggctttaagaatgtcctcttggagaaaataacaagagttttaacacttctagatcttagttctagatggagaaagtaacacaaacatcattttactcttatgatcaattgttaattgtaattgcatgacaaaccttatggaaaaggggtgacctagtagagtgtaatggggaagggaggattcttttctggttttcctttgtgcggtgaaactttgtgttgctgttgctttggctgtctgtgctgtagtggagtatttgtcagtctggggtggggaagatattgatgtatctgctactgctttatgagttcatttgttacattatcttttaagaataacatccatttaaacagttgacttacagtttgttaatgctgagatgtaaagctgccacctttatattttcctgcttctgattttattgtgagggaaatatacaattgtggttaccttcaaattttgaaattaaaaatatacaaccgtttgtaaaaatgcctgatgaagctttattcctgttgcactgactggctctaattttacgtatgtatcaggtacccacatttttgctcccttgaatctccttgactctgtctaactggtgggataaagggagttcaaagtgactatctttgcagctaccataatcaccctctctctctctttgcctgtgccttccatagaataagga

SEQ ID NO: 350403 - DNA, 1645 bp, Homo sapiens
cttgggatcaaactgatcaaactaaagaacatgtgaaacaaccttgggtggtaaacttgtggcttcagatttaggtgattttaggtgagtctgtagacctgggtcctaagtaccaccaatgctgagtcacactgtcatgttggagtttctggctgaggtgtaagtgtatttctgtatcttaatccccgtaagatctgagaatattcttcgttttcactccatgctttatgctctgatacccatgcagacatcttaaagcactggactgcttgctaaaactcattctaggaccccattctttgttttcttatgacttgggtggtggttacttgctctaataacattgctgaataactgaagtgtatgctgtttttagagtctgttctttaaagtccttctagttggtactgttgcacaattaacactttttaaatgtctgaacctttccgttctgggaaaccagtttactctgaaatcttgattaatcacattcagctcatttaatccggactgctgttgtacctgctagtctttctaatcctctaacctggctgctattctctctcctcccctctgtcttgtagagaggtctgaagaatgtgtttgatgaggctatcctagctgccctcgagcctccggaaactcaacccaaaaggaagtgctgtatattctaaactgttttctccttcccttctttgctgctgcttcctgtcccactactgtagaaagatcgtttaaaaacaaaggaataaaaccatcctgtttgaaagcctctgcgtctttttactcaccaccttagagcaacctctgtattagtttttgatcaagaatgcaatatcatataaattttttgtgatcagtagtcaagttggacttgttttaacgttctgctgcttgagttgcctgatgctcagagctttttggtttggattactattgcaaaagggaacttggtctggctttaagaatgtcctcttggagaaaataacaagagttttaacacttctagatcttagttctagatggagaaagtaacacaaacatcattttactcttatgatcaattgttaattgtaattgcatgacaaaccttatggaaaaggggtgacctagtagagtgtaatggggaagggaggattcttttctggttttcctttgtgcggtgaaactttgtgttgctgttgctttggctgtctgtgctgtagtggagtatttgtcagtctggggtggggaagatattgatgtatctgctactgctttatgagttcatttgttacattatcttttaagaataacatccatttaaacagttgacttacagtttgttaatgctgagatgtaaagctgccacctttatattttcctgcttctgattttattgtgagggaaatatacaattgtggttaccttcaaattttgaaattaaaaatatacaaccgtttgtaaaaatgcctgatgaagctttattcctgttgcactgactggctctaattttacgtatgtatcaggtacccacatttttgctcccttgaatctccttgactctgtctaactggtgggataaagggagttcaaagtgactatctttgcagctaccataatcaccctctctctctctttgcctgtgccttccatagaataagga

SEQ ID NO: 350404 - DNA, 2187 bp, Homo sapiens
gtcaggtgcgtgcccctgtccggcagccgaggagaccccgcgcagtgctgccaacgccccggtggagaagctgaggtcatcatcagatttgaaatatttaaagtggatacaaaactatttcagcaatgcagacaattaagtgtgttgttgtgggcgatggtgctgttggtaaaacatgtctcctgatatcctacacaacaaacaaatttccatcggaatatgtaccgactgtttttgacaactatgcagtcacagttatgattggtggagaaccatatactcttggactttttgatactgcagggcaagaggattatgacagattacgaccgctgagttatccacaaacagatgtatttctagtctgtttttcagtggtctctccatcttcatttgaaaacgtgaaagaaaagtgggtgcctgagataactcaccactgtccaaagactcctttcttgcttgttgggactcaaattgatctcagagatgacccctctactattgagaaacttgccaagaacaaacagaagcctatcactccagagactgctgaaaagctggcccgtgacctgaaggctgtcaagtatgtggagtgttctgcacttacacagaaaggcctaaagaatgtatttgacgaagcaatattggctgccctggagcctccagaaccgaagaagagccgcaggtgtgtgctgctatgaacatctctccagagccctttctgcacagctggtgtcggcatcatactaaaagcaatgtttaaatcaaactaaagattaaaaattaaaattcgtttttgcaataatgacaaatgccctgcacctacccacatgcactcgtgtgagacaaggcccataggtatggccccccccttccccctcccagtactagttaattttgagtaattgtattgtcagaaaagtgattagtactatttttttttgttgtttcaaaaaaaaaatttttgtgtgtgtgtttttttttttttttttttttgttgtttaaaagcaaggcatgcttgtggatgactctgtaacagactaattggaattgttgaagctgctccctggttccactctggagagtaatctgggacatcttagtgttttgttttgtttttttccctcctcttttttttgggggggagtgtgtgtggggtttgttttttagtcttgtttttttaattcattaaccagtggttagcccttaaggggaggaggacggattgattccacattccacttcctagatctagtttagaaaacatgttccccatctggtgctcttaggaaggagtatagtaaatgcctcatttaataacatactcctttttgaaagttgccttttctctccacccttgagtagatccagtatttgatgaaactcatgaaagtgggtggagcccatcttgcccctcctcttttctaggacgcactatatgtgactgtgactttcaaggacatttgtttgccatttgctgatttttttgggaagttaatttctaacttctttcactgataaatgaagaaaagtattgcacctttgaaatgcaccaaatgaattgagtttgtaattaaaaaaatttttttccctttcagtcattgtcttatatgcttagcatagatttgcagctcagtagtatatggtgttcctagaatgcagctgaagacctgttatgtagaggaaatacgaggggtggtgctagaagacagacatctgtggaatgattcacatcctctcaagttaggaggatggaggcctgcttcattaagaagctgggggtagggtgggggtggggagaacacttaacaacatggggaccagtcaggggaatccccttatttctgttttgcatatgaggaaccctagagcagccaggtgaggctctctagtttaataaaaatcatggaaagactcttaatgcagactcttcttaagtgttaatagggattttttcagcttattttggttgcagtttccaatttttaaaaatgttgaggtaatctttcccaccttcccaaacctaattcttgtagatgcattagtgttgaaccaatgctttctcatgtctcaattctttgtatatgcattcttttcagatgtattaaacaaacaaaaacccttcacaagccaaaaaaacccacgcgtccgctagttctagatcgcgagcggcgctctagagtattc

SEQ ID NO: 350405 - DNA, 2599 bp, Homo sapiens
gtcaggtgcgtgcccctgtccggcagccgaggagaccccgcgcagtgctgccaacgccccggtggagaagctgaggtcatcatcagatttgaaatatttaaagtggatacaaaactatttcagcaatgcagacaattaagtgtgttgttgtgggcgatggtgctgttggtaaaacatgtctcctgatatcctacacaacaaacaaatttccatcggaatatgtaccgactgtttttgacaactatgcagtcacagttatgattggtggagaaccatatactcttggactttttgatactgcagggcaagaggattatgacagattacgaccgctgagttatccacaaacagatgtatttctagtctgtttttcagtggtctctccatcttcatttgaaaacgtgaaagaaaagtgggtgcctgagataactcaccactgtccaaagactcctttcttgcttgttgggactcaaattgatctcagagatgacccctctactattgagaaacttgccaagaacaaacagaagcctatcactccagagactgctgaaaagctggcccgtgacctgaaggctgtcaagtatgtggagtgttctgcacttacacagaaaggcctaaagaatgtatttgacgaagcaatattggctgccctggagcctccagaaccgaagaagagccgcaggtgtgtgctgctatgaacatctctccagagccctttctgcacagctggtgtcggcatcatactaaaagcaatgtttaaatcaaactaaagattaaaaattaaaattcgtttttgcaataatgacaaatgccctgcacctacccacatgcactcgtgtgagacaaggcccataggtatggccccccccttccccctcccagtactagttaattttgagtaattgtattgtcagaaaagtgattagtactatttttttttgttgtttcaaaaaaaaaatttttgtgtgtgtgtttttttttttttttttttttgttgtttaaaagcaaggcatgcttgtggatgactctgtaacagactaattggaattgttgaagctgctccctggttccactctggagagtaatctgggacatcttagtgttttgttttgtttttttccctcctcttttttttgggggggagtgtgtgtggggtttgttttttagtcttgtttttttaattcattaaccagtggttagcccttaaggggaggaggacggattgattccacattccacttcctagatctagtttagaaaacatgttccccatctggtgctcttaggaaggagtatagtaaatgcctcatttaataacatactcctttttgaaagttgccttttctctccacccttgagtagatccagtatttgatgaaactcatgaaagtgggtggagcccatcttgcccctcctcttttctaggacgcactatatgtgactgtgactttcaaggacatttgtttgccatttgctgatttttttgggaagttaatttctaacttctttcactgataaatgaagaaaagtattgcacctttgaaatgcaccaaatgaattgagtttgtaattaaaaaaatttttttccctttcagtcattgtcttatatgcttagcatagatttgcagctcagtagtatatggtgttcctagaatgcagctgaagacctgttatgtagaggaaatacgaggggtggtgctagaagacagacatctgtggaatgattcacatcctctcaagttaggaggatggaggcctgcttcattaagaagctgggggtagggtgggggtggggagaacacttaacaacatggggaccagtcaggggaatccccttatttctgttttgcatatgaggaaccctagagcagccaggtgaggctctctagtttaataaaaatcatggaaagactcttaatgcagactcttcttaagtgttaatagggattttttcagcttattttggttgcagtttccaatttttaaaaatgttgaggtaatctttcccaccttcccaaacctaattcttgtagatgcattagtgttgaaccaatgctttctcatgtctcaattctttgtatatgcattcttttcagatgtattaaacaaacaaaaacccttcaaaaaaaaaaaaaaaaaaagaaccaaacacaaaaaaaaaaaaacacaaaaaaacaaaaaaaaaaacaaaaaaaagacagcagaccagaaagaaaaaacaagaaagaagggcgaaagcaacatcacaaacgaggaagcaacaaaaaaaaacaaggggagtggcaacgaacccaaacaaaaggaacaagcaacgacagacagtacggtgagtgacccggggagcaagaatcataacagcaagtaatagaagggggggagccagacgcaaaccacaagaaacggaagcagcgacagaaagaggagagagtctgagaaacaacaaataagaggctacgaggggagaacagaaggcaaaatgaacaaaaacagaaggacacacggcgtggggaaatagcaaatctcacggaagaggaaccaaggcacgagagaaataaaaacaagcacaggcggagggaggaaaacaagagggagggga

SEQ ID NO: 350406 - DNA, 2285 bp, Homo sapiens
gtcaggtgcgtgcccctgtccggcagccgaggagaccccgcgcagtgctgccaacgccccggtggagaagctgaggtcatcatcagatttgaaatatttaaagtggatacaaaactatttcagcaatgcagacaattaagtgtgttgttgtgggcgatggtgctgttggtaaaacatgtctcctgatatcctacacaacaaacaaatttccatcggaatatgtaccgactgtttttgacaactatgcagtcacagttatgattggtggagaaccatatactcttggactttttgatactgcagggcaagaggattatgacagattacgaccgctgagttatccacaaacagatgtatttctagtctgtttttcagtggtctctccatcttcatttgaaaacgtgaaagaaaagtgggtgcctgagataactcaccactgtccaaagactcctttcttgcttgttgggactcaaattgatctcagagatgacccctctactattgagaaacttgccaagaacaaacagaagcctatcactccagagactgctgaaaagctggcccgtgacctgaaggctgtcaagtatgtggagtgttctgcacttacacagaaaggcctaaagaatgtatttgacgaagcaatattggctgccctggagcctccagaaccgaagaagagccgcaggtgtgtgctgctatgaacatctctccagagccctttctgcacagctggtgtcggcatcatactaaaagcaatgtttaaatcaaactaaagattaaaaattaaaattcgtttttgcaataatgacaaatgccctgcacctacccacatgcactcgtgtgagacaaggcccataggtatggccccccccttccccctcccagtactagttaattttgagtaattgtattgtcagaaaagtgattagtactatttttttttgttgtttcaaaaaaaaaatttttgtgtgtgtgtttttttttttttttttttttgttgtttaaaagcaaggcatgcttgtggatgactctgtaacagactaattggaattgttgaagctgctccctggttccactctggagagtaatctgggacatcttagtgttttgttttgtttttttccctcctcttttttttgggggggagtgtgtgtggggtttgttttttagtcttgtttttttaattcattaaccagtggttagcccttaaggggaggaggacggattgattccacattccacttcctagatctagtttagaaaacatgttccccatctggtgctcttaggaaggagtatagtaaatgcctcatttaataacatactcctttttgaaagttgccttttctctccacccttgagtagatccagtatttgatgaaactcatgaaagtgggtggagcccatcttgcccctcctcttttctaggacgcactatatgtgactgtgactttcaaggacatttgtttgccatttgctgatttttttgggaagttaatttctaacttctttcactgataaatgaagaaaagtattgcacctttgaaatgcaccaaatgaattgagtttgtaattaaaaaaatttttttccctttcagtcattgtcttatatgcttagcatagatttgcagctcagtagtatatggtgttcctagaatgcagctgaagacctgttatgtagaggaaatacgaggggtggtgctagaagacagacatctgtggaatgattcacatcctctcaagttaggaggatggaggcctgcttcattaagaagctgggggtagggtgggggtggggagaacacttaacaacatggggaccagtcaggggaatccccttatttctgttttgcatatgaggaaccctagagcagccaggtgaggctctctagtttaataaaaatcatggaaagactcttaatgcagactcttcttaagtgttaatagggattttttcagcttattttggttgcagtttccaatttttaaaaatgttgaggtaatctttcccaccttcccaaacctaattcttgtagatgcattagtgttgaaccaatgctttctcatgtctcaattctttgtatatgcattcttttcagatgtattaaacaaacaaaaacccttcaaaaaaaaaaaaaaaaaaaaaaaaactcgatttaaattcagaaaaattgtgtttatctttagaattttgtattcaatactttatgtactatgtgactcatgcttctggataaataaagcaccaaatatgtatctgtaaccacaatcacacatattatatt

SEQ ID NO: 350407 - DNA, 1836 bp, Homo sapiens
gtcaggtgcgtgcccctgtccggcagccgaggagaccccgcgcagtgctgccaacgccccggtggagaagctgaggtcatcatcagatttgaaatatttaaagtggatacaaaactatttcagcaatgcagacaattaagtgtgttgttgtgggcgatggtgctgttggtaaaacatgtctcctgatatcctacacaacaaacaaatttccatcggaatatgtaccgactgtttttgacaactatgcagtcacagttatgattggtggagaaccatatactcttggactttttgatactgcagggcaagaggattatgacagattacgaccgctgagttatccacaaacagatgtatttctagtctgtttttcagtggtctctccatcttcatttgaaaacgtgaaagaaaagtgggtgcctgagataactcaccactgtccaaagactcctttcttgcttgttgggactcaaattgatctcagagatgacccctctactattgagaaacttgccaagaacaaacagaagcctatcactccagagactgctgaaaagctggcccgtgacctgaaggctgtcaagtatgtggagtgttctgcacttacacagaaaggcctaaagaatgtatttgacgaagcaatattggctgccctggagcctccagaaccgaagaagagccgcaggtgtgtgctgctatgaacatctctccagagccctttctgcacagctggtgtcggcatcatactaaaagcaatgtttaaatcaaactaaagattaaaaattaaaattcgtttttgcaataatgacaaatgccctgcacctacccacatgcactcgtgtgagacaaggcccataggtatggccccccccttccccctcccagtactagttaattttgagtaattgtattgtcagaaaagtgattagtactatttttttttgttgtttcaaaaaaaaaatttttgtgtgtgtgtttttttttttttttttttttgttgtttaaaagcaaggcatgcttgtggatgactctgtaacagactaattggaattgttgaagctgctccctggttccactctggagagtaatctgggacatcttagtgttttgttttgtttttttccctcctcttttctaggacgcactatatgtgactgtgactttcaaggacatttgtttgccatttgctgatttttttgggaagttaatttctaacttctttcactgataaatgaagaaaagtattgcacctttgaaatgcaccaaatgaattgagtttgtaattaaaaaaatttttttccctttcagtcattgtcttatatgcttagcatagatttgcagctcagtagtatatggtgttcctagaatgcagctgaagacctgttatgtagaggaaatacgaggggtggtgctagaagacagacatctgtggaatgattcacatcctctcaagttaggaggatggaggcctgcttcattaagaagctgggggtagggtgggggtggggagaacacttaacaacatggggaccagtcaggggaatccccttatttctgttttgcatatgaggaaccctagagcagccaggtgaggctctctagtttaataaaaatcatggaaagactcttaatgcagactcttcttaagtgttaatagggattttttcagcttattttggttgcagtttccaatttttaaaaatgttgaggtaatctttcccaccttcccaaacctaattcttgtagatgcattagtgttgaaccaatgctttctcatgtctcaattctttgtatatgcattcttttcagatgtattaaacaaacaaaaacccttca

SEQ ID NO: 350408 - DNA, 2233 bp, Homo sapiens
ggtcagccgaggagaccccgcgcagtgctgccaacgccccggtggagaagctgagacggagtctcactgtgttgcccaggctggagtgcagtggcgccatcttggctcactgcagtgcgcctctgccccccgagttcaagcgattctcctgcctcaggctcctgagtagctgggactacaaggtcatcatcagatttgaaatatttaaagtggatacaaaactatttcagcaatgcagacaattaagtgtgttgttgtgggcgatggtgctgttggtaaaacatgtctcctgatatcctacacaacaaacaaatttccatcggaatatgtaccgactgtttttgacaactatgcagtcacagttatgattggtggagaaccatatactcttggactttttgatactgcagggcaagaggattatgacagattacgaccgctgagttatccacaaacagatgtatttctagtctgtttttcagtggtctctccatcttcatttgaaaacgtgaaagaaaagtgggtgcctgagataactcaccactgtccaaagactcctttcttgcttgttgggactcaaattgatctcagagatgacccctctactattgagaaacttgccaagaacaaacagaagcctatcactccagagactgctgaaaagctggcccgtgacctgaaggctgtcaagtatgtggagtgttctgcacttacacagaaaggcctaaagaatgtatttgacgaagcaatattggctgccctggagcctccagaaccgaagaagagccgcaggtgtgtgctgctatgaacatctctccagagccctttctgcacagctggtgtcggcatcatactaaaagcaatgtttaaatcaaactaaagattaaaaattaaaattcgtttttgcaataatgacaaatgccctgcacctacccacatgcactcgtgtgagacaaggcccataggtatggccccccccttccccctcccagtactagttaattttgagtaattgtattgtcagaaaagtgattagtactatttttttttgttgtttcaaaaaaaaaatttttgtgtgtgtgtttttttttttttttttttttgttgtttaaaagcaaggcatgcttgtggatgactctgtaacagactaattggaattgttgaagctgctccctggttccactctggagagtaatctgggacatcttagtgttttgttttgtttttttccctcctcttttttttgggggggagtgtgtgtggggtttgttttttagtcttgtttttttaattcattaaccagtggttagcccttaaggggaggaggacggattgattccacattccacttcctagatctagtttagaaaacatgttccccatctggtgctcttaggaaggagtatagtaaatgcctcatttaataacatactcctttttgaaagttgccttttctctccacccttgagtagatccagtatttgatgaaactcatgaaagtgggtggagcccatcttgcccctcctcttttctaggacgcactatatgtgactgtgactttcaaggacatttgtttgccatttgctgatttttttgggaagttaatttctaacttctttcactgataaatgaagaaaagtattgcacctttgaaatgcaccaaatgaattgagtttgtaattaaaaaaatttttttccctttcagtcattgtcttatatgcttagcatagatttgcagctcagtagtatatggtgttcctagaatgcagctgaagacctgttatgtagaggaaatacgaggggtggtgctagaagacagacatctgtggaatgattcacatcctctcaagttaggaggatggaggcctgcttcattaagaagctgggggtagggtgggggtggggagaacacttaacaacatggggaccagtcaggggaatccccttatttctgttttgcatatgaggaaccctagagcagccaggtgaggctctctagtttaataaaaatcatggaaagactcttaatgcagactcttcttaagtgttaatagggattttttcagcttattttggttgcagtttccaatttttaaaaatgttgaggtaatctttcccaccttcccaaacctaattcttgtagatgcattagtgttgaaccaatgctttctcatgtctcaattctttgtatatgcattcttttcagatgtattaaacaaacaaaaacccttca

SEQ ID NO: 350409 - DNA, 2192 bp, Homo sapiens
ttccggttcccgcgcggcgctccaaagctcggggagtggtggtctccctttcctggagtcatttgtgggagttagggtcttatcctgatctttcctcgtcccccgctcccccgtcctccgaggtggcagctgcgtaggtaggtcatcatcagatttgaaatatttaaagtggatacaaaactatttcagcaatgcagacaattaagtgtgttgttgtgggcgatggtgctgttggtaaaacatgtctcctgatatcctacacaacaaacaaatttccatcggaatatgtaccgactgtttttgacaactatgcagtcacagttatgattggtggagaaccatatactcttggactttttgatactgcagggcaagaggattatgacagattacgaccgctgagttatccacaaacagatgtatttctagtctgtttttcagtggtctctccatcttcatttgaaaacgtgaaagaaaagtgggtgcctgagataactcaccactgtccaaagactcctttcttgcttgttgggactcaaattgatctcagagatgacccctctactattgagaaacttgccaagaacaaacagaagcctatcactccagagactgctgaaaagctggcccgtgacctgaaggctgtcaagtatgtggagtgttctgcacttacacagaaaggcctaaagaatgtatttgacgaagcaatattggctgccctggagcctccagaaccgaagaagagccgcaggtgtgtgctgctatgaacatctctccagagccctttctgcacagctggtgtcggcatcatactaaaagcaatgtttaaatcaaactaaagattaaaaattaaaattcgtttttgcaataatgacaaatgccctgcacctacccacatgcactcgtgtgagacaaggcccataggtatggccccccccttccccctcccagtactagttaattttgagtaattgtattgtcagaaaagtgattagtactatttttttttgttgtttcaaaaaaaaaatttttgtgtgtgtgtttttttttttttttttttttgttgtttaaaagcaaggcatgcttgtggatgactctgtaacagactaattggaattgttgaagctgctccctggttccactctggagagtaatctgggacatcttagtgttttgttttgtttttttccctcctcttttttttgggggggagtgtgtgtggggtttgttttttagtcttgtttttttaattcattaaccagtggttagcccttaaggggaggaggacggattgattccacattccacttcctagatctagtttagaaaacatgttccccatctggtgctcttaggaaggagtatagtaaatgcctcatttaataacatactcctttttgaaagttgccttttctctccacccttgagtagatccagtatttgatgaaactcatgaaagtgggtggagcccatcttgcccctcctcttttctaggacgcactatatgtgactgtgactttcaaggacatttgtttgccatttgctgatttttttgggaagttaatttctaacttctttcactgataaatgaagaaaagtattgcacctttgaaatgcaccaaatgaattgagtttgtaattaaaaaaatttttttccctttcagtcattgtcttatatgcttagcatagatttgcagctcagtagtatatggtgttcctagaatgcagctgaagacctgttatgtagaggaaatacgaggggtggtgctagaagacagacatctgtggaatgattcacatcctctcaagttaggaggatggaggcctgcttcattaagaagctgggggtagggtgggggtggggagaacacttaacaacatggggaccagtcaggggaatccccttatttctgttttgcatatgaggaaccctagagcagccaggtgaggctctctagtttaataaaaatcatggaaagactcttaatgcagactcttcttaagtgttaatagggattttttcagcttattttggttgcagtttccaatttttaaaaatgttgaggtaatctttcccaccttcccaaacctaattcttgtagatgcattagtgttgaaccaatgctttctcatgtctcaattctttgtatatgcattcttttcagatgtattaaacaaacaaaaacccttca

SEQ ID NO: 350410 - DNA, 2303 bp, Homo sapiens
gtcaggtgcgtgcccctgtccggcagccgaggagaccccgcgcagtgctgccaacgccccggtggagaagctgaggtcatcatcagatttgaaatatttaaagtggatacaaaactatttcagcaatgcagacaattaagtgtgttgttgtgggcgatggtgctgttggtaaaacatgtctcctgatatcctacacaacaaacaaatttccatcggaatatgtaccgactatcttgacttctcatgggtaaattatatacactttaaacagctgaaaaatcagtggaaagtcagaaggggtgacacagggtttgcaagaagtgctgggaggcaaaactccagtagacaagattctaacgagtggtggtctcaatttggtgaagtatgccctacatcttggaatgagggtttttgacaactatgcagtcacagttatgattggtggagaaccatatactcttggactttttgatactgcagggcaagaggattatgacagattacgaccgctgagttatccacaaacagatgtatttctagtctgtttttcagtggtctctccatcttcatttgaaaacgtgaaagaaaagtgggtgcctgagataactcaccactgtccaaagactcctttcttgcttgttgggactcaaattgatctcagagatgacccctctactattgagaaacttgccaagaacaaacagaagcctatcactccagagactgctgaaaagctggcccgtgacctgaaggctgtcaagtatgtggagtgttctgcacttacacagaaaggcctaaagaatgtatttgacgaagcaatattggctgccctggagcctccagaaccgaagaagagccgcaggtgtgtgctgctatgaacatctctccagagccctttctgcacagctggtgtcggcatcatactaaaagcaatgtttaaatcaaactaaagattaaaaattaaaattcgtttttgcaataatgacaaatgccctgcacctacccacatgcactcgtgtgagacaaggcccataggtatggccccccccttccccctcccagtactagttaattttgagtaattgtattgtcagaaaagtgattagtactatttttttttgttgtttcaaaaaaaaaatttttgtgtgtgtgtttttttttttttttttttttgttgtttaaaagcaaggcatgcttgtggatgactctgtaacagactaattggaattgttgaagctgctccctggttccactctggagagtaatctgggacatcttagtgttttgttttgtttttttccctcctcttttttttgggggggagtgtgtgtggggtttgttttttagtcttgtttttttaattcattaaccagtggttagcccttaaggggaggaggacggattgattccacattccacttcctagatctagtttagaaaacatgttccccatctggtgctcttaggaaggagtatagtaaatgcctcatttaataacatactcctttttgaaagttgccttttctctccacccttgagtagatccagtatttgatgaaactcatgaaagtgggtggagcccatcttgcccctcctcttttctaggacgcactatatgtgactgtgactttcaaggacatttgtttgccatttgctgatttttttgggaagttaatttctaacttctttcactgataaatgaagaaaagtattgcacctttgaaatgcaccaaatgaattgagtttgtaattaaaaaaatttttttccctttcagtcattgtcttatatgcttagcatagatttgcagctcagtagtatatggtgttcctagaatgcagctgaagacctgttatgtagaggaaatacgaggggtggtgctagaagacagacatctgtggaatgattcacatcctctcaagttaggaggatggaggcctgcttcattaagaagctgggggtagggtgggggtggggagaacacttaacaacatggggaccagtcaggggaatccccttatttctgttttgcatatgaggaaccctagagcagccaggtgaggctctctagtttaataaaaatcatggaaagactcttaatgcagactcttcttaagtgttaatagggattttttcagcttattttggttgcagtttccaatttttaaaaatgttgaggtaatctttcccaccttcccaaacctaattcttgtagatgcattagtgttgaaccaatgctttctcatgtctcaattctttgtatatgcattcttttcagatgtattaaacaaacaaaaacccttca

SEQ ID NO: 350411 - DNA, 1795 bp, Homo sapiens
  misc_feature (1127)..(1127): n is a, c, g, or t
  misc_feature (1343)..(1343): n is a, c, g, or t
gtcaggtgcgtgcccctgtccggcagccgaggagaccccgcgcagtgctgccaacgccccggtggagaagctgaggtcatcatcagatttgaaatatttaaagtggatacaaaactatttcagcaatgcagacaattaagtgtgttgttgtgggcgatggtgctgttggtaaaacatgtctcctgatatcctacacaacaaacaaatttccatcggaatatgtaccgactgtttttgacaactatgcagtcacagttatgattggtggagaaccatatactcttggactttttgatactgcagggcaagaggattatgacagattacgaccgctgagttatccacaaacagatgtatttctagtctgtttttcagtggtctctccatcttcatttgaaaacgtgaaagaaaagtgggtgcctgagataactcaccactgtccaaagactcctttcttgcttgttgggactcaaattgatctcagagatgacccctctactattgagaaacttgccaagaacaaacagaagcctatcactccagagactgctgaaaagctggcccgtgacctgaaggctgtcaagtatgtggagtgttctgcacttacacagaaaggcctaaagaatgtatttgacgaagcaatattggctgccctggagcctccagaaccgaagaagagccgcaggtgtgtgctgctatgaacatctctccagagccctttctgcacagctggtgtcggcatcatactaaaagcaatgtttaaatcaaactaaagattaaaaattaaaattcgtttttgcaaaaaaaaaaaaaaaaaaaaaaaaaaaaaaaaaaaaaaaaaaaaaaaaaaaaaaaaaaaaaaaaaaaaaaaaaaaaaaaaaaaaaaaaaaaaaaaaaaaaaaaaaaaaaaaaaagcaggccggcccggcgcccacctacaatcaccccgacggcaccgagccaccgcagctcgcccccccccatattatacagagcgccggcacacaagacagacctactgatacacattacgcagagcgagccgcgcgcaacaacaaacacgcgacgcagtcagcacaaccacgcgcggcacgagcatctatcggggcacacacacaccacggacngaggcacgaaacaccacacgcggcacaccacctccgagatcagacaaacagacacacgcccgccaggcgaactaacaaaaaaccactcaggggcgtgcctagcacgaggcgaaccacacgccaaccgctacaaccaagcccacgcggagaaaacgaaaagctgaccccacccgagcacatataaggacaaacaatatatctcaaccgccgaacgcnctgcttaacaaacaccacgaccgaacaaaaagcacaagagacaaaacccaaccaaccaacgcagaacgacactcagaagccgaaacaacagcaagacgaacagaacaacgcaaaacacgcggagccagaacaacgaacaaccgaccccacacaaagcccacagaccaagcacacacaaccagcgacacacaccaaagcagccccagacccacacagccaccaaccacacgcgcagacagcacaaccacgcccacaacagcacaccagacagcccacgagacaccacacaccccaaaaccaacgataagccgaccacaagcgagcaccacgcccgacaacgaccgaccgaagcacacaacaccaacaaacccaaatacgaaaaagacaacacaaccacgaaaaccacaagacacacacaaagacagacgcaacaacaagacagcgcacagcgt

SEQ ID NO: 350412 - DNA, 806 bp, Homo sapiens
gtcaggtgcgtgcccctgtccggcagccgaggagaccccgcgcagtgctgccaacgccccggtggagaagctgaggtcatcatcagatttgaaatatttaaagtggatacaaaactatttcagcaatgcagacaattaagtgtgttgttgtgggcgatggtgctgttggtaaaacatgtctcctgatatcctacacaacaaacaaatttccatcggaatatgtaccgactgtttttgacaactatgcagtcacagttatgattggtggagaaccatatactcttggactttttgatactgcagggcaagaggattatgacagattacgaccgctgagttatccacaaacagatgtatttctagtctgtttttcagtggtctctccatcttcatttgaaaacgtgaaagaaaagtgggtgcctgagataactcaccactgtccaaagactcctttcttgcttgttgggactcaaattgatctcagagatgacccctctactattgagaaacttgccaagaacaaacagaagcctatcactccagagactgctgaaaagctggcccgtgacctgaaggctgtcaagtatgtggagtgttctgcacttacacagaaaggcctaaagaatgtatttgacgaagcaatattggctgccctggagcctccagaaccgaagaagagccgcaggtgtgtgctgctatgaacatctctccagagtggaaccagggagcagcttcaacaattccaattagtctgttacagagtcatccacaagcatgccttgcttttaaacaacaaaaaaaaaaaa

SEQ ID NO: 350413 - DNA, 894 bp, Homo sapiens
gtcaggtgcgtgcccctgtccggcagccgaggagaccccgcgcagtgctgccaacgccccggtggagaagctgaggtcatcatcagatttgaaatatttaaagtggatacaaaactatttcagcaatgcagacaattaagtgtgttgttgtgggcgatggtgctgttggtaaaacatgtctcctgatatcctacacaacaaacaaatttccatcggaatatgtaccgactgtttttgacaactatgcagtcacagttatgattggtggagaaccatatactcttggactttttgatactgcagggcaagaggattatgacagattacgaccgctgagttatccacaaacagatgtatttctagtctgtttttcagtggtctctccatcttcatttgaaaacgtgaaagaaaagtgggtgcctgagataactcaccactgtccaaagactcctttcttgcttgttgggactcaaattgatctcagagatgacccctctactattgagaaacttacctgcaggtacaggcaccaacctctttgcacagtgagcagcaggactcgctacttctctccacctactcacaacagccagggaccctgggctacccccaaccacccccagcacagccccagcccctacgtcctccccgaagggtcagcagtctgtctgagtcgtcaggcctccagcagccgccccagataatgccccggcactgaagtcgggacacaatcagctttaaccaactggatgacggggggtggccacaggagatggggagaggagtctgaactacaacccctggctcttgtgcacactgcatacgtttcagaactcctggatggtaaccatctctggagtgcagcgcttgctgcagtggacatgatcaggaata

SEQ ID NO: 350414 - DNA, 469 bp, Homo sapiens
actgtttataaatataatttgaatggtagatatttgccattcaaataaccagaaaagttatttggtccctaagtaattgaggctatgtgcatgcagagataacctgtgtcctgcttttatcagttcactgctcagttttatcatttctttccatgactttcttttttctttttgagagtttcatttggccagccatggtagctcatccttgtaatcccagcactttaggaggctgaggtgggaggattgcttgagctcaggaattggagatgagcctgggcaacatagagagaccccgtctctacaaaaaataaaaagaattaagccaggaatggtagcacatgcctgtagtcccagctacacaagaggcttaggtgggagtatcacttgagcccgggaaattgaggctgtagtgagccgtgatggtgccactgtactcctgggtgacagaatgagaccctgtctcaaa

SEQ ID NO: 350415 - DNA, 1719 bp, Homo sapiens
tttctcgacctcatgaaaagatactgaagcttgaaaaggggatgttctttctgaataggaatggagaagaggggccaagcaagaatgattctatctgtctcctggccgttgatagtgtccctgtacagagaggaaataacgtagtataatatgtagcttatgtttgaatcagcttctttaaaaatactggaattttatttatttatttttggtagacacagggtttcctcatgttgcccaggctggtctcggacacttgaattcaagcaatctgccggccccgccgggtgtgccgcatgagggcgcgggccgcccaaggaccgcgagtggggccgcgagtgctgagcccggcgcgcccgagccgctcctcctcccggcctgctccctgggcggagccggggcagtgcggctctgggctggccgaaggggtggcgctgcgatcccgcagggcagcgacgcgactctggtgcgggccgtcttcttccccccgagctgggcgtgcgcggccgcaatgaactgggagctgctgctgtggctgctggtgctgtgcgcgctgctcctgctcttggtgcagctgctgcgcttcctgagggctgacggcgacctgacgctactatgggccgagtggcagggacgacgcccagaatgggagctgactgatatggtggtgtgggtgactggagcctcgagtggaattggtgaggagctggcttaccagttgtctaaactaggagtttctcttgtgctgtcagccagaagagtgcatgagctggaaagggtgaaaagaagatgcctagagaatggcaatttaaaagaaaaagatatacttgttttgccccttgacctgaccgacactggttcccatgaagcggctaccaaagctgttctccaggagtttggtagaatcgacattctggtcaacaatggtggaatgtcccagcgttctctgtgcatggataccagcttggatgtctacagaaagctaatagagcttaactacttagggacggtgtccttgacaaaatgtgttctgcctcacatgatcgagaggaagcaaggaaagattgttactgtgaatagcatcctgggtatcatatctgtacctctttccattggatactgtgctagcaagcatgctctccggggtttttttaatggccttcgaacagaacttgccacatacccaggtataatagtttctaacatttgcccaggacctgtgcaatcaaatattgtggagaattccctagctggagaagtcacaaagactataggcaataatggagaccagtcccacaagatgacaaccagtcgttgtgtgcggctgatgttaatcagcatggccaatgatttgaaagaagtttggatctcagaacaacctttcttgttagtaacatatttgtggcaatacatgccaacctgggcctggtggataaccaacaagatggggaagaaaaggattgagaactttaagagtggtgtggatgcagactcttcttattttaaaatctttaagacaaaacatgactgaaaagagcacctgtacttttcaagccactggagggagaaatggaaaacatgaaaacagcaatcttcttatgcttctgaataatcaaagactaatttgtgattttactttttaatagatatgactttgcttccaacatggaatgaaataaaaaataaataataaaagattgccatgaatcttgcaaaaaa

SEQ ID NO: 350416 - DNA, 1678 bp, Homo sapiens
tttctcgacctcatgaaaagatactgaagcttgaaaaggggatgttctttctgaataggaatggagaagaggggccaagcaagaatgattctatctgtctcctggccgttgatagtgtccctgtacagagaggaaataacgtagtataatatgtagcttatgtttgaatcagcttctttaaaaatactggaattttatttatttatttttggtagacacagggtttcctcatgttgcccaggctggtctcggacacttgaattcaagcaatctgccggccccgccgggtgtgccgcatgagggcgcgggccgcccaaggaccgcgagtggggccgcgagtgctgagcccggcgcgcccgagccgctcctcctcccggcctgctccctgggcggagccggggcagtgcggctctgggctggccgaaggggtggcgctgcgatcccgcagggcagcgacgcgactctggtgcgggccgtcttcttccccccgagctgggcgtgcgcggccgcaatgaactgggagctgctgctgtggctgctggtgctgtgcgcgctgctcctgctcttggtgcagctgctgcgcttcctgagggctgacggcgacctgacgctactatgggccgagtggcagggacgacgcccagaatgggagctgactgatatggtggtgtgggtgactggagcctcgagtggaattggtgaggagctggcttaccagttgtctaaactaggagtttctcttgtgctgtcagccagaagagtgcatgagctggaaagggtgaaaagaagatgcctagagaatggcaatttaaaagaaaaagatatacttgttttgccccttgacctgaccgacactggttcccatgaagcggctaccaaagctgttctccaggagtttggtagaatcgacattctggtcaacaatggtggaatgtcccagcgttctctgtgcatggataccagcttggatgtctacagaaagctaatagagcttaactacttagggacggtgtccttgacaaaatgtgttctgcctcacatgatcgagaggaagcaaggaaagattgttactgtgaatagcatcctgggtatcatatctgtacctctttccattggatactgtgctagcaagcatgctctccggggtttttttaatggccttcgaacagaacttgccacatacccaggtataatagtttctaacatttgcccaggacctgtgcaatcaaatattgtggagaattccctagctggagaagtcacaaagactataggcaataatggagaccagtcccacaagatgacaaccagtcgttgtgtgcggctgatgttaatcagcatggccaatgatttgaaagaagtttggatctcagaacaacctttcttgttagtaacatatttgtggcaatacatgccaacctgggcctggtggataaccaacaagatggggaagaaaaggattgagaactttaagagtggtgtggatgcagactcttcttattttaaaatctttaagacaaaacatgactgaaaagagcacctgtacttttcaagccactggagggagaaatggaaaacatgaaaacagcaatcttcttatgcttctgaataatcaaagactaatttgtgattttactttttaatagatatgactttgcttccaacatggaatgaaata

SEQ ID NO: 350417 - DNA, 2381 bp, Homo sapiens
tttctcgacctcatgaaaagatactgaagcttgaaaaggggatgttctttctgaataggaatggagaagaggggccaagcaagaatgattctatctgtctcctggccgttgatagtgtccctgtacagagaggaaataacgtagtataatatgtagcttatgtttgaatcagcttctttaaaaatactggaattttatttatttatttttggtagacacagggtttcctcatgttgcccaggctggtctcggacacttgaattcaagcaatctgccggccccgccgggtgtgccgcatgagggcgcgggccgcccaaggaccgcgagtggggccgcgagtgctgagcccggcgcgcccgagccgctcctcctcccggcctgctccctgggcggagccggggcagtgcggctctgggctggccgaaggggtggcgctgcgatcccgcagggcagcgacgcgactctggtgcgggccgtcttcttccccccgagctgggcgtgcgcggccgcaatgaactgggagctgctgctgtggctgctggtgctgtgcgcgctgctcctgctcttggtgcagctgctgcgcttcctgagggctgacggcgacctgacgctactatgggccgagtggcagggacgacgcccagaatgggagctgactgatatggtggtgtgggtgactggagcctcgagtggaattggtgaggagctggcttaccagttgtctaaactaggagtttctcttgtgctgtcagccagaagagtgcatgagctggaaagggtgaaaagaagatgcctagagaatggcaatttaaaagaaaaagatatacttgttttgccccttgacctgaccgacactggttcccatgaagcggctaccaaagctgttctccaggagtttggtagaatcgacattctggtcaacaatggtggaatgtcccagcgttctctgtgcatggataccagcttggatgtctacagaaagctaatagagcttaactacttagggacggtgtccttgacaaaatgtgttctgcctcacatgatcgagaggaagcaaggaaagattgttactgtgaatagcatcctgggtatcatatctgtacctctttccattggatactgtgctagcaagcatgctctccggggtttttttaatggccttcgaacagaacttgccacatacccaggtataatagtttctaacatttgcccaggacctgtgcaatcaaatattgtggagaattccctagctggagaagtcacaaagactataggcaataatggagaccagtcccacaagatgacaaccagtcgttgtgtgcggctgatgttaatcagcatggccaatgatttgaaagaagtttggatctcagaacaacctttcttgttagtaacatatttgtggcaatacatgccaacctgggcctggtggataaccaacaagatggggaagaaaaggattgagaactttaagagtggtgtggatgcagactcttcttattttaaaatctttaagacaaaacatgactgaaaagagcacctgtacttttcaagccactggagggagaaatggaaaacatgaaaacagcaatcttcttatgcttctgaataatcaaagactaatttgtgattttactttttaatagatatgactttgcttccaacatggaatgaaataaaaaataaataataaaagattgccatgaatcttgcaaaaaaggtattaactcatactatattcttggataaaataaccttttaaaatactttagcacatatgcttaaaatctaagttaacagatttgtcttagtccatttgtgctgctataacaaaataccacagatttggtaatttataaacaacagaaatctgtttttcctggctcttgaggctgggaattccaagaccaatgcaccagcagaattagtgtctggtgaaggctgatctctgcttccaagatggcacctcattgctgcatcctccacagtggaggaatgtatgtcctcacatggtggaagggacagaagggaaagaggagcaaaatgctttcaaaagagcatttaatctcattcattactcagtcacctcttaaaggccacatcctttaatactgttgctttggggattaagtttcgacatgaattttggaggggacaaaaacatccaaaccatagcaacataaatgtatagaatatttcacacaaagcagagtgctgggtaatgaccagatataaagaagtatttgaaatgaccttacctccaagatgcttatactcttagaaaagttgacaggtacagatggctgtaatttgaagcagcaggtaggattcattgcacctattattcattaaacacctgttgtatgtcttctactgtaaaa

SEQ ID NO: 350418 - DNA, 2271 bp, Homo sapiens
tttctcgacctcatgaaaagatactgaagcttgaaaaggggatgttctttctgaataggaatggagaagaggggccaagcaagaatgattctatctgtctcctggccgttgatagtgtccctgtacagagaggaaataacgtagtataatatgtagcttatgtttgaatcagcttctttaaaaatactggaattttatttatttatttttggtagacacagggtttcctcatgttgcccaggctggtctcggacacttgaattcaagcaatctgccggccccgccgggtgtgccgcatgagggcgcgggccgcccaaggaccgcgagtggggccgcgagtgctgagcccggcgcgcccgagccgctcctcctcccggcctgctccctgggcggagccggggcagtgcggctctgggctggccgaaggggtggcgctgcgatcccgcagggcagcgacgcgactctggtgcgggccgtcttcttccccccgagctgggcgtgcgcggccgcaatgaactgggagctgctgctgtggctgctggtgctgtgcgcgctgctcctgctcttggtgcagctgctgcgcttcctgagggctgacggcgacctgacgctactatgggccgagtggcagggacgacgcccagaatgggagctgactgatatggtggtgtgggtgactggagcctcgagtggaattggtgaggagctggcttaccagttgtctaaactaggagtttctcttgtgctgtcagccagaagagtgcatgagctggaaagggtgaaaagaagatgcctagagaatggcaatttaaaagaaaaagatatacttgttttgccccttgacctgaccgacactggttcccatgaagcggctaccaaagctgttctccaggagtttggtagaatcgacattctggtcaacaatggtggaatgtcccagcgttctctgtgcatggataccagcttggatgtctacagaaagctaatagagcttaactacttagggacggtgtccttgacaaaatgtgttctgcctcacatgatcgagaggaagcaaggaaagattgttactgtgaatagcatcctgggtatcatatctgtacctctttccattggatactgtgctagcaagcatgctctccggggtttttttaatggccttcgaacagaacttgccacatacccaggtataatagtttctaacatttgcccaggacctgtgcaatcaaatattgtggagaattccctagctggagaagtcacaaagactataggcaataatggagaccagtcccacaagatgacaaccagtcgttgtgtgcggctgatgttaatcagcatggccaatgatttgaaagaagtttggatctcagaacaacctttcttgttagtaacatatttgtggcaatacatgccaacctgggcctggtggataaccaacaagatggggaagaaaaggattgagaactttaagagtggtgtggatgcagactcttcttattttaaaatctttaagacaaaacatgactgaaaagagcacctgtacttttcaagccactggagggagaaatggaaaacatgaaaacagcaatcttcttatgcttctgaataatcaaagactaatttgtgattttactttttaatagatatgactttgcttccaacatggaatgaaataaaaaataaataataaaagattgccatgaatcttgcaaaaaaaaaaaagagaacaagacaaaaacacacaacaaacgaaagaagaaaagacaacaagaaagaaacaacaaaaacaaaaaaaaaagaaccaaaggaggggggggggcgcgctctaatagtattatccacccggcggggcggcgaccacatgtcgtcggacgcgcccacacccttgttgttactggaaagagcggggccccccatggtgaggggagatattatataaacaggagagagcgcacgcgggccggtctgtattaacaacatagacgtcgttgatgggacagaaacaaccactgtggtggtcggcaagttctttacgtgagcaacgcacaccaatcttcctggtgtgggggggcacaacatgtcgtgcgcaagccacccgctcccagaatgaattattcagcccccccacggtggatataattcaatacatcgctgagcagtctctcatcggtagtgaacacaccagctcacgtgcttatcgtcgtccgcccgcgatagtatctgtgccacaacgagtgtgtattttacagaatataatatacaaaggag

SEQ ID NO: 350419 - DNA, 1214 bp, Homo sapiens
tttctcgacctcatgaaaagatactgaagcttgaaaaggggatgttctttctgaataggaatggagaagaggggccaagcaagaatgattctatctgtctcctggccgttgatagtgtccctgtacagagaggaaataacgtagtataatatgtagcttatgtttgaatcagcttctttaaaaatactggaattttatttatttatttttggtagacacagggtttcctcatgttgcccaggctggtctcggacacttgaattcaagcaatctgccggccccgccgggtgtgccgcatgagggcgcgggccgcccaaggaccgcgagtggggccgcgagtgctgagcccggcgcgcccgagccgctcctcctcccggcctgctccctgggcggagccggggcagtgcggctctgggctggccgaaggggtggcgctgcgatcccgcagggcagcgacgcgactctggtgcgggccgtcttcttccccccgagctgggcgtgcgcggccgcaatgaactgggagctgctgctgtggctgctggtgctgtgcgcgctgctcctgctcttggtgcagctgctgcgcttcctgagggctgacggcgacctgacgctactatgggccgagtggcagggacgacgcccagaatgggagctgactgatatggtggtgtgggtgactggagcctcgagtggaattggtgaggagctggcttaccagttgtctaaactaggagtttctcttgtgctgtcagccagaagagtgcatgagctggaaagggtgaaaagaagatgcctagagaatggcaatttaaaagaaaaagatatacttgttttgccccttgacctgaccgacactggttcccatgaagcggctaccaaagctgttctccaggagtttggtagaatcgacattctggtcaacaatggtggaatgtcccagcgttctctgtgcatggataccagcttggatgtctacagaaagctaatagagcttaactacttagggacggtgtccttgacaaaatgtgttctgcctcacatgatcgagaggaagcaaggaaagattgttactgtgaatagcatcctgggtatcatatctgtacctctttccattggatactgtgctagcaagcatgctctccggggtttttttaatggccttcgaacagaacttgccacatatctgtgaccaacaagatggagaataagaggat

SEQ ID NO: 350420 - DNA, 1479 bp, Homo sapiens
tttctcgacctcatgaaaagatactgaagcttgaaaaggggatgttctttctgaataggaatggagaagaggggccaagcaagaatgattctatctgtctcctggccgttgatagtgtccctgtacagagaggaaataacgtagtataatatgtagcttatgtttgaatcagcttctttaaaaatactggaattttatttatttatttttggtagacacagggtttcctcatgttgcccaggctggtctcggacacttgaattcaagcaatctgccggccccgccgggtgtgccgcatgagggcgcgggccgcccaaggaccgcgagtggggccgcgagtgctgagcccggcgcgcccgagccgctcctcctcccggcctgctccctgggcggagccggggcagtgcggctctgggctggccgaaggggtggcgctgcgatcccgcagggcagcgacgcgactctggtgcgggccgtcttcttccccccgagctgggcgtgcgcggccgcaatgaactgggagctgctgctgtggctgctggtgctgtgcgcgctgctcctgctcttggtgcagctgctgcgcttcctgagggctgacggcgacctgacgctactatgggccgagtggcagggacgacgcccagaatgggagctgactgatatggtggtgtgggtgactggagcctcgagtggaattggtgaggagctggcttaccagttgtctaaactaggagtttctcttgtgctgtcagccagaagagtgcatgagctggaaagggtgaaaagaagatgcctagagaatggcaatttaaaagaaaaagatatacttgttttgccccttgacctgaccgacactggttcccatgaagcggctaccaaagctgttctccaggagtttggtagaggtttttttaatggccttcgaacagaacttgccacatacccaggtataatagtttctaacatttgcccaggacctgtgcaatcaaatattgtggagaattccctagctggagaagtcacaaagactataggcaataatggagaccagtcccacaagatgacaaccagtcgttgtgtgcggctgatgttaatcagcatggccaatgatttgaaagaagtttggatctcagaacaacctttcttgttagtaacatatttgtggcaatacatgccaacctgggcctggtggataaccaacaagatggggaagaaaaggattgagaactttaagagtggtgtggatgcagactcttcttattttaaaatctttaagacaaaacatgactgaaaagagcacctgtacttttcaagccactggagggagaaatggaaaacatgaaaacagcaatcttcttatgcttctgaataatcaaagactaatttgtgattttactttttaatagatatgactttgcttccaacatggaatgaaataaaaaataaataataaaagattgccatgaatcttgcaaaaaa

SEQ ID NO: 350421 - DNA, 1175 bp, Homo sapiens
tttctcgacctcatgaaaagatactgaagcttgaaaaggggatgttctttctgaataggaatggagaagaggggccaagcaagaatgattctatctgtctcctggccgttgatagtgtccctgtacagagaggaaataacgtagtataatatgtagcttatgtttgaatcagcttctttaaaaatactggaattttatttatttatttttggtagacacagggtttcctcatgttgcccaggctggtctcggacacttgaattcaagcaatctgccggccccgccgggtgtgccgcatgagggcgcgggccgcccaaggaccgcgagtggggccgcgagtgctgagcccggcgcgcccgagccgctcctcctcccggcctgctccctgggcggagccggggcagtgcggctctgggctggccgaaggggtggcgctgcgatcccgcagggcagcgacgcgactctggtgcgggccgtcttcttccccccgagctgggcgtgcgcggccgcaatgaactgggagctgctgctgtggctgctggtgctgtgcgcgctgctcctgctcttggtgcagctgctgcgcttcctgagggctgacggcgacctgacgctactatgggccgagtggcagggacgacgcccagaatgggagctgactgatatggtggtgtgggtgactggagcctcgagtggaattggtgaggagctggcttaccagttgtctaaactaggagtttctcttgtgctgtcagccagaagagtgcatgagctggaaagggtgaaaagaagatgcctagagaatggcaatttaaaagaaaaagatatacttgttttgccccttgacctgaccgacactggttcccatgaagcggctaccaaagctgttctccaggagtttggtagaatcgacattctggtcaacaatggtggaatgtcccagcgttctctgtgcatggataccagcttggatgtctacagaaagctaatagagcttaactacttagggacggtgtccttgacaaaatgtgttctgcctcacatgatcgagaggaagcaaggaaagattgttactgtgaatagcatcctgggtatcatatctgtacctctttccattggatactgtgctagcaagcatgctctccgggtaaggctgctcaaactcaactctgatagaa

SEQ ID NO: 350422 - DNA, 962 bp, Homo sapiens
tttctcgacctcatgaaaagatactgaagcttgaaaaggggatgttctttctgaataggaatggagaagaggggccaagcaagaatgattctatctgtctcctggccgttgatagtgtccctgtacagagaggaaataacgtagtataatatgtagcttatgtttgaatcagcttctttaaaaatactggaattttatttatttatttttggtagacacagggtttcctcatgttgcccaggctggtctcggacacttgaattcaagcaatctgccggccccgccgggtgtgccgcatgagggcgcgggccgcccaaggaccgcgagtggggccgcgagtgctgagcccggcgcgcccgagccgctcctcctcccggcctgctccctgggcggagccggggcagtgcggctctgggctggccgaaggggtggcgctgcgatcccgcagggcagcgacgcgactctggtgcgggccgtcttcttccccccgagctgggcgtgcgcggccgcaatgaactgggagctgctgctgtggctgctggtgctgtgcgcgctgctcctgctcttggtgcagctgctgcgcttcctgagggctgacggcgacctgacgctactatgggccgagtggcagggacgacgcccagaatgggagctgactgatatggtggtgtgggtgactggagcctcgagtggaattggtgaggagctggcttaccagttgtctaaactaggagtttctcttgtgctgtcagccagaagagtgcatgagctggaaagggtgaaaagaagatgcctagagaatggcaatttaaaagaaaaagatatacttgttttgccccttgacctgaccgacactggttcccatgaagcggctaccaaagctgttctccaggagtttggtagagtaagtagcatcttatattgatatagtcttgctttgaagtaactgcagaagagattcc

SEQ ID NO: 350423 - DNA, 1338 bp, Homo sapiens
  misc_feature (105)..(105): n is a, c, g, or t
  misc_feature (108)..(108): n is a, c, g, or t
  misc_feature (110)..(110): n is a, c, g, or t
  misc_feature (113)..(113): n is a, c, g, or t
  misc_feature (115)..(116): n is a, c, g, or t
accaaagctgttctccaggagtttggtagaatcgacattctggtcaacaatggtggaatgtcccagcgttctctgtgcatggataccagcttggatgtctacagnaancnaananngcttagggttcggaattacaaaaccaaattccctgctaaggctaaagttgatctgaacaaaagtaagggcaaggcaaagagaatagacattagacagggacctgaaaggatccagaaatgggactttacatcccacagaggaaacagaatgggagctgactgatatggtggtgtgggtgactggagcctcgagtggaattggtgaggagctggcttaccagttgtctaaactaggagtttctcttgtgctgtcagccagaagagtgcatgagctggaaagggtgaaaagaagatgcctagagaatggcaatttaaaagaaaaagatatacttgttttgccccttgacctgaccgacactggttcccatgaagcggctaccaaagctgttctccaggagtttggtagaatcgacattctggtcaacaatggtggaatgtcccagcgttctctgtgcatggataccagcttggatgtctacagaaagctaatagagcttaactacttagggacggtgtccttgacaaaatgtgttctgcctcacatgatcgagaggaagcaaggaaagattgttactgtgaatagcatcctgggtatcatatctgtacctctttccattggatactgtgctagcaagcatgctctccggggtttttttaatggccttcgaacagaacttgccacatacccaggtataatagtttctaacatttgcccaggacctgtgcaatcaaatattgtggagaattccctagctggagaagtcacaaagactataggcaataatggagaccagtcccacaagatgacaaccagtcgttgtgtgcggctgatgttaatcagcatggccaatgatttgaaagaagtttggatctcagaacaacctttcttgttagtaacatatttgtggcaatacatgccaacctgggcctggtggataaccaacaagatggggaagaaaaggattgagaactttaagagtggtgtggatgcagactcttcttattttaaaatctttaagacaaaacatgactgaaaagagcacctgtacttttcaagccactggagggagaaatggaaaacatgaaaacagcaatcttcttatgcttctgaataatcaaagactaatttgtgattttactttttaatagatatgactttgcttccaacatggaatgaaataaaaaataaataataaaagattgccatgaatcttgcaaaaaa

SEQ ID NO: 350424 - DNA, 2090 bp, Homo sapiens
tttctcgacctcatgaaaagatactgaagcttgaaaaggggatgttctttctgaataggaatggagaagaggggccaagcaagaatgattctatctgtctcctggccgttgatagtgtccctgtacagagaggaaataacgtagtataatatgtagcttatgtttgaatcagcttctttaaaaatactggaattttatttatttatttttggtagacacagggtttcctcatgttgcccaggctggtctcggacacttgaattcaagcaatctgccggccccgccgggtgtgccgcatgagggcgcgggccgcccaaggaccgcgagtggggccgcgagtgctgagcccggcgcgcccgagccgctcctcctcccggcctgctccctgggcggagccggggcagtgcggctctgggctggccgaaggggtggcgctgcgatcccgcagggcagcgacgcgactctggtgcgggccgtcttcttccccccgagctgggcgtgcgcggccgcaatgaactgggagctgctgctgtggctgctggtgctgtgcgcgctgctcctgctcttggtgcagctgctgcgcttcctgagggctgacggcgacctgacgctactatgggccgagtggcagggacgacgcccagaatgggagctgactgatatggtggtgtgggtgactggagcctcgagtggaattggtgaggagctggcttaccagttgtctaaactaggagtttctcttgtgctgtcagccagaagagtgcatgagctggaaagggtgaaaagaagatgcctagagaatggcaatttaaaagaaaaagatatacttgttttgccccttgacctgaccgacactggttcccatgaagcggctaccaaagctgttctccaggagtttggtagaatcgacattctggtcaacaatggtggaatgtcccagcgttctctgtgcatggataccagcttggatgtctacagaaagctaatagagcttaactacttagggacggtgtccttgacaaaatgtgttctgcctcacatgatcgagaggaagcaaggaaagattgttactgtgaatagcatcctgggtatcatatctgtacctctttccattggatactgtgctagcaagcatgctctccggggtttttttaatggccttcgaacagaacttgccacatacccaggtataatagtttctaacatttgcccaggacctgtgcaatcaaatattgtggagaattccctagctggagaagtcacaaagactataggcaataatggagaccagtcccacaagatgacaaccagtcgttgtgtgcggctgatgttaatcagcatggccaatgatttgaaagaagtttggatctcagaacaacctttcttgttagtaacatatttgtggcaatacatgccaacctgggcctggtggataaccaacaagatggggaagaaaaggattgagaactttaagagtggtgtggatgcagactcttcttattttaaaatctttaagacaaaacatgactgaaaagagcacctgtacttttcaagccactggagggagaaatggaaaacatgaaaacagcaatcttcttatgcttctgaataatcaaagactaatttgtgattttactttttaatagatatgactttgcttccaacatggaatgaaataaaaaataaataataaaagattgccatgaatcttgcaaaaaaaaaaaaaaaaaaaaaaaaaaaaaaacagaagagagagagaaaaaaaaaaagaaaaagggtgggggggagaaagagaaagaaagaaaaaattggggggggggagaaagggggggacgggggagaactccaacaacacctgcccgttgaccacggcgagaactaccccaaaaaaacgcccgcgagcaaccagccttacacaacggaagtaccctcaacacaagcggtaaacaggctgcacaacatataagccggggggataacagccaacagaaaaaccccccggcgaaaaagcaacgcgaaaaaagagcacaccgaaccacagcccgactatcgacacacagccaacgagactgagcaaaacaaagaaaaaa

SEQ ID NO: 350425 - DNA, 914 bp, Homo sapiens
gagtatcccggagacggcggcataatagcagcctcggtaggctccagcacgggttcccatgaagcggctacaaagctgtcctccaggagattcggtagaatcgacattctggtcaacaatggtggaatgtcccagcgttctctgtgcatggataccagcttggatgtctacagaaagctaatagagcttaactacttagggacggtgtccttgacaaaatgtgttctgcctcacatgatcgagaggaagcaaggaaagattgttactgtgaatagcatcctgggtatcatatctgtacctctttccattggatactgtgctagcaagcatgctctccggggtttttttaatggccttcgaacagaacttgccacatacccaggtataatagtttctaacatttgcccaggacctgtgcaatcaaatattgtggagaattccctagctggagaagtcacaaagactataggcaataatggagaccagtcccacaagatgacaaccagtcgttgtgtgcggctgatgttaatcagcatggccaatgatttgaaagaagtttggatctcagaacaacctttcttgttagtaacatatttgtggcaatacatgccaacctgggcctggtggataaccaacaagatggggaagaaaaggattgagaactttaagagtggtgtggatgcagactcttcttattttaaaatctttaagacaaaacatgactgaaaagagcacctgtacttttcaagccactggagggagaaatggaaaacatgaaaacagcaatcttcttatgcttctgaataatcaaagactaatttgtgattttactttttaatagatatgactttgcttccaacatggaatgaaataaaaaataaataataaaagattgccatgaatcttgcaaaaaa

SEQ ID NO: 350426 - DNA, 1145 bp, Homo sapiens
tttctcgacctcatgaaaagatactgaagcttgaaaaggggatgttctttctgaataggaatggagaagaggggccaagcaagaatgattctatctgtctcctggccgttgatagtgtccctgtacagagaggaaataacgtagtataatatgtagcttatgtttgaatcagcttctttaaaaatactggaattttatttatttatttttggtagacacagggtttcctcatgttgcccaggctggtctcggacacttgaattcaagcaatctgccggccccgccgggtgtgccgcatgagggcgcgggccgcccaaggaccgcgagtggggccgcgagtgctgagcccggcgcgcccgagccgctcctcctcccggcctgctccctgggcggagccggggcagtgcggctctgggctggccgaaggggtggcgctgcgatcccgcagggcagcgacgcgactctggtgcgggccgtcttcttccccccgagctgggcgtgcgcggccgcaatgaactgggagctgctgctgtggctgctggtgctgtgcgcgctgctcctgctcttggtgcagctgctgcgcttcctgagggctgacggcgacctgacgctactatgggccgagtggcagggacgacgcccaggtgaggaccggccaaagcctctcccgagtgggaggccgggctcggagctgccgaggcgtgtccgggtctccgggggttctgcagtgatcccgggtcctttgtgggttgcgtggagcttcccgaaggcccggctgccccttacgcaggggctgcgggttggggaggaagaggcgagggctaaaaagcccctttgtcttctgtactggtcggaagatggcatggacttgccattcaggctaggaaacctctccagggagtgccaaactgttaagagagcactggagtcggcggtgctcctgaggactctgacatcttacgcaggactcaagggattctggtgttgtctcagaggacgatactttgagaaacagtgagcgtccccctgcgtttgtaagggaaactcctttgtaagtaccggaagcccggtcgttctactacctgaagtagtctgtcctccacttcccactcctgcagttttgaaataaaatctgagataatccg

SEQ ID NO: 350427 - DNA, 511 bp, Homo sapiens
  misc_feature (25)..(25): n is a, c, g, or t
  misc_feature (27)..(27): n is a, c, g, or t
  misc_feature (31)..(31): n is a, c, g, or t
ctaaaccccctacctcaaacaacananaccnccccttcagggtatgggatgatgggatcattgatccagcagacaccagactggtcttgggtctcagttttagtgcagccctcaacgcaccaatagagaagactgacttcggtatcttcaggatgtaactggaataaaggatgttttctgttggacatgtactgaaaattaacacatgtagtagccttaaaattttagacttctcgaacatgaggctgttacagtaatttttttaacactgtgcattgtacttttctaccttaaaaaaatcagtgaggatatttatttaatgaacatcaattccttttaaattttcttagagaaatttctctgtggctcagttttaccacccataaagcggagacagtaatttatggttatcctttctgacccacaaagtatgaaaagttctgtaatctgtaaactcagttctgtaatctgtattattgagatgattaatataaagttgtattttcactga

SEQ ID NO: 350428 - DNA, 3676 bp, Homo sapiens
acaggcctgagaatcagagaagccttctctggggctgcaaggacctgagctcagcttccgccccagccagggaagcggcaggggaaagcaccggctccaggccagcgtgggccgctctctcgctcggtgcccgccgccatgtgggccgtcctgaggttagccctgcggccgtgtgcccgcgcctctcccgccgggccgcgcgcctatcacggggactcggtggcctcgctgggcacccagccggacttgggctctgccctctaccaggagaactacaagcagatgaaagcactagtaaatcagctccatgaacgagtggagcatataaaactaggaggtggtgagaaagcccgagcacttcacatatcaagaggaaaactattgcccagagaaagaattgacaatctcatagacccagggtctccatttctggaattatcccagtttgcaggttaccagttatatgacaatgaggaggtgccaggaggtggcattattacaggcattggaagagtatcaggagtagaatgcatgattattgccaatgatgccaccgtcaaaggaggtgcctactacccagtgactgtgaaaaaacaattacgggcccaagaaattgccatgcaaaacaggctcccctgcatctacttagttgattcgggaggagcatacttacctcgacaagcagatgtgtttccagatcgagaccactttggccgtacattctataatcaggcaattatgtcttctaaaaatattgcacagatcgcagtggtcatgggctcctgcaccgcaggaggagcctatgtgcctgccatggctgatgaaaacatcattgtacgcaagcagggtaccattttcttggcaggaccccccttggttaaagcggcaactggggaagaagtatctgctgaggatcttggaggtgctgatcttcattgcagaaagtctggagtaagtgaccactgggctttggatgatcatcatgcccttcacttaactaggaaggttgtgaggaatctaaattatcagaagaaattggatgtcaccattgaaccttctgaagagcctttatttcctgctgatgaattgtatggaatagttggtgctaaccttaagaggagctttgatgtccgagaggtcattgctagaatcgtggatggaagcagattcactgagttcaaagccttttatggagacacattagttacaggatttgctcgaatatttgggtacccagtaggtatcgttggaaacaacggagttctcttttctgaatctgcaaaaaagggtactcactttgtccagttatgctgccaaagaaatattcctctgctgttccttcaaaacattactggatttatggttggtagagagtatgaagctgaaggaattgccaaggatggtgccaagatggtggccgctgtggcctgtgcccaagtgcctaagataaccctcatcattgggggctcctatggagccggaaactatgggatgtgtggcagagcgtatagcccaagatttctctacatttggccaaatgctcgtatctcagtgatgggaggagagcaggcagccaatgtgttggccacgataacaaaggaccaaagagcccgggaaggaaagcagttctccagtgctgatgaagcggctttaaaagagcccatcattaagaagtttgaagaggaaggaaacccttactattccagcgcaagggtatgggatgatgggatcattgatccagcagacaccagactggtcttgggtctcagttttagtgcagccctcaacgcaccaatagagaagactgacttcggtatcttcaggatgtaactggaataaaggatgttttctgttggacatgtactgaaaattaacacatgtagtagccttaaaattttagacttctcgaacatgaggctgttacagtaatttttttaacactgtgcattgtacttttctaccttaaaaaaatcagtgaggatatttatttaatgaacatcaattccttttaaattttcttagagaaatttctctgtggctcagttttaccacccataaagcggagacagtaatttatggttatcctttctgacccacaaagtatgaaaagttctgtaatctgtaaactcagttctgtaatctgtattattgagatgattaatataaagttgtattttcactgaaatgattgttttgctggttatgcttggtgatattttagcgggcttatttttgaaaggcatctgttacttcagtggcataaagtgccctcacactgctgtgcagccatcaccaccattcatctccagaatttgttctcagtcccaaactgaaactataccattcaaacaacagcgctccccatttccccctcccccgagcccatgacatctccttattattattttttttttgagacagggtgtttctctgttgcccaggctggagtgcggtggtgtgatctcggctcactgcagcttccacctcccgggttcaagcgattcttgtgcctcagcctcccaagcagctgggactataggcacgcaccaccacacccagctaagttctgtatttttagcagagacgggatttcactaggttgcccaggctggtctcaaactactgacctcaagtgatccacccgcctcggcctcccaaagtgctgggattacaggtgtgagccaccgcgcctgaccacatctccttattcttaaatgtatgtgtttctcatggtttgatttattcttgctgggccatttcagcccctgtcatggcttcactcgccatctaaatgcagatgattactgccttgacggttcttaacccagctctcccctgagctgcaggcctgcatatccagtaggtctactggacatctgtactggttgttgtggaggaacctctggcttgctcattaagtcctactgattttcactatcccctgaatttccccacttatttttgtctttcactatcgcaggccttagaagaggtctacctgcctccagtcttacctagtccagtctaccccctggagttagaatggccatcctgaagtgaaaagtaatgtcacattactcccttcagtgatttcttgtagaagtgccaatccctgaatgccaccaagatcttaatcttcacatctttaatcttatctctttgactcctctttacaccggagaacggctccagctgttctagctctctttcagttctttgaaccttcccaccttagggtctataaggttccctctgcccaaattgttctactctcccttcttcttcaacacatccttcagtttaagcacttgcttctctcagtttaaactccacttccttagggatgtctctgtgacctccctgtgctggattagcttccctactctatgctcttgtaaaacactatctacttcctttgtcataaactcatcattttcctataaacattaatattgtcctcctgctagaatgtaagctccgtgagagcaaggatcctcctgtttaccctgtacctccaatgtctggcacttgtaggtgctcaaatattcgttgaatgaatgaaaaatccatattgtaattgatgtcctctggccacatagttttaaaattaggtgattgattatatgaccgaatagaactatcaaatgttttcctaataaagtcaatatttcaaaca

SEQ ID NO: 350429 - DNA, 4199 bp, Homo sapiens
acaggcctgagaatcagagaagccttctctggggctgcaaggacctgagctcagcttccgccccagccagggaagcggcaggggaaagcaccggctccaggccagcgtgggccgctctctcgctcggtgcccgccgccatgtgggccgtcctgaggttagccctgcggccgtgtgcccgcgcctctcccgccgggccgcgcgcctatcacggggactcggtggcctcgctgggcacccagccggacttgggctctgccctctaccaggagaactacaagcagatgaaagcactagtaaatcagctccatgaacgagtggagcatataaaactaggaggtggtgagaaagcccgagcacttcacatatcaagaggaaaactattgcccagagaaagaattgacaatctcatagacccagggtctccatttctggaattatcccagtttgcaggttaccagttatatgacaatgaggaggtgccaggaggtggcattattacaggcattggaagagtatcaggagtagaatgcatgattattgccaatgatgccaccgtcaaaggaggtgcctactacccagtgactgtgaaaaaacaattacgggcccaagaaattgccatgcaaaacaggctcccctgcatctacttagttgattcgggaggagcatacttacctcgacaagcagatgtgtttccagatcgagaccactttggccgtacattctataatcaggcaattatgtcttctaaaaatattgcacagatcgcagtggtcatgggctcctgcaccgcaggaggagcctatgtgcctgccatggctgatgaaaacatcattgtacgcaagcagggtaccattttcttggcaggaccccccttggttaaagcggcaactggggaagaagtatctgctgaggatcttggaggtgctgatcttcattgcagaaagtctggagtaagtgaccactgggctttggatgatcatcatgcccttcacttaactaggaaggttgtgaggaatctaaattatcagaagaaattggatgtcaccattgaaccttctgaagagcctttatttcctgctgatgaattgtatggaatagttggtgctaaccttaagaggagctttgatgtccgagaggtcattgctagaatcgtggatggaagcagattcactgagttcaaagccttttatggagacacattagttacaggatttgctcgaatatttgggtacccagtaggtatcgttggaaacaacggagttctcttttctgaatctgcaaaaaagggtactcactttgtccagttatgctgccaaagaaatattcctctgctgttccttcaaaacattactggatttatggttggtagagagtatgaagctgaaggaattgccaaggatggtgccaagatggtggccgctgtggcctgtgcccaagtgcctaagataaccctcatcattgggggctcctatggagccggaaactatgggatgtgtggcagagcgtatagcccaagatttctctacatttggccaaatgctcgtatctcagtgatgggaggagagcaggcagccaatgtgttggccacgataacaaaggaccaaagagcccgggaaggaaagcagttctccagtgctgatgaagcggctttaaaagagcccatcattaagaagtttgaagaggaaggaaacccttactattccagcgcaagggtatgggatgatgggatcattgatccagcagacaccagactggtcttgggtctcagttttagtgcagccctcaacgcaccaatagagaagactgacttcggtatcttcaggatgtaactggaataaaggatgttttctgttggacatgtactgaaaattaacacatgtagtagccttaaaattttagacttctcgaacatgaggctgttacagtaatttttttaacactgtgcattgtacttttctaccttaaaaaaatcagtgaggatatttatttaatgaacatcaattccttttaaattttcttagagaaatttctctgtggctcagttttaccacccataaagcggagacagtaatttatggttatcctttctgacccacaaagtatgaaaagttctgtaatctgtaaactcagttctgtaatctgtattattgagatgattaatataaagttgtattttcactgaaatgattgttttgctggttatgcttggtgatattttagcgggcttatttttgaaaggcatctgttacttcagtggcataaagtgccctcacactgctgtgcagccatcaccaccattcatctccagaatttgttctcagtcccaaactgaaactataccattcaaacaacagcgctccccatttccccctcccccgagcccatgacatctccttattattattttttttttgagacagggtgtttctctgttgcccaggctggagtgcggtggtgtgatctcggctcactgcagcttccacctcccgggttcaagcgattcttgtgcctcagcctcccaagcagctgggactataggcacgcaccaccacacccagctaagttctgtatttttagcagagacgggatttcactaggttgcccaggctggtctcaaactactgacctcaagtgatccacccgcctcggcctcccaaagtgctgggattacaggtgtgagccaccgcgcctgaccacatctccttattcttaaatgtatgtgtttctcatggtttgatttattcttgctgggccatttcagcccctgtcatggcttcactcgccatctaaatgcagatgattactgccttgacggttcttaacccagctctcccctgagctgcaggcctgcatatccagtaggtctactggacatctgtactggttgttgtggaggaacctctggcttgctcattaagtcctactgattttcactatcccctgaatttccccacttatttttgtctttcactatcgcaggccttagaagaggtctacctgcctccagtcttacctagtccagtctaccccctggagttagaatggccatcctgaagtgaaaagtaatgtcacattactcccttcagtgatttcttgtagaagtgccaatccctgaatgccaccaagatcttaatcttcacatctttaatcttatctctttgactcctctttacaccggagaacggctccagctgttctagctctctttcagttctttgaaccttcccaccttagggtctataaggttccctctgcccaaattgttctactctcccttcttcttcaacacatccttcagtttaagcacttgcttctctcagtttaaactccacttccttagggatgtctctgtgacctccctgtgctggattagcttccctactctatgctcttgtaaaacactatctacttcctttgtcataaactcatcattttcctataaacattaatattgtcctcctgctagaatgtaagctccgtgagagcaaggatcctcctgtttaccctgtacctccaatgtctggcacttgtaggtgctcaaatattcgttgaatgaatgaaaaatccatattgtaattgatgtcctctggccacatagttttaaaattaggtgattgattatatgaccgaatagaactatcaaatgttttcctaataaagtcaatatttcaaacaaacaaaagaaacgaagaacaaaaaaaaaaaaaaaaaaagcaaagaaaaagaagggggggggcggcgatgaattaatctatacggcaccgagagaaggagacaaagaatccaacccgaacacccagctataaagaagaaagagagcgcgacaccaatggagagggaagtaaaatataaggaggcagagagagcgcgactgataaaacaacaccgcacagcatgaagggcaaaacaaacacgcgagatagacgaagtaaaaggaagaagaaaacacaaacaccacaaccagcttgggagcgtgccaattacaagaagaagagaacaacacaccacacctacaacagaaagaacacgaccaccaaagtcagagaaacaacaaagaaccaaacggcagacgcctacggacgggagcgaacagcacacaagactagtagacgccaggacgagagagacaaacatcaccgccaccacacagaacaagaagaaaacacaacacaaacgggcacaagacataaaacaccgt

SEQ ID NO: 350430 - DNA, 3371 bp, Homo sapiens
acaggcctgagaatcagagaagccttctctggggctgcaaggacctgagctcagcttccgccccagccagggaagcggcaggggaaagcaccggctccaggccagcgtgggccgctctctcgctcggtgcccgccgccatgtgggccgtcctgaggttagccctgcggccgtgtgcccgcgcctctcccgccgggccgcgcgcctatcacggggactcggtggcctcgctgggcacccagccggacttgggctctgccctctaccaggagaactacaagcagatgaaagcactagtaaatcagctccatgaacgagtggagcatataaaactaggaggtggtgagaaagcccgagcacttcacatatcaagaggaaaactattgcccagagaaagaattgacaatctcatagacccagggtctccatttctggaattatcccagtttgcaggttaccagttatatgacaatgaggaggtgccaggaggtggcattattacaggcattggaagagtatcaggagtagaatgcatgattattgccaatgatgccaccgtcaaaggaggtgcctactacccagtgactgtgaaaaaacaattacgggcccaagaaattgccatgcaaaacaggctcccctgcatctacttagttgattcgggaggagcatacttacctcgacaagcagatgtgtttccagatcgagaccactttggccgtacattctataatcaggcaattatgtcttctaaaaatattgcacagatcgcagtggtcatgggctcctgcaccgcaggaggagcctatgtgcctgccatggctgatgaaaacatcattgtacgcaagcagggtaccattttcttggcaggaccccccttggttaaagcggcaactggggaagaagtatctgctgaggatcttggaggtgctgatcttcattgcagaaagtctggagtaagtgaccactgggctttggatgatcatcatgcccttcacttaactaggaaggttgtgaggaatctaaattatcagaagaaattggatgtcaccattgaaccttctgaagagcctttatttcctgctgatgaattgtatggaatagttggtgctaaccttaagaggagctttgatgtccgagaggtcattgctagaatcgtggatggaagcagattcactgagttcaaagccttttatggagacacattagttacaggatttgctcgaatatttgggtacccagtaggtatcgttggaaacaacggagttctcttttctgaatctgcaaaaaagggtactcactttgtccagttatgctgccaaagaaatattcctctgctgttccttcaaaacattactggatttatggttggtagagagtatgaagctgaaggaattgccaaggatggtgccaagatggtggccgctgtggcctgtgcccaagtgcctaagataaccctcatcattgggggctcctatggagccggaaactatgggatgtgtggcagagcgtatagcccaagatttctctacatttggccaaatgctcgtatctcagtgatgggaggagagcaggcagccaatgtgttggccacgataacaaaggaccaaagagcccgggaaggaaagcagttctccagtgctgatgaagcggctttaaaagagcccatcattaagaagtttgaagaggaaggaaacccttactattccagcgcaagggtatgggatgatgggatcattgatccagcagacaccagactggtcttgggtctcagttttagtgcagccctcaacgcaccaatagagaagactgacttcggtatcttcaggatgtaactggaataaaggatgttttctgttggacatgtactgaaaattaacacatgtagtagccttaaaattttagacttctcgaacatgaggctgttacagtaatttttttaacactgtgcattgtacttttctaccttaaaaaaatcagtgaggatatttatttaatgaacatcaattccttttaaattttcttagagaaatttctctgtggctcagttttaccacccataaagcggagacagtaatttatggttatcctttctgacccacaaagtatgaaaagttctgtaatctgtaaactcagttctgtaatctgtattattgagatgattaatataaagttgtattttcactgaaatgattgttttgctggttatgcttggtgatattttagcgggcttatttttgaaaggcatctgttacttcagtggcataaagtgccctcacactgctgtgcagccatcaccaccattcatctccagaatttgttctcagtcccaaactgaaactataccattcaaacaacagcgctccccatttccccctcccccgagcccatgacatctccttattattattttttttttgagacagggtgtttctctgttgcccaggctggagtgcggtggtgtgatctcggctcactgcagcttccacctcccgggttcaagcgattcttgtgcctcagcctcccaagcagctgggactataggcacgcaccaccacacccagctaagttctgtatttttagcagagacgggatttcactaggttgcccaggctggtctcaaactactgacctcaagtgatccacccgcctcggcctcccaaagtgctgggattacaggtgtgagccaccgcgcctgaccacatctccttattcttaaatgtatgtgtttctcatggtttgatttattcttgctgggccatttcagcccctgtcatggcttcactcgccatctaaatgcagatgattactgccttgacggttcttaacccagctctcccctgagctgcaggcctgcatatccagtaggtctactggacatctgtactggttgttgtggaggaacctctggcttgctcattaagtcctactgattttcactatcccctgaatttccccacttatttttgtctttcactatcgcaggccttagaagaggtctacctgcctccagtcttacctagtccagtctaccccctggagttagaatggccatcctgaagtgaaaagtaatgtcacattactcccttcagtgatttcttgtagaagtgccaatccctgaatgccaccaagatcttaatcttcacatctttaatcttatctctttgactcctctttacaccggagaacggctccagctgttctagctctctttcagttctttgaaccttcccaccttagggtctataaggttccctctgcccaaattgttctactctcccttcttcttcaacacatccttcagtttaagcacttgcttctctagtaaaatataacactgatcttgggatatacgctcacgtaaaaataccaacct

SEQ ID NO: 350431 - DNA, 2445 bp, Homo sapiens
acaggcctgagaatcagagaagccttctctggggctgcaaggacctgagctcagcttccgccccagccagggaagcggcaggggaaagcaccggctccaggccagcgtgggccgctctctcgctcggtgcccgccgccatgtgggccgtcctgaggttagccctgcggccgtgtgcccgcgcctctcccgccgggccgcgcgcctatcacggggactcggtggcctcgctgggcacccagccggacttgggctctgccctctaccaggagaactacaagcagatgaaagcactagtaaatcagctccatgaacgagtggagcatataaaactaggaggtggtgagaaagcccgagcacttcacatatcaagaggaaaactattgcccagagaaagaattgacaatctcatagacccagggtctccatttctggaattatcccagtttgcaggttaccagttatatgacaatgaggaggtgccaggaggtggcattattacaggcattggaagagtatcaggagtagaatgcatgattattgccaatgatgccaccgtcaaaggaggtgcctactacccagtgactgtgaaaaaacaattacgggcccaagaaattgccatgcaaaacaggctcccctgcatctacttagttgattcgggaggagcatacttacctcgacaagcagatgtgtttccagatcgagaccactttggccgtacattctataatcaggcaattatgtcttctaaaaatattgcacagatcgcagtggtcatgggctcctgcaccgcaggaggagcctatgtgcctgccatggctgatgaaaacatcattgtacgcaagcagggtaccattttcttggcaggaccccccttggttaaagcggcaactggggaagaagtatctgctgaggatcttggaggtgctgatcttcattgcagaaagtctggagtaagtgaccactgggctttggatgatcatcatgcccttcacttaactaggaaggttgtgaggaatctaaattatcagaagaaattggatgtcaccattgaaccttctgaagagcctttatttcctgctgatgaattgtatggaatagttggtgctaaccttaagaggagctttgatgtccgagaggtcattgctagaatcgtggatggaagcagattcactgagttcaaagccttttatggagacacattagttacaggatttgctcgaatatttgggtacccagtaggtatcgttggaaacaacggagttctcttttctgaatctgcaaaaaagggtactcactttgtccagttatgctgccaaagaaatattcctctgctgttccttcaaaacattactggatttatggttggtagagagtatgaagctgaaggaattgccaaggatggtgccaagatggtggccgctgtggcctgtgcccaagtgcctaagataaccctcatcattgggggctcctatggagccggaaactatgggatgtgtggcagagcgtatagcccaagatttctctacatttggccaaatgctcgtatctcagtgatgggaggagagcaggcagccaatgtgttggccacgataacaaaggaccaaagagcccgggaaggaaagcagttctccagtgctgatgaagcggctttaaaagagcccatcattaagaagtttgaagaggaaggaaacccttactattccagcgcaagggtatgggatgatgggatcattgatccagcagacaccagactggtcttgggtctcagttttagtgcagccctcaacgcaccaatagagaagactgacttcggtatcttcaggatgtaactggaataaaggatgttttctgttggacatgtactgaaaattaacacatgtagtagccttaaaattttagacttctcgaacatgaggctgttacagtaatttttttaacactgtgcattgtacttttctaccttaaaaaaatcagtgaggatatttatttaatgaacatcaattccttttaaattttcttagagaaatttctctgtggctcagttttaccacccataaagcggagacagtaatttatggttatcctttctgacccacaaagtatgaaaagttctgtaatctgtaaactcagttctgtaatctgtattattgagatgattaatataaagttgtattttcactgaaatgattgttttgctggttatgcttggtgatattttagcgggcttatttttgaaaggcatctgttacttcagtggcataaagtgccctcacactgctgtgcagccatcaccaccattcatctccagaatttgttctcagtcccaaactgaaactataccattcaaacaacagcgctcctgagccccctgcccccagagcaataaaagtcagctgggctttcctcgaaaaaagacacaacacgacacagaaccacagacaagt

SEQ ID NO: 350432 - DNA, 3562 bp, Homo sapiens
acaggcctgagaatcagagaagccttctctggggctgcaaggacctgagctcagcttccgccccagccagggaagcggcaggggaaagcaccggctccaggccagcgtgggccgctctctcgctcggtgcccgccgccatgtgggccgtcctgaggttagccctgcggccgtgtgcccgcgcctctcccgccgggccgcgcgcctatcacggggactcggtggcctcgctgggcacccagccggacttgggctctgccctctaccaggagaactacaagcagatgaaagcactagtaaatcagctccatgaacgagtggagcatataaaactaggaggtggtgagaaagcccgagcacttcacatatcaagaggaaaactattgcccagagaaagaattgacaatctcatagacccagggtctccatttctggaattatcccagtttgcaggttaccagttatatgacaatgaggaggtgccaggaggtggcattattacaggcattggaagagtatcaggagtagaatgcatgattattgccaatgatgccaccgtcaaaggaggtgcctactacccagtgactgtgaaaaaacaattacgggcccaagaaattgccatgcaaaacaggctcccctgcatctacttagttgattcgggaggagcatacttacctcgacaagcagatgtgtttccagatcgagaccactttggccgtacattctataatcaggcaattatgtcttctaaaaatattgcacaggttaaagcggcaactggggaagaagtatctgctgaggatcttggaggtgctgatcttcattgcagaaagtctggagtaagtgaccactgggctttggatgatcatcatgcccttcacttaactaggaaggttgtgaggaatctaaattatcagaagaaattggatgtcaccattgaaccttctgaagagcctttatttcctgctgatgaattgtatggaatagttggtgctaaccttaagaggagctttgatgtccgagaggtcattgctagaatcgtggatggaagcagattcactgagttcaaagccttttatggagacacattagttacaggatttgctcgaatatttgggtacccagtaggtatcgttggaaacaacggagttctcttttctgaatctgcaaaaaagggtactcactttgtccagttatgctgccaaagaaatattcctctgctgttccttcaaaacattactggatttatggttggtagagagtatgaagctgaaggaattgccaaggatggtgccaagatggtggccgctgtggcctgtgcccaagtgcctaagataaccctcatcattgggggctcctatggagccggaaactatgggatgtgtggcagagcgtatagcccaagatttctctacatttggccaaatgctcgtatctcagtgatgggaggagagcaggcagccaatgtgttggccacgataacaaaggaccaaagagcccgggaaggaaagcagttctccagtgctgatgaagcggctttaaaagagcccatcattaagaagtttgaagaggaaggaaacccttactattccagcgcaagggtatgggatgatgggatcattgatccagcagacaccagactggtcttgggtctcagttttagtgcagccctcaacgcaccaatagagaagactgacttcggtatcttcaggatgtaactggaataaaggatgttttctgttggacatgtactgaaaattaacacatgtagtagccttaaaattttagacttctcgaacatgaggctgttacagtaatttttttaacactgtgcattgtacttttctaccttaaaaaaatcagtgaggatatttatttaatgaacatcaattccttttaaattttcttagagaaatttctctgtggctcagttttaccacccataaagcggagacagtaatttatggttatcctttctgacccacaaagtatgaaaagttctgtaatctgtaaactcagttctgtaatctgtattattgagatgattaatataaagttgtattttcactgaaatgattgttttgctggttatgcttggtgatattttagcgggcttatttttgaaaggcatctgttacttcagtggcataaagtgccctcacactgctgtgcagccatcaccaccattcatctccagaatttgttctcagtcccaaactgaaactataccattcaaacaacagcgctccccatttccccctcccccgagcccatgacatctccttattattattttttttttgagacagggtgtttctctgttgcccaggctggagtgcggtggtgtgatctcggctcactgcagcttccacctcccgggttcaagcgattcttgtgcctcagcctcccaagcagctgggactataggcacgcaccaccacacccagctaagttctgtatttttagcagagacgggatttcactaggttgcccaggctggtctcaaactactgacctcaagtgatccacccgcctcggcctcccaaagtgctgggattacaggtgtgagccaccgcgcctgaccacatctccttattcttaaatgtatgtgtttctcatggtttgatttattcttgctgggccatttcagcccctgtcatggcttcactcgccatctaaatgcagatgattactgccttgacggttcttaacccagctctcccctgagctgcaggcctgcatatccagtaggtctactggacatctgtactggttgttgtggaggaacctctggcttgctcattaagtcctactgattttcactatcccctgaatttccccacttatttttgtctttcactatcgcaggccttagaagaggtctacctgcctccagtcttacctagtccagtctaccccctggagttagaatggccatcctgaagtgaaaagtaatgtcacattactcccttcagtgatttcttgtagaagtgccaatccctgaatgccaccaagatcttaatcttcacatctttaatcttatctctttgactcctctttacaccggagaacggctccagctgttctagctctctttcagttctttgaaccttcccaccttagggtctataaggttccctctgcccaaattgttctactctcccttcttcttcaacacatccttcagtttaagcacttgcttctctcagtttaaactccacttccttagggatgtctctgtgacctccctgtgctggattagcttccctactctatgctcttgtaaaacactatctacttcctttgtcataaactcatcattttcctataaacattaatattgtcctcctgctagaatgtaagctccgtgagagcaaggatcctcctgtttaccctgtacctccaatgtctggcacttgtaggtgctcaaatattcgttgaatgaatgaaaaatccatattgtaattgatgtcctctggccacatagttttaaaattaggtgattgattatatgaccgaatagaactatcaaatgttttcctaataaagtcaatatttcaaaca

SEQ ID NO: 350433 - DNA, 2853 bp, Homo sapiens
ataatacagcagatacttcttccccagttgccgctttaaccaaggggggtcctgccaagaaaatggtaccctgcttgcgtacaatgatgttttcatcagccatggcaggcacataggctcctcctgcggtgcaggagcccatgaccactgcgatctgtgcaccctagcaattaactaggaaggttgtgaggaatctaaattatcagaagaaattggatgtcaccattgaaccttctgaagagcctttatttcctgctgatgaattgtatggaatagttggtgctaaccttaagaggagctttgatgtccgagaggtcattgctagaatcgtggatggaagcagattcactgagttcaaagccttttatggagacacattagttacaggatttgctcgaatatttgggtacccagtaggtatcgttggaaacaacggagttctcttttctgaatctgcaaaaaagggtactcactttgtccagttatgctgccaaagaaatattcctctgctgttccttcaaaacattactggatttatggttggtagagagtatgaagctgaaggaattgccaaggatggtgccaagatggtggccgctgtggcctgtgcccaagtgcctaagataaccctcatcattgggggctcctatggagccggaaactatgggatgtgtggcagagcgtatagcccaagatttctctacatttggccaaatgctcgtatctcagtgatgggaggagagcaggcagccaatgtgttggccacgataacaaaggaccaaagagcccgggaaggaaagcagttctccagtgctgatgaagcggctttaaaagagcccatcattaagaagtttgaagaggaaggaaacccttactattccagcgcaagggtatgggatgatgggatcattgatccagcagacaccagactggtcttgggtctcagttttagtgcagccctcaacgcaccaatagagaagactgacttcggtatcttcaggatgtaactggaataaaggatgttttctgttggacatgtactgaaaattaacacatgtagtagccttaaaattttagacttctcgaacatgaggctgttacagtaatttttttaacactgtgcattgtacttttctaccttaaaaaaatcagtgaggatatttatttaatgaacatcaattccttttaaattttcttagagaaatttctctgtggctcagttttaccacccataaagcggagacagtaatttatggttatcctttctgacccacaaagtatgaaaagttctgtaatctgtaaactcagttctgtaatctgtattattgagatgattaatataaagttgtattttcactgaaatgattgttttgctggttatgcttggtgatattttagcgggcttatttttgaaaggcatctgttacttcagtggcataaagtgccctcacactgctgtgcagccatcaccaccattcatctccagaatttgttctcagtcccaaactgaaactataccattcaaacaacagcgctccccatttccccctcccccgagcccatgacatctccttattattattttttttttgagacagggtgtttctctgttgcccaggctggagtgcggtggtgtgatctcggctcactgcagcttccacctcccgggttcaagcgattcttgtgcctcagcctcccaagcagctgggactataggcacgcaccaccacacccagctaagttctgtatttttagcagagacgggatttcactaggttgcccaggctggtctcaaactactgacctcaagtgatccacccgcctcggcctcccaaagtgctgggattacaggtgtgagccaccgcgcctgaccacatctccttattcttaaatgtatgtgtttctcatggtttgatttattcttgctgggccatttcagcccctgtcatggcttcactcgccatctaaatgcagatgattactgccttgacggttcttaacccagctctcccctgagctgcaggcctgcatatccagtaggtctactggacatctgtactggttgttgtggaggaacctctggcttgctcattaagtcctactgattttcactatcccctgaatttccccacttatttttgtctttcactatcgcaggccttagaagaggtctacctgcctccagtcttacctagtccagtctaccccctggagttagaatggccatcctgaagtgaaaagtaatgtcacattactcccttcagtgatttcttgtagaagtgccaatccctgaatgccaccaagatcttaatcttcacatctttaatcttatctctttgactcctctttacaccggagaacggctccagctgttctagctctctttcagttctttgaaccttcccaccttagggtctataaggttccctctgcccaaattgttctactctcccttcttcttcaacacatccttcagtttaagcacttgcttctctcagtttaaactccacttccttagggatgtctctgtgacctccctgtgctggattagcttccctactctatgctcttgtaaaacactatctacttcctttgtcataaactcatcattttcctataaacattaatattgtcctcctgctagaatgtaagctccgtgagagcaaggatcctcctgtttaccctgtacctccaatgtctggcacttgtaggtgctcaaatattcgttgaatgaatgaaaaatccatattgtaattgatgtcctctggccacatagttttaaaattaggtgattgattatatgaccgaatagaactatcaaatgttttcctaataaagtcaatatttcaaaca

SEQ ID NO: 350434 - DNA, 2004 bp, Homo sapiens
  misc_feature (25)..(25): n is a, c, g, or t
  misc_feature (27)..(27): n is a, c, g, or t
  misc_feature (31)..(31): n is a, c, g, or t
ctaaaccccctacctcaaacaacananaccnccccttcagggtatgggatgatgggatcattgatccagcagacaccagactggtcttgggtctcagttttagtgcagccctcaacgcaccaatagagaagactgacttcggtatcttcaggatgtaactggaataaaggatgttttctgttggacatgtactgaaaattaacacatgtagtagccttaaaattttagacttctcgaacatgaggctgttacagtaatttttttaacactgtgcattgtacttttctaccttaaaaaaatcagtgaggatatttatttaatgaacatcaattccttttaaattttcttagagaaatttctctgtggctcagttttaccacccataaagcggagacagtaatttatggttatcctttctgacccacaaagtatgaaaagttctgtaatctgtaaactcagttctgtaatctgtattattgagatgattaatataaagttgtattttcactgaaatgattgttttgctggttatgcttggtgatattttagcgggcttatttttgaaaggcatctgttacttcagtggcataaagtgccctcacactgctgtgcagccatcaccaccattcatctccagaatttgttctcagtcccaaactgaaactataccattcaaacaacagcgctccccatttccccctcccccgagcccatgacatctccttattattattttttttttgagacagggtgtttctctgttgcccaggctggagtgcggtggtgtgatctcggctcactgcagcttccacctcccgggttcaagcgattcttgtgcctcagcctcccaagcagctgggactataggcacgcaccaccacacccagctaagttctgtatttttagcagagacgggatttcactaggttgcccaggctggtctcaaactactgacctcaagtgatccacccgcctcggcctcccaaagtgctgggattacaggtgtgagccaccgcgcctgaccacatctccttattcttaaatgtatgtgtttctcatggtttgatttattcttgctgggccatttcagcccctgtcatggcttcactcgccatctaaatgcagatgattactgccttgacggttcttaacccagctctcccctgagctgcaggcctgcatatccagtaggtctactggacatctgtactggttgttgtggaggaacctctggcttgctcattaagtcctactgattttcactatcccctgaatttccccacttatttttgtctttcactatcgcaggccttagaagaggtctacctgcctccagtcttacctagtccagtctaccccctggagttagaatggccatcctgaagtgaaaagtaatgtcacattactcccttcagtgatttcttgtagaagtgccaatccctgaatgccaccaagatcttaatcttcacatctttaatcttatctctttgactcctctttacaccggagaacggctccagctgttctagctctctttcagttctttgaaccttcccaccttagggtctataaggttccctctgcccaaattgttctactctcccttcttcttcaacacatccttcagtttaagcacttgcttctctcagtttaaactccacttccttagggatgtctctgtgacctccctgtgctggattagcttccctactctatgctcttgtaaaacactatctacttcctttgtcataaactcatcattttcctataaacattaatattgtcctcctgctagaatgtaagctccgtgagagcaaggatcctcctgtttaccctgtacctccaatgtctggcacttgtaggtgctcaaatattcgttgaatgaatgaaaaatccatattgtaattgatgtcctctggccacatagttttaaaattaggtgattgattatatgaccgaatagaactatcaaatgttttcctaataaagtcaatatttcaaaca

SEQ ID NO: 350435 - DNA, 1512 bp, Homo sapiens
acaggcctgagaatcagagaagccttctctggggctgcaaggacctgagctcagcttccgccccagccagggaagcggcaggggaaagcaccggctccaggccagcgtgggccgctctctcgctcggtgcccgccgccatgtgggccgtcctgaggttagccctgcggccgtgtgcccgcgcctctcccgccgggccgcgcgcctatcacggggactcggtggcctcgctgggcacccagccggacttgggctctgccctctaccaggagaactacaagcagatgaaagcactagtaaatcagctccatgaacgagtggagcatataaaactaggaggtggtgagaaagcccgagcacttcacatatcaagaggaaaactattgcccagagaaagaattgacaatctcatagacccagggtctccatttctggaattatcccagtttgcaggttaccagttatatgacaatgaggaggtgccaggaggtggcattattacaggcattggaagagtatcaggagtagaatgcatgattattgccaatgatgccaccgtcaaaggaggtgcctactacccagtgactgtgaaaaaacaattacgggcccaagaaattgccatgcaaaacaggctcccctgcatctacttagttgattcgggaggagcatacttacctcgacaagcagatgtgtttccagatcgagaccactttggccgtacattctataatcaggcaattatgtcttctaaaaatattgcacagatcgcagtggtcatgggctcctgcaccgcaggaggagcctatgtgcctgccatggctgatgaaaacatcattgtacgcaagcagggtaccattttcttggcaggaccccccttggttaaagcggcaactggggaagaagtatctgctgaggatcttggaggtgctgatcttcattgcagaaagtctggagtaagtgaccactgggctttggatgatcatcatgcccttcacttaactaggaaggttgtgaggaatctaaattatcagaagaaattggatgtcaccattgaaccttctgaagagcctttatttcctgctgatgaattgtatggaatagttggtgctaaccttaagaggagctttgatgtccgagaggtcattgctagaatcgtggatggaagcagattcactgagttcaaagccttttatggagacacattagttacagtataaaggtgaagaattgaaaatacgaacattttctgctgctttgaaaatcaggaatctcttgtttcaagactttgatacacttgacatgggctttgttgttgagagcactacaaatgtgtgagccacttttaaaaggaactgctttataaacataatttgtagcttaatggcttcatggatccaaatagtttaaaatgttaatagctagatgctgtggtgtgggtccctatctgtgactttgtgacattagttgtataaaaaggttcttatagtaaaattagtagaaaataaaattgtagt

SEQ ID NO: 350436 - DNA, 1367 bp, Homo sapiens
acaggcctgagaatcagagaagccttctctggggctgcaaggacctgagctcagcttccgccccagccagggaagcggcaggggaaagcaccggctccaggccagcgtgggccgctctctcgctcggtgcccgccgccatgtgggccgtcctgaggttagccctgcggccgtgtgcccgcgcctctcccgccgggccgcgcgcctatcacggggactcggtggcctcgctgggcacccagccggacttgggctctgccctctaccaggagaactacaagcagatgaaagcactagtaaatcagctccatgaacgagtggagcatataaaactaggaggtggtgagaaagcccgagcacttcacatatcaagaggaaaactattgcccagagaaagaattgacaatctcatagacccagggtctccatttctggaattatcccagtttgcaggttaccagttatatgacaatgaggaggtgccaggaggtggcattattacaggcattggaagagtatcaggagtagaatgcatgattattgccaatgatgccaccgtcaaaggaggtgcctactacccagtgactgtgaaaaaacaattacgggcccaagaaattgccatgcaaaacaggctcccctgcatctacttagttgattcgggaggagcatacttacctcgacaagcagatgtgtttccagatcgagaccactttggccgtacattctataatcaggcaattatgtcttctaaaaatattgcacagatcgcagtggtcatgggctcctgcaccgcaggaggagcctatgtgcctgccatggctgatgaaaacatcattgtacgcaagcagggtaccattttcttggcaggaccccccttggttaaagcggcaactggggaagaagtatctgctgaggatcttggaggtgctgatcttcattgcagaaagtctggagtaagtgaccactgggctttggatgatcatcatgcccttcacttaactaggaaggttgtgaggaatctaaattatcagaagaaattggatgtcaccattgaaccttctgaagagcctttatttcctgctgatgaattgtatggaatagttggtgctaaccttaagaggagctttgatgtccgagaggtcattgctagaatcgtggatggaagcagattcactgagttcaaagccttttatggagacacattagttacaggatttgctcgaatatttgggtacccagtaggtatcgttggaaacaacggagttctcttttctgaatctgcaaaaaaggtactcactttgtccgttatgctgccaagaaattcctctgctgttcctcaaacatacgctgaatttgaagggaccggcca

SEQ ID NO: 350437 - DNA, 2117 bp, Homo sapiens
acaggcctgagaatcagagaagccttctctggggctgcaaggacctgagctcagcttccgccccagccagggaagcggcaggggaaagcaccggctccaggccagcgtgggccgctctctcgctcggtgcccgccgccatgtgggccgtcctgaggttagccctgcggccgtgtgcccgcgcctctcccgccgggccgcgcgcctatcacggggactcggtggcctcgctgggcacccagccggacttgggctctgccctctaccaggagaactacaagcagatgaaagcactagtaaatcagctccatgaacgagtggagcatataaaactaggaggtggtgagaaagcccgagcacttcacatatcaagaggaaaactattgcccagagaaagaattgacaatctcatagacccagggtctccatttctggaattatcccagtttgcaggttaccagttatatgacaatgaggaggtgccaggaggtggcattattacaggcattggaagagtatcaggagtagaatgcatgattattgccaatgatgccaccgtcaaaggaggtgcctactacccagtgactgtgaaaaaacaattacgggcccaagaaattgccatgcaaaacaggctcccctgcatctacttagttgattcgggaggagcatacttacctcgacaagcagatgtgtttccagatcgagaccactttggccgtacattctataatcaggcaattatgtcttctaaaaatattgcacaggttaaagcggcaactggggaagaagtatctgctgaggatcttggaggtgctgatcttcattgcagaaagtctggagtaagtgaccactgggctttggatgatcatcatgcccttcacttaactaggaaggttgtgaggaatctaaattatcagaagaaattggatgtcaccattgaaccttctgaagagcctttatttcctgctgatgaattgtatggaatagttggtgctaaccttaagaggagctttgatgtccgagaggtcattgctagaatcgtggatggaagcagattcactgagttcaaagccttttatggagacacattagttacagcccttggaaaagcacaagacataaatcttctttgaactttcttttgaggatttgctcgaatatttgggtacccagtaggtatcgttggaaacaacggagttctcttttctgaatctgcaaaaaagggtactcactttgtccagttatgctgccaaagaaatattcctctgctgttccttcaaaacattactggatttatggttggtagagagtatgaagctgaaggaattgccaaggatggtgccaagatggtggccgctgtggcctgtgcccaagtgcctaagataaccctcatcattgggggctcctatggagccggaaactatgggatgtgtggcagagcgtatagcccaagatttctctacatttggccaaatgctcgtatctcagtgatgggaggagagcaggcagccaatgtgttggccacgataacaaaggaccaaagagcccgggaaggaaagcagttctccagtgctgatgaagcggctttaaaagagcccatcattaagaagtttgaagaggaaggaaacccttactattccagcgcaagggtatgggatgatgggatcattgatccagcagacaccagactggtcttgggtctcagttttagtgcagccctcaacgcaccaatagagaagactgacttcggtatcttcaggatgtaactggaataaaggatgttttctgttggacatgtactgaaaattaacacatgtagtagccttaaaattttagacttctcgaacatgaggctgttacagtaatttttttaacactgtgcattgtacttttctaccttaaaaaaatcagtgaggatatttatttaatgaacatcaattccttttaaattttcttagagaaatttctctgtggctcagttttaccacccataaagcggagacagtaatttatggttatcctttctgacccacaaagtatgaaaagttctgtaatctgtaaactcagttctgtaatctgtattattgagatgattaatataaagttgtattttcactga

SEQ ID NO: 350438 - DNA, 4281 bp, Homo sapiens
acaggcctgagaatcagagaagccttctctggggctgcaaggacctgagctcagcttccgccccagccagggaagcggcaggggaaagcaccggctccaggccagcgtgggccgctctctcgctcggtgcccgccgccatgtgggccgtcctgaggttagccctgcggccgtgtgcccgcgcctctcccgccgggccgcgcgcctatcacggggactcggtggcctcgctgggcacccagccggacttgggctctgccctctaccaggagaactacaagcagatgaaagcactagtaaatcagctccatgaacgagtggagcatataaaactaggaggtggtgagaaagcccgagcacttcacatatcaagaggaaaactattgcccagagaaagaattgacaatctcatagacccagggtctccatttctggaattatcccagtttgcaggttaccagttatatgacaatgaggaggtgccaggaggtggcattattacaggcattggaagagtatcaggagtagaatgcatgattattgccaatgatgccaccgtcaaaggaggtgcctactacccagtgactgtgaaaaaacaattacgggcccaagaaattgccatgcaaaacaggctcccctgcatctacttagttgattcgggaggagcatacttacctcgacaagcagatgtgtttccagatcgagaccactttggccgtacattctataatcaggcaattatgtcttctaaaaatattgcacagatcgcagtggtcatgggctcctgcaccgcaggaggagcctatgtgcctgccatggctgatgaaaacatcattgtacgcaagcagggtaccattttcttggcaggaccccccttggttaaagcggcaactggggaagaagtatctgctgaggatcttggaggtgctgatcttcattgcagaaagtctggagtaagtgaccactgggctttggatgatcatcatgcccttcacttaactaggaaggttgtgaggaatctaaattatcagaagaaattggatgtcaccattgaaccttctgaagagcctttatttcctgctgatgaattgtatggaatagttggtgctaaccttaagaggagctttgatgtccgagaggtcattgctagaatcgtggatggaagcagattcactgagttcaaagccttttatggagacacattagttacaggatttgctcgaatatttgggtacccagtaggtatcgttggaaacaacggagttctcttttctgaatctgcaaaaaagggtactcactttgtccagttatgctgccaaagaaatattcctctgctgttccttcaaaacattactggatttatggttggtagagagtatgaagctgaaggaattgccaaggatggtgccaagatggtggccgctgtggcctgtgcccaagtgcctaagataaccctcatcattgggggctcctatggagccggaaactatgggatgtgtggcagagcgtatagcccaagatttctctacatttggccaaatgctcgtatctcagtgatgggaggagagcaggcagccaatgtgttggccacgataacaaaggaccaaagagcccgggaaggaaagcagttctccagtgctgatgaagcggctttaaaagagcccatcattaagaagtttgaagaggaaggaaacccttactattccagcgcaagggtatgggatgatgggatcattgatccagcagacaccagactggtcttgggtctcagttttagtgcagccctcaacgcaccaatagagaagactgacttcggtatcttcaggatgtaactggaataaaggatgttttctgttggacatgtactgaaaattaacacatgtagtagccttaaaattttagacttctcgaacatgaggctgttacagtaatttttttaacactgtgcattgtacttttctaccttaaaaaaatcagtgaggatatttatttaatgaacatcaattccttttaaattttcttagagaaatttctctgtggctcagttttaccacccataaagcggagacagtaatttatggttatcctttctgacccacaaagtatgaaaagttctgtaatctgtaaactcagttctgtaatctgtattattgagatgattaatataaagttgtattttcactgaaatgattgttttgctggttatgcttggtgatattttagcgggcttatttttgaaaggcatctgttacttcagtggcataaagtgccctcacactgctgtgcagccatcaccaccattcatctccagaatttgttctcagtcccaaactgaaactataccattcaaacaacagcgctccccatttccccctcccccgagcccatgacatctccttattattattttttttttgagacagggtgtttctctgttgcccaggctggagtgcggtggtgtgatctcggctcactgcagcttccacctcccgggttcaagcgattcttgtgcctcagcctcccaagcagctgggactataggcacgcaccaccacacccagctaagttctgtatttttagcagagacgggatttcactaggttgcccaggctggtctcaaactactgacctcaagtgatccacccgcctcggcctcccaaagtgctgggattacaggtgtgagccaccgcgcctgaccacatctccttattcttaaatgtatgtgtttctcatggtttgatttattcttgctgggccatttcagcccctgtcatggcttcactcgccatctaaatgcagatgattactgccttgacggttcttaacccagctctcccctgagctgcaggcctgcatatccagtaggtctactggacatctgtactggttgttgtggaggaacctctggcttgctcattaagtcctactgattttcactatcccctgaatttccccacttatttttgtctttcactatcgcaggccttagaagaggtctacctgcctccagtcttacctagtccagtctaccccctggagttagaatggccatcctgaagtgaaaagtaatgtcacattactcccttcagtgatttcttgtagaagtgccaatccctgaatgccaccaagatcttaatcttcacatctttaatcttatctctttgactcctctttacaccggagaacggctccagctgttctagctctctttcagttctttgaaccttcccaccttagggtctataaggttccctctgcccaaattgttctactctcccttcttcttcaacacatccttcagtttaagcacttgcttctctcagtttaaactccacttccttagggatgtctctgtgacctccctgtgctggattagcttccctactctatgctcttgtaaaacactatctacttcctttgtcataaactcatcattttcctataaacattaatattgtcctcctgctagaatgtaagctccgtgagagcaaggatcctcctgtttaccctgtacctccaatgtctggcacttgtaggtgctcaaatattcgttgaatgaatgaaaaatccatattgtaattgatgtcctctggccacatagttttaaaattaggtgattgattatatgaccgaatagaactatcaaatgttttcctaataaagtcaatatttcaaacaaaaaaaaaaaaaaaaaaaaaaaaaaaaaaaaaaaaaaaaaaaaaaaaaaaaaaaaaaaaaaaaaaaaaaaaaaaaaaaaaaaaacaaaagaaacgaagaacaaaaaaaaaaaaaaaaaaagcaaagaaaaagaagggggggggcggcgatgaattaatctatacggcaccgagagaaggagacaaagaatccaacccgaacacccagctataaagaagaaagagagcgcgacaccaatggagagggaagtaaaatataaggaggcagagagagcgcgactgataaaacaacaccgcacagcatgaagggcaaaacaaacacgcgagatagacgaagtaaaaggaagaagaaaacacaaacaccacaaccagcttgggagcgtgccaattacaagaagaagagaacaacacaccacacctacaacagaaagaacacgaccaccaaagtcagagaaacaacaaagaaccaaacggcagacgcctacggacgggagcgaacagcacacaagactagtagacgccaggacgagagagacaaacatcaccgccaccacacagaacaagaagaaaacacaacacaaacgggcacaagacataaaacaccgt

SEQ ID NO: 350439 - DNA, 3345 bp, Homo sapiens
acaggcctgagaatcagagaagccttctctggggctgcaaggacctgagctcagcttccgccccagccagggaagcggcaggggaaagcaccggctccaggccagcgtgggccgctctctcgctcggtgcccgccgccatgtgggccgtcctgaggttagccctgcggccgtgtgcccgcgcctctcccgccgggccgcgcgcctatcacggggactcggtggcctcgctgggcacccagccggacttgggctctgccctctaccaggagaactacaagcagatgaaagcactagtaaatcagctccatgaacgagtggagcatataaaactaggaggtggtgagaaagcccgagcacttcacatatcaagaggaaaactattgcccagagaaagaattgacaatctcatagacccagggtctccatttctggaattatcccagtttgcaggttaccagttatatgacaatgaggaggtgccaggaggtggcattattacaggcattggaagagtatcaggagtagaatgcatgattattgccaatgatgccaccgtcaaaggaggtgcctactacccagtgactgtgaaaaaacaattacgggcccaagaaattgccatgcaaaacaggctcccctgcatctacttagttgattcgggaggagcatacttacctcgacaagcagatgtgtttccagatcgagaccactttggccgtacattctataatcaggcaattatgtcttctaaaaatattgcacagatcgcagtggtcatgggctcctgcaccgcaggaggagcctatgtgcctgccatggctgatgaaaacatcattgtacgcaagcagggtaccattttcttggcaggaccccccttggttaaagcggcaactggggaagaagtatctgctgaggatcttggaggtgctgatcttcattgcagaaagtctggagtaagtgaccactgggctttggatgatcatcatgcccttcacttaactaggaaggttgtgaggaatctaaattatcagaagaaattggatgtcaccattgaaccttctgaagagcctttatttcctgctgatgaattgtatggaatagttggtgctaaccttaagaggagctttgatgtccgagaggtcattgctagaatcgtggatggaagcagattcactgagttcaaagccttttatggagacacattagttacaggatttgctcgaatatttgggtacccagtaggtatcgttggaaacaacggagttctcttttctgaatctgcaaaaaagggtactcactttgtccagttatgctgccaaagaaatattcctctgctgttccttcaaaacattactggatttatggttggtagagagtatgaagctgaaggaattgccaaggatggtgccaagatggtggccgctgtggcctgtgcccaagtgcctaagataaccctcatcattgggggctcctatggagccggaaactatgggatgtgtggcagagcgtatagcccaagatttctctacatttggccaaatgctcgtatctcagtgatgggaggagagcaggcagccaatgtgttggccacgataacaaaggaccaaagagcccgggaaggaaagcagttctccagtgctgatgaagcggctttaaaagagcccatcattaagaagtttgaagaggaaggaaacccttactattccagcgcaagggtatgggatgatgggatcattgatccagcagacaccagactggtcttgggtctcagttttagtgcagccctcaacgcaccaatagagaagactgacttcggtatcttcaggatgtaactggaataaaggatgttttctgttggacatgtactgaaaattaacacatgtagtagccttaaaattttagacttctcgaacatgaggctgttacagtaatttttttaacactgtgcattgtacttttctaccttaaaaaaatcagtgaggatatttatttaatgaacatcaattccttttaaattttcttagagaaatttctctgtggctcagttttaccacccataaagcggagacagtaatttatggttatcctttctgacccacaaagtatgaaaagttctgtaatctgtaaactcagttctgtaatctgtattattgagatgattaatataaagttgtattttcactgaaatgattgttttgctggttatgcttggtgatattttagcgggcttatttttgaaaggcatctgttacttcagtggcataaagtgccctcacactgctgtgcagccatcaccaccattcatctccagaatttgttctcagtcccaaactgaaactataccattcaaacaacagcgctccccatttccccctcccccgagcccatgacatctccttattattattttttttttgagacagggtgtttctctgttgcccaggctggagtgcggtggtgtgatctcggctcactgcagcttccacctcccgggttcaagcgattcttgtgcctcagcctcccaagcagctgggactataggcacgcaccaccacacccagctaagttctgtatttttagcagagacgggatttcactaggttgcccaggctggtctcaaactactgacctcaagtgatccacccgcctcggcctcccaaagtgctgggattacaggtgtgagccaccgcgcctgaccacatctccttattcttaaatgtatgtgtttctcatggtttgatttattcttgctgggccatttcagcccctgtcatggcttcactcgccatctaaatgcagatgattactgccttgacggttcttaacccagctctcccctgagctgcaggcctgcatatccagtaggtctactggacatctgtactggttgttgtggaggaacctctggcttgctcattaagtcctactgattttcactatcccctgaatttccccacttatttttgtctttcactatcgcaggccttagaagaggtctacctgcctccagtcttacctagtccagtctaccccctggagttagaatggccatcctgaagtgaaaagtaatgtcacattactcccttcagtgatttcttgtagaagtgccaatccctgaatgccaccaagatcttaatcttcacatctttaatcttatctctttgactcctctttacaccggagaacggctccagctgttctagctctctttcagttctttgaaccttcccaccttagggtctataaggttccctctgcccaaattgttctactctcccttctacctcactgtgtacccccctagcctagcctccctataccttgtggccattccccgccgggtatcc

SEQ ID NO: 350440 - DNA, 3383 bp, Homo sapiens
gagttaaggttcaaacgtggcaaagcaagcctccaccagcagaggtggtgagaaagcccgagcacttcacatatcaagaggaaaactattgcccagagaaagaattgacaatctcatagacccagggtctccatttctggaattatcccagtttgcaggttaccagttatatgacaatgaggaggtgccaggaggtggcattattacaggcattggaagagtatcaggagtagaatgcatgattattgccaatgatgccaccgtcaaaggaggtgcctactacccagtgactgtgaaaaaacaattacgggcccaagaaattgccatgcaaaacaggctcccctgcatctacttagttgattcgggaggagcatacttacctcgacaagcagatgtgtttccagatcgagaccactttggccgtacattctataatcaggcaattatgtcttctaaaaatattgcacagatcgcagtggtcatgggctcctgcaccgcaggaggagcctatgtgcctgccatggctgatgaaaacatcattgtacgcaagcagggtaccattttcttggcaggaccccccttggttaaagcggcaactggggaagaagtatctgctgaggatcttggaggtgctgatcttcattgcagaaagtctggagtaagtgaccactgggctttggatgatcatcatgcccttcacttaactaggaaggttgtgaggaatctaaattatcagaagaaattggatgtcaccattgaaccttctgaagagcctttatttcctgctgatgaattgtatggaatagttggtgctaaccttaagaggagctttgatgtccgagaggtcattgctagaatcgtggatggaagcagattcactgagttcaaagccttttatggagacacattagttacaggatttgctcgaatatttgggtacccagtaggtatcgttggaaacaacggagttctcttttctgaatctgcaaaaaagggtactcactttgtccagttatgctgccaaagaaatattcctctgctgttccttcaaaacattactggatttatggttggtagagagtatgaagctgaaggaattgccaaggatggtgccaagatggtggccgctgtggcctgtgcccaagtgcctaagataaccctcatcattgggggctcctatggagccggaaactatgggatgtgtggcagagcgtatagcccaagatttctctacatttggccaaatgctcgtatctcagtgatgggaggagagcaggcagccaatgtgttggccacgataacaaaggaccaaagagcccgggaaggaaagcagttctccagtgctgatgaagcggctttaaaagagcccatcattaagaagtttgaagaggaaggaaacccttactattccagcgcaagggtatgggatgatgggatcattgatccagcagacaccagactggtcttgggtctcagttttagtgcagccctcaacgcaccaatagagaagactgacttcggtatcttcaggatgtaactggaataaaggatgttttctgttggacatgtactgaaaattaacacatgtagtagccttaaaattttagacttctcgaacatgaggctgttacagtaatttttttaacactgtgcattgtacttttctaccttaaaaaaatcagtgaggatatttatttaatgaacatcaattccttttaaattttcttagagaaatttctctgtggctcagttttaccacccataaagcggagacagtaatttatggttatcctttctgacccacaaagtatgaaaagttctgtaatctgtaaactcagttctgtaatctgtattattgagatgattaatataaagttgtattttcactgaaatgattgttttgctggttatgcttggtgatattttagcgggcttatttttgaaaggcatctgttacttcagtggcataaagtgccctcacactgctgtgcagccatcaccaccattcatctccagaatttgttctcagtcccaaactgaaactataccattcaaacaacagcgctccccatttccccctcccccgagcccatgacatctccttattattattttttttttgagacagggtgtttctctgttgcccaggctggagtgcggtggtgtgatctcggctcactgcagcttccacctcccgggttcaagcgattcttgtgcctcagcctcccaagcagctgggactataggcacgcaccaccacacccagctaagttctgtatttttagcagagacgggatttcactaggttgcccaggctggtctcaaactactgacctcaagtgatccacccgcctcggcctcccaaagtgctgggattacaggtgtgagccaccgcgcctgaccacatctccttattcttaaatgtatgtgtttctcatggtttgatttattcttgctgggccatttcagcccctgtcatggcttcactcgccatctaaatgcagatgattactgccttgacggttcttaacccagctctcccctgagctgcaggcctgcatatccagtaggtctactggacatctgtactggttgttgtggaggaacctctggcttgctcattaagtcctactgattttcactatcccctgaatttccccacttatttttgtctttcactatcgcaggccttagaagaggtctacctgcctccagtcttacctagtccagtctaccccctggagttagaatggccatcctgaagtgaaaagtaatgtcacattactcccttcagtgatttcttgtagaagtgccaatccctgaatgccaccaagatcttaatcttcacatctttaatcttatctctttgactcctctttacaccggagaacggctccagctgttctagctctctttcagttctttgaaccttcccaccttagggtctataaggttccctctgcccaaattgttctactctcccttcttcttcaacacatccttcagtttaagcacttgcttctctcagtttaaactccacttccttagggatgtctctgtgacctccctgtgctggattagcttccctactctatgctcttgtaaaacactatctacttcctttgtcataaactcatcattttcctataaacattaatattgtcctcctgctagaatgtaagctccgtgagagcaaggatcctcctgtttaccctgtacctccaatgtctggcacttgtaggtgctcaaatattcgttgaatgaatgaaaaatccatattgtaattgatgtcctctggccacatagttttaaaattaggtgattgattatatgaccgaatagaactatcaaatgttttcctaataaagtcaatatttcaaaca

SEQ ID NO: 350441 - DNA, 2881 bp, Homo sapiens
acaggcctgagaatcagagaagccttctctggggctgcaaggacctgagctcagcttccgccccagccagggaagcggcaggggaaagcaccggctccaggccagcgtgggccgctctctcgctcggtgcccgccgccatgtgggccgtcctgaggttagccctgcggccgtgtgcccgcgcctctcccgccgggccgcgcgcctatcacggggactcggtggcctcgctgggcacccagccggacttgggctctgccctctaccaggagaactacaagcagatgaaagcactagtaaatcagctccatgaacgagtggagcatataaaactaggaggtggtgagaaagcccgagcacttcacatatcaagaggaaaactattgcccagagaaagaattgacaatctcatagacccagggtctccatttctggaattatcccagtttgcaggttaccagttatatgacaatgaggaggtgccaggaggtggcattattacaggcattggaagagtatcaggagtagaatgcatgattattgccaatgatgccaccgtcaaaggaggtgcctactacccagtgactgtgaaaaaacaattacgggcccaagaaattgccatgcaaaacaggctcccctgcatctacttagttgattcgggaggagcatacttacctcgacaagcagatgtgtttccagatcgagaccactttggccgtacattctataatcaggcaattatgtcttctaaaaatattgcacagatcgcagtggtcatgggctcctgcaccgcaggaggagcctatgtgcctgccatggctgatgaaaacatcattgtacgcaagcagggtaccattttcttggcaggaccccccttggttaaagcggcaactggggaagaagtatctgctgaggatcttggaggtgctgatcttcattgcagaaagtctggagtaagtgaccactgggctttggatgatcatcatgcccttcacttaactaggaaggttgtgaggaatctaaattatcagaagaaattggatgtcaccattgaaccttctgaagagcctttatttcctgctgatgaattgtatggaatagttggtgctaaccttaagaggagctttgatgtccgagaggtcattgctagaatcgtggatggaagcagattcactgagttcaaagccttttatggagacacattagttacaggatttgctcgaatatttgggtacccagtaggtatcgttggaaacaacggagttctcttttctgaatctgcaaaaaagggtactcactttgtccagttatgctgccaaagaaatattcctctgctgttccttcaaaacattactggatttatggttggtagagagtatgaagctgaaggaattgccaaggatggtgccaagatggtggccgctgtggcctgtgcccaagtgcctaagataaccctcatcattgggggctcctatggagccggaaactatgggatgtgtggcagagcgtatagcccaagatttctctacatttggccaaatgctcgtatctcagtgatgggaggagagcaggcagccaatgtgttggccacgataacaaaggaccaaagagcccgggaaggaaagcagttctccagtgctgatgaagcggctttaaaagagcccatcattaagaagtttgaagaggaaggaaacccttactattccagcgcaagggtatgggatgatgggatcattgatccagcagacaccagactggtcttgggtctcagttttagtgcagccctcaacgcaccaatagagaagactgacttcggtatcttcaggatgtaactggaataaaggatgttttctgttggacatgtactgaaaattaacacatgtagtagccttaaaattttagacttctcgaacatgaggctgttacagtaatttttttaacactgtgcattgtacttttctaccttaaaaaaatcagtgaggatatttatttaatgaacatcaattccttttaaattttcttagagaaatttctctgtggctcagttattaatattgtcctcctgctagaatgtaagctccgtgagagcaaggatcctcctgtttaccctgtacctccaatgtctggcacttgtaggtgctcaaatattcgttgaatgaatgaaaaatccatattgtaattgatgtcctctggccacatagttttaaaattaggtgattgattatatgaccgaatagaactatcaaatgttttcctaataaagtcaatatttcaaacaaaaaaaaaaaaaaaaaaaaaaaaaaaaaaaaaaaaaaaaaaaaaaaaaaaaaaaaaaaaaaaaaaaaaaaaaaaaaaaaaaaaacaaaagaaacgaagaacaaaaaaaaaaaaaaaaaaagcaaagaaaaagaagggggggggcggcgatgaattaatctatacggcaccgagagaaggagacaaagaatccaacccgaacacccagctataaagaagaaagagagcgcgacaccaatggagagggaagtaaaatataaggaggcagagagagcgcgactgataaaacaacaccgcacagcatgaagggcaaaacaaacacgcgagatagacgaagtaaaaggaagaagaaaacacaaacaccacaaccagcttgggagcgtgccaattacaagaagaagagaacaacacaccacacctacaacagaaagaacacgaccaccaaagtcagagaaacaacaaagaaccaaacggcagacgcctacggacgggagcgaacagcacacaagactagtagacgccaggacgagagagacaaacatcaccgccaccacacagaacaagaagaaaacacaacacaaacgggcacaagacataaaacaccgt

SEQ ID NO: 350442 - DNA, 1813 bp, Homo sapiens
acaggcctgagaatcagagaagccttctctggggctgcaaggacctgagctcagcttccgccccagccagggaagcggcaggggaaagcaccggctccaggccagcgtgggccgctctctcgctcggtgcccgccgccatgtgggccgtcctgaggttagccctgcggccgtgtgcccgcgcctctcccgccgggccgcgcgcctatcacggggactcggtggcctcgctgggcacccagccggacttgggctctgccctctaccaggagaactacaagcagatgaaagcactagtaaatcagctccatgaacgagtggagcatataaaactaggaggtggtgagaaagcccgagcacttcacatatcaagaggaaaactattgcccagagaaagaattgacaatctcatagacccagggtctccatttctggaattatcccagtttgcaggttaccagttatatgacaatgaggaggtgccaggaggtggcattattacaggcattggaagagtatcaggagtagaatgcatgattattgccaatgatgccaccgtcaaaggaggtgcctactacccagtgactgtgaaaaaacaattacgggcccaagaaattgccatgcaaaacaggctcccctgcatctacttagttgattcgggaggagcatacttacctcgacaagcagatgtgtttccagatcgagaccactttggccgtacattctataatcaggcaattatgtcttctaaaaatattgcacagatcgcagtggtcatgggctcctgcaccgcaggaggagcctatgtgcctgccatggctgatgaaaacatcattgtacgcaagcagggtaccattttcttggcaggaccccccttggttaaagcggcaactggggaagaagtatctgctgaggatcttggaggtgctgatcttcattgcagaaagtctggagtaagtgaccactgggctttggatgatcatcatgcccttcacttaactaggaaggttgtgaggaatctaaattatcagaagaaattggatgtcaccattgaaccttctgaagagcctttatttcctgctgatgaattgtatggaatagttggtgctaaccttaagaggagctttgatgtccgagaggtcattgctagaatcgtggatggaagcagattcactgagttcaaagccttttatggagacacattagttacaggatttgctcgaatatttgggtacccagtaggtatcgttggaaacaacggagttctcttttctgaatctgcaaaaaagggtactcactttgtccagttatgctgccaaagaaatattcctctgctgttccttcaaaacattactggatttatggttggtagagagtatgaagctgaaggaattgccaaggatggtgccaagatggtggccgctgtggcctgtgcccaagtgcctaagataaccctcatcattgggggctcctatggagccggaaactatgggatgtgtggcagagcgtatagcttccctactctatgctcttgtaaaacactatctacttcctttgtcataaactcatcattttcctataaacattaatattgtcctcctgctagaatgtaagctccgtgagagcaaggatcctcctgtttaccctgtacctccaatgtctggcacttgtaggtgctcaaatattcgttgaatgaatgaaaaatccatattgtaattgatgtcctctggccacatagttttaaaattaggtgattgattatatgaccgaatagaactatcaaatgttttcctaataaagtcaatatttcaaaca

SEQ ID NO: 350443 - DNA, 288 bp, Homo sapiens
tatctgttttgtattttattttcttggctggagtttccaaaaacaacagggtgtttgtcagttattggttagaaaaacaagtaattgagtttcttgtttggatttcatgcaaccacataagcttattaaaagacaattcaccatggcatttccatatatcttgtattagttcttgttctggactatcgtcccaaggttgtttaatagcagatagccttgaaatatagcaatagtgtttccttctggggcagagaatagatttatttgatcaggataataaagataagg

SEQ ID NO: 350444 - DNA, 945 bp, Homo sapiens
gtgcgggtcagcgacgactcgtgtaagacacaatgtcatgcgttactttcgcactctgggaacttatagaaatgctggcaatttcaagaaaccaaaagttgttacaggctggagaggaaaaccaggtcctggagttgttaattcaccgagatggggaatttcaagaactaatgaaattggcacttaatcagggaaaaattcatcatgaaatgcaagttttagaaaaagaagtagagaagagagacagtgatattcagcagctacaaaaacagctaaaggaagcagaacaaatactggcaacagctgtttaccaagcgaaggagaaactcaagtcaatagaaaaagcaagaaaaggtgctatctcctctgaagaaataattaagtatgcacataggatcagtgcaagtaatgctgtatgtgctccactgacctgggttccaggggacccccggagaccctacccaactgatttagagatgagaagtgggttactgggtcagatgaacaatccttccactaatggcgtgaatggccatttaccaggagatgcacttgcagcaggaagattgccagatgtccttgctccacagtatccatggcagtcaaatgacatgtcgatgaatatgttaccaccaaatcatagtagtgactttttgttggaacctcctgggcataataaagaaaatgaagatgatgtagagattatgtcaacggactcctcaagcagtagtagtgagtctgattgaaaaaccttaaaagacaatatacagaattgaatactgtagaattctgtttctttaacagtagcagggaaatgtaaactacaggtgacaaaaaattggttgggaattggccgcactcaagcacaatttgggtttcttagccaacatcgtttgttagccacgaaataggaggccatttgggaaacggtcggttacctggcag

SEQ ID NO: 350445 - DNA, 747 bp, Homo sapiens
cgccacgcacctgcgtcagctcgctctgcgcgtgcgccggtggcgggactctggggaaaatggctgcgtcttcgagtggtgagaaggagaaggagcggctgggaggcggtttgggagtggcgggtggtaacagcacacgagagcggctgctgtctgcgcttgaggacttggaggtcctgtctagggaacttatagaaatgctggcaatttcaagaaaccaaaagttgttacaggctggagaggaaaaccaggtcctggagttgttaattcaccgagatggggaatttcaagaactaatgaaattggcacttaatcagggaaaaattcatcatgaaatgcaagttttagaaaaagaagtagagaagagagacagtgatattcagcagctacaaaaacagctaaaggaagcagaacaaatactggcaacagctgtttaccaagcgaaggagaaactcaagtcaatagaaaaagcaagaaaagaaaaaaaaaaaaaaaaaaaaaaacttggggggggcttgggccttgggaaagtttttgggaaccatgggttgggggagggggcccagagggtccagggacccgggccaaagcggacccagagaaaccggggacaggacaaagggccggggtcctcaccattaaaaagggcgggggaacacgagggggtcgtgaaaatcccaggggaccggagggcaaacgggctcttcaccgggaccaggagcgcgatatgggcgccgggggggagat

SEQ ID NO: 350446 - DNA, 1392 bp, Homo sapiens
cgccacgcacctgcgtcagctcgctctgcgcgtgcgccggtggcgggactctggggaaaatggctgcgtcttcgagtggcgggtggtaacagcacacgagagcggctgctgtctgcgcttgaggacttggaggtcctgtctagggaacttatagaaatgctggcaatttcaagaaaccaaaagttgttacaggctggagaggaaaaccaggtcctggagttgttaattcaccgagatggggaatttcaagaactaatgaaattggcacttaatcagggaaaaattcatcatgaaatgcaagttttagaaaaagaagtagagaagagagacagtgatattcagcagctacaaaaacagctaaaggaagcagaacaaatactggcaacagctgtttaccaagcgaaggagaaactcaagtcaatagaaaaagcaagaaaaggtgctatctcctctgaagaaataattaagtatgcacataggatcagtgcaagtaatgctgtatgtgctccactgacctgggttccaggggacccccggagaccctacccaactgatttagagatgagaagtgggttactgggtcagatgaacaatccttccactaatggcgtgaatggccatttaccaggagatgcacttgcagcaggaagattgccagatgtccttgctccacagtatccatggcagtcaaatgacatgtcgatgaatatgttaccaccaaatcatagtagtgactttttgttggaacctcctgggcataataaagaaaatgaagatgatgtagagattatgtcaacggactcctcaagcagtagtagtgagtctgattgaaaaaccttaaaagacaatatacagaattgaatactgtagaattctgtttctttaacagtagcagggaaatgtaaactacaggtgacaaaaaatacccaggtaaacactggctttggtagaattgtgcagtcattaaaagtcaaaattttttgactttctttttaaagccaaagaccatagttttagttttaagccactaggtagatatttaggggaatagtcaaaatttactgttgaaaaagcagttgctatgtgctttcttaccctgttctgttccagttttgctggatttgtacatagccattctagaaatagagttgagggaaattatccatatacatatcactaataggcttcttggaattatttagaaaagcatttttaaactggcagtggatgactgaataggcatcatatttctttttgtgtgtcatttaaaagtaacaaaaactgccatttgacagtaaaggctcttggcttctgttggaggcatgggaaattgtctcaatttgtacagtttgtaattgtaatttttgtaaataaatttgtttgtacattgta

SEQ ID NO: 350447 - DNA, 1309 bp, Homo sapiens
gaaggcccgggtggtgaccgagctgtgctgaatagatccagcatgtgcatgtgcgtgagtgtctttactggctcgtatcaaccaggagtcccaagcgatctcgatatccatgttacgccccgccagtgtcctggagttgttaattcaccgagatggggaatttcaagaactaatgaaattggcacttaatcagggaaaaattcatcatgaaatgcaagttttagaaaaagaagtagagaagagagacagtgatattcagcagctacaaaaacagctaaaggaagcagaacaaatactggcaacagctgtttaccaagcgaaggagaaactcaagtcaatagaaaaagcaagaaaaggtgctatctcctctgaagaaataattaagtatgcacataggatcagtgcaagtaatgctgtatgtgctccactgacctgggttccaggggacccccggagaccctacccaactgatttagagatgagaagtgggttactgggtcagatgaacaatccttccactaatggcgtgaatggccatttaccaggagatgcacttgcagcaggaagattgccagatgtccttgctccacagtatccatggcagtcaaatgacatgtcgatgaatatgttaccaccaaatcatagtagtgactttttgttggaacctcctgggcataataaagaaaatgaagatgatgtagagattatgtcaacggactcctcaagcagtagtagtgagtctgattgaaaaaccttaaaagacaatatacagaattgaatactgtagaattctgtttctttaacagtagcagggaaatgtaaactacaggtgacaaaaaatacccaggtaaacactggctttggtagaattgtgcagtcattaaaagtcaaaattttttgactttctttttaaagccaaagaccatagttttagttttaagccactaggtagatatttaggggaatagtcaaaatttactgttgaaaaagcagttgctatgtgctttcttaccctgttctgttccagttttgctggatttgtacatagccattctagaaatagagttgagggaaattatccatatacatatcactaataggcttcttggaattatttagaaaagcatttttaaactggcagtggatgactgaataggcatcatatttctttttgtgtgtcatttaaaagtaacaaaaactgccatttgacagtaaaggctcttggcttctgttggaggcatgggaaattgtctcaatttgtacagtttgtaattgtaatttttgtaaataaatttgtttgtacattgta

SEQ ID NO: 350448 - DNA, 1115 bp, Homo sapiens
gcctggctgtgcttatcttctatagagcgggacaggtgaatgggcttgtgctggctatggtcggtacagacaaagggaaacaccggttgtctccctattgtctggcaacagctgtttaccaagcgaaggagaaactcaagtcaatagaaaaagcaagaaaaggtgctatctcctctgaagaaataattaagtatgcacataggatcagtgcaagtaatgctgtatgtgctccactgacctgggttccaggggacccccggagaccctacccaactgatttagagatgagaagtgggttactgggtcagatgaacaatccttccactaatggcgtgaatggccatttaccaggagatgcacttgcagcaggaagattgccagatgtccttgctccacagtatccatggcagtcaaatgacatgtcgatgaatatgttaccaccaaatcatagtagtgactttttgttggaacctcctgggcataataaagaaaatgaagatgatgtagagattatgtcaacggactcctcaagcagtagtagtgagtctgattgaaaaaccttaaaagacaatatacagaattgaatactgtagaattctgtttctttaacagtagcagggaaatgtaaactacaggtgacaaaaaatacccaggtaaacactggctttggtagaattgtgcagtcattaaaagtcaaaattttttgactttctttttaaagccaaagaccatagttttagttttaagccactaggtagatatttaggggaatagtcaaaatttactgttgaaaaagcagttgctatgtgctttcttaccctgttctgttccagttttgctggatttgtacatagccattctagaaatagagttgagggaaattatccatatacatatcactaataggcttcttggaattatttagaaaagcatttttaaactggcagtggatgactgaataggcatcatatttctttttgtgtgtcatttaaaagtaacaaaaactgccatttgacagtaaaggctcttggcttctgttggaggcatgggaaattgtctcaatttgtacagtttgtaattgtaatttttgtaaataaatttgtttgtacattgta

SEQ ID NO: 350449 - DNA, 1108 bp, Homo sapiens
cgccacgcacctgcgtcagctcgctctgcgcgtgcgccggtggcgggactctggggaaaatggctgcgtcttcgagtggtgagaaggagaaggagcggctgggaggcggtttgggagtggcgggtggtaacagcacacgagagcggctgctgtctgcgcttgaggacttggaggtcctgtctagggaacttatagaaatgctggcaatttcaagaaaccaaaagttgttacaggctggagaggaaaaccaggtcctggagttgttaattcaccgagatggggaatttcaagaactaatgaaattggcacttaatcagggaaaaattcatcatgaaatgcaagttttagaaaaagaagtagagaagagagacagtgatattcagcagctacaaaaacagctaaaggaagcagaacaaatactggcaacagctgtttaccaagcgaaggagaaactcaagtcaatagaaaaagcaagaaaaggtgctatctcctctgaagaaataattaagtatgcacataggatcagtgcaagtaatgctgtatgtgctccactgacctgggttccaggggacccccggagaccctacccaactgatttagagatgagaagtgggttactgggtcagatgaacaatccttccactaatggcgtgaatggccatttaccaggagatgcacttgcagcaggaagattgccagatgtccttgctccacagtatccatggcagtcaaatgacatgtcgatgaatatgttaccaccaaatcatagtagtgactttttgttggaacctcctgggcataataaagaaaatgaagatgatgtagagattatgtcaacggactcctcaagcagtagtagtgagtctgattgaaaaaccttaaaagacaatatacagaattgaatactgtagaattctgtttctttaacagtagcagggaaatgtaaactacaggtgacaaaaaatacccaggtaaacactggctttggtagaattgtgcagtcattaaaagtcaaaattttttgactttctttttaaagccaaagaccatagttagtttaagcatagtgatatagggatgtcaattctgtgaagggtgtagtgtttac

SEQ ID NO: 350450 - DNA, 1238 bp, Homo sapiens
cgccacgcacctgcgtcagctcgctctgcgcgtgcgccggtggcgggactctggggaaaatggctgcgtcttcgagtggtgagaaggagaaggagcggctgggaggcggtttgggagtggcgggtggtaacagcacacgagagcggctgctgtctgcgcttgaggacttggaggtcctgtctagggaacttatagaaatgctggcaatttcaagaaaccaaaagttgttacaggctggagaggaaaaccaggtcctggagttgttaattcaccgagatggggaatttcaagaactaatgaaattggcacttaatcagggaaaaattcatcatgaaatgcaagttttagaaaaagaagtagagaagagagacagggacccccggagaccctacccaactgatttagagatgagaagtgggttactgggtcagatgaacaatccttccactaatggcgtgaatggccatttaccaggagatgcacttgcagcaggaagattgccagatgtccttgctccacagtatccatggcagtcaaatgacatgtcgatgaatatgttaccaccaaatcatagtagtgactttttgttggaacctcctgggcataataaagaaaatgaagatgatgtagagattatgtcaacggactcctcaagcagtagtagtgagtctgattgaaaaaccttaaaagacaatatacagaattgaatactgtagaattctgtttctttaacagtagcagggaaatgtaaactacaggtgacaaaaaatacccaggtaaacactggctttggtagaattgtgcagtcattaaaagtcaaaattttttgactttctttttaaagccaaagaccatagttttagttttaagccactaggtagatatttaggggaatagtcaaaatttactgttgaaaaagcagttgctatgtgctttcttaccctgttctgttccagttttgctggatttgtacatagccattctagaaatagagttgagggaaattatccatatacatatcactaataggcttcttggaattatttagaaaagcatttttaaactggcagtggatgactgaataggcatcatatttctttttgtgtgtcatttaaaagtaacaaaaactgccatttgacagtaaaggctcttggcttctgttggaggcatgggaaattgtctcaatttgtacagtttgtaattgtaatttttgtaaataaatttgtttgtacattgta

SEQ ID NO: 350451 - DNA, 1071 bp, Homo sapiens
cgccacgcacctgcgtcagctcgctctgcgcgtgcgccggtggcgggactctggggaaaatggctgcgtcttcgagtggtgagaaggagaaggagcggctgggaggcggtttgggagtggcgggtggtaacagcacacgagagcggctgctgtctgcgcttgaggacttggaggtcctgtctagggaacttatagaaatgctggcaatttcaagaaaccaaaagttgttacaggctggagaggaaaaccaggtcctggagttgttaattcaccgagatggggaatttcaagaactaatgaaattggcacttaatcagggaaaaattcatcatgaaatgcaagttttagaaaaagaagtagagaagagagacagtgatattcagcagctacaaaaacagctaaaggaagcagaacaaatactggcaacagctgtttaccaagcgaaggagaaactcaagtcaatagaaaaagcaagaaaaggtgctatctcctctgaagaaataattaagtatgcacataggatcagtgcaagtaatgctgtatgtgctccactgacctgggttccaggggacccccggagaccctacccaactgatttagagatgagaagtgggttactgggtcagatgaacaatccttccactaatggcgtgaatggccatttaccaggagatgcacttgcagcaggaagattgccagatgtccttgctccacagtatccatggcagtcaaatgacatgtcgatgaatatgttaccaccaaatcatagtagtgactttttgttggaacctcctgggcataataaagaaaatgaagatgatgtagagattatgtcaacggactcctcaagcagtagtagtgagtctgattgaaaaaccttaaaagacaatatacagaattgaatactgtagaattctgtttctttaacagtagcagggaaatgtaaactacaggtgacaaaaaattggttgggaattggccgcactcaagcacaatttgggtttcttagccaacatcgtttgttagccacgaaataggaggccatttgggaaacggtcggttacctggcag

SEQ ID NO: 350452 - DNA, 953 bp, Homo sapiens
ggtcaacgaccgtccgtgtaatatgacggctgtgttaggagtcaggtgagtgtaatgctatatgtgctccactgagctgggttccgtgggacccccggagaccctacccaactgatttagagatgagaagtgggttactgggtcagatgaacaatccttccactaatggcgtgaatggccatttaccaggagatgcacttgcagcaggaagattgccagatgtccttgctccacagtatccatggcagtcaaatgacatgtcgatgaatatgttaccaccaaatcatagtagtgactttttgttggaacctcctgggcataataaagaaaatgaagatgatgtagagattatgtcaacggactcctcaagcagtagtagtgagtctgattgaaaaaccttaaaagacaatatacagaattgaatactgtagaattctgtttctttaacagtagcagggaaatgtaaactacaggtgacaaaaaatacccaggtaaacactggctttggtagaattgtgcagtcattaaaagtcaaaattttttgactttctttttaaagccaaagaccatagttttagttttaagccactaggtagatatttaggggaatagtcaaaatttactgttgaaaaagcagttgctatgtgctttcttaccctgttctgttccagttttgctggatttgtacatagccattctagaaatagagttgagggaaattatccatatacatatcactaataggcttcttggaattatttagaaaagcatttttaaactggcagtggatgactgaataggcatcatatttctttttgtgtgtcatttaaaagtaacaaaaactgccatttgacagtaaaggctcttggcttctgttggaggcatgggaaattgtctcaatttgtacagtttgtaattgtaatttttgtaaataaatttgtttgtacattgta

SEQ ID NO: 350453 - DNA, 780 bp, Homo sapiens
tggtgagaaggagaaggagcggctgggaggcggtttgggagtggcgggtggtaacagcacacgagagcggctgctgtctgcgcttgaggacttggaggtcctgtctaggtaatgcggcgagcctgagagccgggctggagctgggccgggggactgaccccggagccggccggccctgcgtttgtgctcgttctcggggttcggcggggagggccagctcgggagtttcgggtgcatgagggtcatggacgtggggtccgcagccctctggcactctgggcggcggtttttcccgttagagggaattttagtaatgataagaactcgcgcggtctgagcctcttcgtccgcggccagccacttaacatttatggaacgctccttgggggctcagcattggggagacggtagtgaagggtagactggatgccagctgtcgagagagagacagatgtgtaaactggcttggggcctgtttttattagagggctgcgctgcggggtactggagcacagggactaggcaccttttttggttgtagtcagggcaggccctctgaagaaagtgctgcttgggaagcatgagctcgccaaactcactaggcagcacagatagatggaacagcaagtgcaaaaagcctggcttggtggagttgcaagttgtttaggatggttgtgtgtcagagataggagatgaaattagatgtcgttcttcatattctgtcacctttcatgataagtctttcaagttgaagccttccttgactccctcccattgact

SEQ ID NO: 350454 - DNA, 1433 bp, Homo sapiens
cgccacgcacctgcgtcagctcgctctgcgcgtgcgccggtggcgggactctggggaaaatggctgcgtcttcgagtggtgagaaggagaaggagcggctgggaggcggtttgggagtggcgggtggtaacagcacacgagagcggctgctgtctgcgcttgaggacttggaggtcctgtctagggaacttatagaaatgctggcaatttcaagaaaccaaaagttgttacaggctggagaggaaaaccaggtcctggagttgttaattcaccgagatggggaatttcaagaactaatgaaattggcacttaatcagggaaaaattcatcatgaaatgcaagttttagaaaaagaagtagagaagagagacagtgatattcagcagctacaaaaacagctaaaggaagcagaacaaatactggcaacagctgtttaccaagcgaaggagaaactcaagtcaatagaaaaagcaagaaaaggtgctatctcctctgaagaaataattaagtatgcacataggatcagtgcaagtaatgctgtatgtgctccactgacctgggttccaggggacccccggagaccctacccaactgatttagagatgagaagtgggttactgggtcagatgaacaatccttccactaatggcgtgaatggccatttaccaggagatgcacttgcagcaggaagattgccagatgtccttgctccacagtatccatggcagtcaaatgacatgtcgatgaatatgttaccaccaaatcatagtagtgactttttgttggaacctcctgggcataataaagaaaatgaagatgatgtagagattatgtcaacggactcctcaagcagtagtagtgagtctgattgaaaaaccttaaaagacaatatacagaattgaatactgtagaattctgtttctttaacagtagcagggaaatgtaaactacaggtgacaaaaaatacccaggtaaacactggctttggtagaattgtgcagtcattaaaagtcaaaattttttgactttctttttaaagccaaagaccatagttttagttttaagccactaggtagatatttaggggaatagtcaaaatttactgttgaaaaagcagttgctatgtgctttcttaccctgttctgttccagttttgctggatttgtacatagccattctagaaatagagttgagggaaattatccatatacatatcactaataggcttcttggaattatttagaaaagcatttttaaactggcagtggatgactgaataggcatcatatttctttttgtgtgtcatttaaaagtaacaaaaactgccatttgacagtaaaggctcttggcttctgttggaggcatgggaaattgtctcaatttgtacagtttgtaattgtaatttttgtaaataaatttgtttgtacattgta

SEQ ID NO: 350455 - DNA, 2239 bp, Homo sapiens
cgccacgcacctgcgtcagctcgctctgcgcgtgcgccggtggcgggactctggggaaaatggctgcgtcttcgagtggtgagaaggagaaggagcggctgggaggcggtttgggagtggcgggtggtaacagcacacgagagcggctgctgtctgcgcttgaggacttggaggtcctgtctagggaacttatagaaatgctggcaatttcaagaaaccaaaagttgttacaggctggagaggaaaaccaggtcctggagttgttaattcaccgagatggggaatttcaagaactaatgaaattggcacttaatcagggaaaaattcatcatgaaatgcaagttttagaaaaagaagtagagaagagagacagtgatattcagcagctacaaaaacagctaaaggaagcagaacaaatactggcaacagctgtttaccaagcgaaggagaaactcaagtcaatagaaaaagcaagaaaaggtgctatctcctctgaagaaataattaagtatgcacataggatcagtgcaagtaatgctgtatgtgctccactgacctgggttccaggggacccccggagaccctacccaactgatttagagatgagaagtgggttactgggtcagatgaacaatccttccactaatggcgtgaatggccatttaccaggagatgcacttgcagcaggaagattgccagatgtccttgctccacagtatccatggcagtcaaatgacatgtcgatgaatatgttaccaccaaatcatagtagtgactttttgttggaacctcctgggcataataaagaaaatgaagatgatgtagagattatgtcaacggactcctcaagcagtagtagtgagtctgattgaaaaaccttaaaagacaatatacagaattgaatactgtagaattctgtttctttaacagtagcagggaaatgtaaactacaggtgacaaaaaatacccaggtaaacactggctttggtagaattgtgcagtcattaaaagtcaaaattttttgactttctttttaaagccaaagaccatagttttagttttaagccactaggtagatatttaggggaatagtcaaaatttactgttgaaaaagcagttgctatgtgctttcttaccctgttctgttccagttttgctggatttgtacatagccattctagaaatagagttgagggaaattatccatatacatatcactaataggcttcttggaattatttagaaaagcatttttaaactggcagtggatgactgaataggcatcatatttctttttgtgtgtcatttaaaagtaacaaaaactgccatttgacagtaaaggctcttggcttctgttggaggcatgggaaattgtctcaatttgtacagtttgtaattgtaatttttgtaaataaatttgtttgtacattgtatgctttttttttagtttaaatatactgtcagtgtaggtaggaaattatttctgtaaatccagttgcattttataatacttgagtgactaactgaattgaaacctattacaattaatagggttctcaaaggcctattcctattagaagaaataattttttttaataattgaaaaaatttaccacagccttgtctgattttaagaatagattgtgtgaagatttagaatggaaagcaaccatttcttcccttcaccttcctcttcttacagttccccaggagtcatttttaaccacttttaatttctgttggtaacctctgtgtttaggtaatatgcttatacaactatttcttgatgtatcagttttagacaatgtatcttctgatttcaaaggtaatacaacatttaatgtgaaacatttagtgaatacagtaaaggagaaaataaaattgttagcattctacccagagataatatcaattcatattgtagtgtagatttttttaaagttcacatacacttttttgtaaaatgagaataatgtttatttcctgagatactgctgtattttttaattgctaatctgtattcttcaaatgaactgagaattccatttttccatcaaaaaaaaaaggggcgcgtttaaattccctacagggccaagttcggatacgatttttggtaaagggggccaaggggagattaaggagacagcggataaggggagggacaggatggttgtgagcacatttgggcaatccaaccaaatgcaggaaaataaggatgaaagcacgaagaagcacaata

SEQ ID NO: 350456 - DNA, 2338 bp, Homo sapiens
cgccacgcacctgcgtcagctcgctctgcgcgtgcgccggtggcgggactctggggaaaatggctgcgtcttcgagtggtgagaaggagaaggagcggctgggaggcggtttgggagtggcgggtggtaacagcacacgagagcggctgctgtctgcgcttgaggacttggaggtcctgtctagggaacttatagaaatgctggcaatttcaagaaaccaaaagttgttacaggctggagaggaaaaccaggtcctggagttgttaattcaccgagatggggaatttcaagaactaatgaaattggcacttaatcagggaaaaattcatcatgaaatgcaagttttagaaaaagaagtagagaagagagacagtgatattcagcagctacaaaaacagctaaaggaagcagaacaaatactggcaacagctgtttaccaagcgaaggagaaactcaagtcaatagaaaaagcaagaaaaggtgctatctcctctgaagaaataattaagtatgcacataggatcagtgcaagtaatgctgtatgtgctccactgacctgggttccaggggacccccggagaccctacccaactgatttagagatgagaagtgggttactgggtcagatgaacaatccttccactaatggcgtgaatggccatttaccaggagatgcacttgcagcaggaagattgccagatgtccttgctccacagtatccatggcagtcaaatgacatgtcgatgaatatgttaccaccaaatcatagtagtgactttttgttggaacctcctgggcataataaagaaaatgaagatgatgtagagattatgtcaacggactcctcaagcagtagtagtgagtctgattgaaaaaccttaaaagacaatatacagaattgaatactgtagaattctgtttctttaacagtagcagggaaatgtaaactacaggtgacaaaaaatacccaggtaaacactggctttggtagaattgtgcagtcattaaaagtcaaaattttttgactttctttttaaagccaaagaccatagttttagttttaagccactaggtagatatttaggggaatagtcaaaatttactgttgaaaaagcagttgctatgtgctttcttaccctgttctgttccagttttgctggatttgtacatagccattctagaaatagagttgagggaaattatccatatacatatcactaataggcttcttggaattatttagaaaagcatttttaaactggcagtggatgactgaataggcatcatatttctttttgtgtgtcatttaaaagtaacaaaaactgccatttgacagtaaaggctcttggcttctgttggaggcatgggaaattgtctcaatttgtacagtttgtaattgtaatttttgtaaataaatttgtttgtacattgtatgctttttttttagtttaaatatactgtcagtgtaggtaggaaattatttctgtaaatccagttgcattttataatacttgagtgactaactgaattgaaacctattacaattaatagggttctcaaaggcctattcctattagaagaaataattttttttaataattgaaaaaatttaccacagccttgtctgattttaagaatagattgtgtgaagatttagaatggaaagcaaccatttcttcccttcaccttcctcttcttacagttccccaggagtcatttttaaccacttttaatttctgttggtaacctctgtgtttaggtaatatgcttatacaactatttcttgatgtatcagttttagacaatgtatcttctgatttcaaaggtaatacaacatttaatgtgaaacatttagtgaatacagtaaaggagaaaataaaattgttagcattctacccagagataatatcaattcatattgtagtgtagatttttttaaagttcacatacacttttttgtaaaatgagaataatgtttatttcctgagatactgctgtattttttaattgctaatctgtattcttcaaatgaactgagaattccatttttccatcattttttccttttgattattttcgatctctagaaaaattggaaaataggagattaatcttatattttcaccatctagaattaaggacatacaatgtttgaatgtctttccctccagggttatttttaggaatggactaacacaatatctaattttaaccttgccttgtccgtatactaggaatattgatccatgtgtatacattcttgaaagatttactttaatggctaaaattttattgtggtatgtgccataatgtaactgcctgtttttatcaccaaatc

SEQ ID NO: 350457 - DNA, 1325 bp, Homo sapiens
cgccacgcacctgcgtcagctcgctctgcgcgtgcgccggtggcgggactctggggaaaatggctgcgtcttcgagggaacttatagaaatgctggcaatttcaagaaaccaaaagttgttacaggctggagaggaaaaccaggtcctggagttgttaattcaccgagatggggaatttcaagaactaatgaaattggcacttaatcagggaaaaattcatcatgaaatgcaagttttagaaaaagaagtagagaagagagacagtgatattcagcagctacaaaaacagctaaaggaagcagaacaaatactggcaacagctgtttaccaagcgaaggagaaactcaagtcaatagaaaaagcaagaaaaggtgctatctcctctgaagaaataattaagtatgcacataggatcagtgcaagtaatgctgtatgtgctccactgacctgggttccaggggacccccggagaccctacccaactgatttagagatgagaagtgggttactgggtcagatgaacaatccttccactaatggcgtgaatggccatttaccaggagatgcacttgcagcaggaagattgccagatgtccttgctccacagtatccatggcagtcaaatgacatgtcgatgaatatgttaccaccaaatcatagtagtgactttttgttggaacctcctgggcataataaagaaaatgaagatgatgtagagattatgtcaacggactcctcaagcagtagtagtgagtctgattgaaaaaccttaaaagacaatatacagaattgaatactgtagaattctgtttctttaacagtagcagggaaatgtaaactacaggtgacaaaaaatacccaggtaaacactggctttggtagaattgtgcagtcattaaaagtcaaaattttttgactttctttttaaagccaaagaccatagttttagttttaagccactaggtagatatttaggggaatagtcaaaatttactgttgaaaaagcagttgctatgtgctttcttaccctgttctgttccagttttgctggatttgtacatagccattctagaaatagagttgagggaaattatccatatacatatcactaataggcttcttggaattatttagaaaagcatttttaaactggcagtggatgactgaataggcatcatatttctttttgtgtgtcatttaaaagtaacaaaaactgccatttgacagtaaaggctcttggcttctgttggaggcatgggaaattgtctcaatttgtacagtttgtaattgtaatttttgtaaataaatttgtttgtacattgta

SEQ ID NO: 350458 - DNA, 1223 bp, Homo sapiens
  misc_feature (1198)..(1198): n is a, c, g, or t
cgccacgcacctgcgtcagctcgctctgcgcgtgcgccggtggcgggactctggggaaaatggctgcgtcttcgagtggtgagaaggagaaggagcggctgggaggcggtttgggagtggcgggtggtaacagcacacgagagcggctgctgtctgcgcttgaggacttggaggtcctgtctagggaacttatagaaatgctggcaatttcaagaaaccaaaagttgttacaggctggagaggaaaaccaggtcctggagttgttaattcaccgagatggggaatttcaagaactaatgaaattggcacttaatcagggaaaaattcatcatgaaatgcaagttttagaaaaagaagtagagaagagagacagtgatattcagcagctacaaaaacagctaaaggaagcagaacaaatactggcaacagctgtttaccaagcgaaggagaaactcaagtcaatagaaaaagcaagaaaaggtgctatctcctctgaagaaataattaagtatgcacataggatcagtgcaagtaatgctgtatgtgctccactgacctgggttccaggggacccccggagaccctacccaactgatttagagatgagaagtgggttactgggtcagatgaacaatccttccactaatggcgtgaatggccatttaccaggagatgcacttgcagcaggaagattgccagatgtccttgctccacagtatccatggcagtcaaatgacatgtcgatgaatatgttaccaccaaatcatagtagtgactttttgttggaacctcctgggcataataaagaaaatgaagatgatgtagagattatgtcaacggactcctcaagcagtagtagtgagtctgattgaaaaaccttaaaagacaatatacagaattgaatactgtagaattctgtttctttaacagtagcagggaaatgtaaactacaggtgacaaaaaatacccaggtaaacactggctttggtagaattgtgcagtcattaaaagtcaaaattttttgactttctttttaaagccaaagaccatagttttagttttaagccactaggtagatatttaggggaatagtcaaaatttactgttgaaaaagcagttgctatgtgctttcttaccctgttctgttccagttttgctggatttgtacatagccattctagaaatagagttgaggtantccatgaggggggatcctctatggt

SEQ ID NO: 350459 - DNA, 1307 bp, Homo sapiens
gtgcgggtcagcgacgactcgtgtaagacacaatgtcatgcgttactttcgcactctgggaacttatagaaatgctggcaatttcaagaaaccaaaagttgttacaggctggagaggaaaaccaggtcctggagttgttaattcaccgagatggggaatttcaagaactaatgaaattggcacttaatcagggaaaaattcatcatgaaatgcaagttttagaaaaagaagtagagaagagagacagtgatattcagcagctacaaaaacagctaaaggaagcagaacaaatactggcaacagctgtttaccaagcgaaggagaaactcaagtcaatagaaaaagcaagaaaaggtgctatctcctctgaagaaataattaagtatgcacataggatcagtgcaagtaatgctgtatgtgctccactgacctgggttccaggggacccccggagaccctacccaactgatttagagatgagaagtgggttactgggtcagatgaacaatccttccactaatggcgtgaatggccatttaccaggagatgcacttgcagcaggaagattgccagatgtccttgctccacagtatccatggcagtcaaatgacatgtcgatgaatatgttaccaccaaatcatagtagtgactttttgttggaacctcctgggcataataaagaaaatgaagatgatgtagagattatgtcaacggactcctcaagcagtagtagtgagtctgattgaaaaaccttaaaagacaatatacagaattgaatactgtagaattctgtttctttaacagtagcagggaaatgtaaactacaggtgacaaaaaatacccaggtaaacactggctttggtagaattgtgcagtcattaaaagtcaaaattttttgactttctttttaaagccaaagaccatagttttagttttaagccactaggtagatatttaggggaatagtcaaaatttactgttgaaaaagcagttgctatgtgctttcttaccctgttctgttccagttttgctggatttgtacatagccattctagaaatagagttgagggaaattatccatatacatatcactaataggcttcttggaattatttagaaaagcatttttaaactggcagtggatgactgaataggcatcatatttctttttgtgtgtcatttaaaagtaacaaaaactgccatttgacagtaaaggctcttggcttctgttggaggcatgggaaattgtctcaatttgtacagtttgtaattgtaatttttgtaaataaatttgtttgtacattgta

SEQ ID NO: 350460 - DNA, 1372 bp, Homo sapiens
cgccacgcacctgcgtcagctcgctctgcgcgtgcgccggtggcgggactctggggaaaatggctgcgtcttcgagtggtgagaaggagaaggagcggctgggaggcggtttgggagtggcgggtggtaacagcacacgagagcggctgctgtctgcgcttgaggacttggaggtcctgtctagggaacttatagaaatgctggcaatttcaagaaaccaaaagttgttacaggctggagaggaaaaccaggtcctggagttgttaattcaccgagatggggaatttcaagaactaatgaaattggcacttaatcagggaaaaattcatcatgaaatgcaagttttagaaaaagaagtagagaagagagacagtgatattcagcagctacaaaaacagctaaaggaagcagaacaaatactggcaacagctgtttaccaagcgaaggagaaactcaagtcaatagaaaaagcaagaaaaggtgctatctcctctgaagaaataattaagtatgcacataggatcagtgcaagtaatgctgtatgtgctccactgacctgggttccaggggacccccggagaccctacccaactgatttagagatgagaagtgggttactgggtcagatgaacaatccttccactaatggcgtgaatggccatttaccaggagatgcacttgcagcaggaagattgccagatgtccttgctccacagtatccatggcagtcaaatgacatgtcgatgaatatgttaccaccaaatcatagtagtgactttttgttggaacctcctgggcataataaagaaaatgaagatgatgtagagattatgtcaacggactcctcaagcagtagtagtgagtctgattgaaaaaccttaaaagacaatatacagaattgaatactgtagaattctgtttctttaacagtagcagggaaatgtaaactacaggtgacaaaaaattttctttttaaagccaaagaccatagttttagttttaagccactaggtagatatttaggggaatagtcaaaatttactgttgaaaaagcagttgctatgtgctttcttaccctgttctgttccagttttgctggatttgtacatagccattctagaaatagagttgagggaaattatccatatacatatcactaataggcttcttggaattatttagaaaagcatttttaaactggcagtggatgactgaataggcatcatatttctttttgtgtgtcatttaaaagtaacaaaaactgccatttgacagtaaaggctcttggcttctgttggaggcatgggaaattgtctcaatttgtacagtttgtaattgtaatttttgtaaataaatttgtttgtacattgta

SEQ ID NO: 350461 - DNA, 1381 bp, Homo sapiens
cgccacgcacctgcgtcagctcgctctgcgcgtgcgccggtggcgggactctggggaaaatggctgcgtcttcgagtggtgagaaggagaaggagcggctgggaggcggtttgggagtggcgggtggtaacagcacacgagagcggctgctgtctgcgcttgaggacttggaggtcctgtctagggaacttatagaaatgctggcaatttcaagaaaccaaaagttgttacaggctggagaggaaaaccaggtcctggagttgttaattcaccgagatggggaatttcaagaactaatgaaattggcacttaatcagggaaaaattcatcatgaaatgcaagttttagaaaaagaagtagagaagagagacagtgatattcagcagctacaaaaacagctaaaggaagcagaacaaatactggcaacagctgtttaccaagcgaaggagaaactcaagtcaatagaaaaagcaagaaaagtaatgctgtatgtgctccactgacctgggttccaggggacccccggagaccctacccaactgatttagagatgagaagtgggttactgggtcagatgaacaatccttccactaatggcgtgaatggccatttaccaggagatgcacttgcagcaggaagattgccagatgtccttgctccacagtatccatggcagtcaaatgacatgtcgatgaatatgttaccaccaaatcatagtagtgactttttgttggaacctcctgggcataataaagaaaatgaagatgatgtagagattatgtcaacggactcctcaagcagtagtagtgagtctgattgaaaaaccttaaaagacaatatacagaattgaatactgtagaattctgtttctttaacagtagcagggaaatgtaaactacaggtgacaaaaaatacccaggtaaacactggctttggtagaattgtgcagtcattaaaagtcaaaattttttgactttctttttaaagccaaagaccatagttttagttttaagccactaggtagatatttaggggaatagtcaaaatttactgttgaaaaagcagttgctatgtgctttcttaccctgttctgttccagttttgctggatttgtacatagccattctagaaatagagttgagggaaattatccatatacatatcactaataggcttcttggaattatttagaaaagcatttttaaactggcagtggatgactgaataggcatcatatttctttttgtgtgtcatttaaaagtaacaaaaactgccatttgacagtaaaggctcttggcttctgttggaggcatgggaaattgtctcaatttgtacagtttgtaattgtaatttttgtaaataaatttgtttgtacattgta

SEQ ID NO: 350462 - DNA, 659 bp, Homo sapiens
cgccacgcacctgcgtcagctcgctctgcgcgtgcgccggtggcgggactctggggaaaatggctgcgtcttcgagtggtgagaaggagaaggagcggctgggaggcggtttgggagtggcgggtggtaacagcacacgagagcggctgctgtctgcgcttgaggacttggaggtcctgtctagggaacttatagaaatgctggcaatttcaagaaaccaaaagttgttacaggctggagaggaaaaccaggtcctggagttgttaattcaccgagatggggaatttcaagaactaatgaaattggcacttaatcagggaaaaattcatcatgaaatgcaagttttagaaaaagaagtagagaagagagacagtgatattcagcagctacaaaaacagctaaaggaagcagaacaaatactggtaagttgacagaggttggttcttaaggttaaaaaggatgttgtttaatctgtttctgaaaaatctgttatcaatattttgaagagcagaaaactagactttccaagtctaaaggtgatatcttgtcactcaccattgccagtggttaaatgaaaggctattgtcattctcttttttacttactgttttcaaatagtctgcattacttgtgagccacattttcgatgctcggtcgaa

SEQ ID NO: 350463 - DNA, 703 bp, Homo sapiens
gccctgtgtggtcccgggcgtcctgggtctggttttgagtggctcggccactaccatccgacttggtcccattcctacaacggctgtttagtcggcccccttttctgacatcttacgtgggattcccgccatctggagcaattttgtcgaaccaggtctatacgaaaacaagagtggactgcaatcattccaaattcccagctaattgtcattccataccctcacaatgtccctcgaagttggagtgccaaactgtatcttacaccaagtaatattgttctgcttactgctatagctctcatcggtgtctgtgttttcatcttggcaataattggcattttacattggcaggaaaagaaagcagatgatagagaaaaacgacaagaagcccaccggtttcattttgatgctatgtgacttgcctttaatattacataatggaatggctgttcacttgattagttgaaacacaaattctggcttgaaaaaataggggagattaaatattatttataaatgatgtatcccatggtataaagcactttgtatataaaaatttgggttctctattctgtagtgctgtacatttttgttcctttgtggaatgtgttgcatgtactccagtgtttgtgtatttataatcttatttgcatcatgatgatggaaaaagttgtgtaaataaaaataattaaatgagcaggaa

SEQ ID NO: 350464 - DNA, 2382 bp, Homo sapiens
agcgtgagggcggctttcaccctagctccactgcttttttagcgtcggaagggcagccctagtgggagagagaaaaaggagccggcagcggctcttacgcgtcccggggctgcgcgccactctctcggccggtaacgcggtgctttgcggctgtcgtcaagcgcggcgttgggccggcgggcgggggctgaggggctgccatggcggcggcgggccggctcccgagctcctgggccctcttctcgccgctcctcgcagggcttgcactactgggagtcgggccggtcccagcgcgggcgctgcacaacgtcacggccgagctctttggggccgaggcctggggcacccttgcggctttcggggacctcaactccgacaagcagacggatctcttcgtgctgcgggaaagaaatgacttaatcgtctttttggcagaccagaatgcaccctattttaaacccaaagtaaaggtatctttcaagaatcacagtgcattgataacaagtgtagtccctggggattatgatggagattctcaaatggatgtccttctgacatatcttcccaaaaattatgccaagagtgaattaggagctgttatcttctggggacaaaatcaaacattagatcctaacaatatgaccatactcaataggacttttcaagatgagccactaattatggatttcaatggtgatctaattcctgatatttttggtatcacaaatgaatccaaccagccacagatactattaggagggaatttatcatggcatccagcattgaccactacaagtaaaatgcgaattccacattctcatgcatttattgatctgactgaagattttacagcagatttattcctgacgacattgaatgccaccactagtaccttccagtttgaaatatgggaaaatttggatggaaacttctctgtcagtactatattggaaaaacctcaaaatatgatggtggttggacagtcagcatttgcagactttgatggagatggacacatggatcatttactgccaggctgtgaagataaaaattgccaaaagagtaccatctacttagtgagatctgggatgaagcagtgggttccagtcctacaagatttcagcaataagggcacactctggggctttgtgccatttgtggatgaacagcaaccaactgaaataccaattccaattacccttcatattggagactacaatatggatggctatccagacgctctggtcatactaaagaacacatctggaagcaaccagcaggcctttttactggagaacgtcccttgtaataatgcaagctgtgaagaggcgcgtcgaatgtttaaagtctactgggagctgacagacctaaatcaaattaaggatgccatggttgccaccttctttgacatttacgaagatggaatcttggacattgtagtgctaagtaaaggatatacaaagaatgattttgccattcatacactaaaaaataactttgaagcagatgcttattttgttaaagttattgttcttagtggtctgtgttctaatgactgtcctcgtaagataacaccctttggagtgaatcaacctggaccttatatcatgtatacaactgtagatgcaaatgggtatctgaaaaatggatcagctggccaactcagccaatccgcacatttagctctccaactaccatacaacgtgcttggtttaggtcggagcgcaaattttcttgaccatctctacgttggtattccccgtccatctggagaaaaatctatacgaaaacaagagtggactgcaatcattccaaattcccagctaattgtcattccataccctcacaatgtccctcgaagttggagtgccaaactgtatcttacaccaagtaatattgttctgcttactgctatagctctcatcggtgtctgtgttttcatcttggcaataattggcattttacattggcaggaaaagaaagcagatgatagagaaaaacgacaagaagcccaccggtttcattttgatgctatgtgacttgcctttaatattacataatggaatggctgttcacttgattagttgaaacacaaattctggcttgaaaaaataggggagattaaatattatttataaatgatgtatcccatggtaattattggaaagtattcaaataaatatggtttgaatatgtcacaaggtctttttttttaaagcactttgtatataaaaatttgggttctctattctgtagtgctgtacatttttgttcctttgtggaatgtgttgcatgtactccagtgtttgtgtatttataatcttatttgcatcatgatgatggaaaaagttgtgtaaataaaaataattaaatgagcaggaa

SEQ ID NO: 350465 - DNA, 2854 bp, Homo sapiens
agcgtgagggcggctttcaccctagctccactgcttttttagcgtcggaagggcagccctagtgggagagagaaaaaggagccggcagcggctcttacgcgtcccggggctgcgcgccactctctcggccggtaacgcggtgctttgcggctgtcgtcaagcgcggcgttgggccggcgggcgggggctgaggggctgccatggcggcggcgggccggctcccgagctcctgggccctcttctcgccgctcctcgcagggcttgcactactgggagtcgggccggtcccagcgcgggcgctgcacaacgtcacggccgagctctttggggccgaggcctggggcacccttgcggctttcggggacctcaactccgacaagcagacggatctcttcgtgctgcgggaaagaaatgacttaatcgtctttttggcagaccagaatgcaccctattttaaacccaaagtaaaggtatctttcaagaatcacagtgcattgataacaagtgtagtccctggggattatgatggagattctcaaatggatgtccttctgacatatcttcccaaaaattatgccaagagtgaattaggagctgttatcttctggggacaaaatcaaacattagatcctaacaatatgaccatactcaataggacttttcaagatgagccactaattatggatttcaatggtgatctaattcctgatatttttggtatcacaaatgaatccaaccagccacagatactattaggagggaatttatcatggcatccagcattgaccactacaagtaaaatgcgaattccacattctcatgcatttattgatctgactgaagattttacagcagatttattcctgacgacattgaatgccaccactagtaccttccagtttgaaatatgggaaaatttggatggaaacttctctgtcagtactatattggaaaaacctcaaaatatgatggtggttggacagtcagcatttgcagactttgatggagatggacacatggatcatttactgccaggctgtgaagataaaaattgccaaaagagtaccatctacttagtgagatctgggatgaagcagtgggttccagtcctacaagatttcagcaataagggcacactctggggctttgtgccatttgtggatgaacagcaaccaactgaaataccaattccaattacccttcatattggagactacaatatggatggctatccagacgctctggtcatactaaagaacacatctggaagcaaccagcaggcctttttactggagaacgtcccttgtaataatgcaagctgtgaagaggcgcgtcgaatgtttaaagtctactgggagctgacagacctaaatcaaattaaggatgccatggttgccaccttctttgacatttacgaagatggaatcttggacattgtagtgctaagtaaaggatatacaaagaatgattttgccattcatacactaaaaaataactttgaagcagatgcttattttgttaaagttattgttcttagtggtctgtgttctaatgactgtcctcgtaagataacaccctttggagtgaatcaacctggaccttatatcatgtatacaactgtagatgcaaatgggtatctgaaaaatggatcagctggccaactcagccaatccgcacatttagctctccaactaccatacaacgtgcttggtttaggtcggagcgcaaattttcttgaccatctctacgttggtattccccgtccatctggagaaaaatctatacgaaaacaagagtggactgcaatcattccaaattcccagctaattgtcattccataccctcacaatgtccctcgaagttggagtgccaaactgtatcttacaccaagtaatattgttctgcttactgctatagctctcatcggtgtctgtgttttcatcttggcaataattggcattttacattggcaggaaaagaaagcagatgatagagaaaaacgacaagaagcccaccggtttcattttgatgctatgtgacttgcctttaatattacataatggaatggctgttcacttgattagttgaaacacaaattctggcttgaaaaaataggggagattaaatattatttataaatgatgtatcccatggtaattattggaaagtattcaaataaatatggtttgaatatgtcacaaggtctttttttttaaagcactttgtatataaaaatttgggttctctattctgtagtgctgtacatttttgttcctttgtggaatgtgttgcatgtactccagtgtttgtgtatttataatcttatttgcatcatgatgatggaaaaagttgtgtaaataaaaataattaaatgagcaggaaaaaaaaaaaaaaaaaaaaaaaaaaaaaaaaaaaaaaaaaaaaaaaaaaaaaaaaaaagagaaacaaagaaagacagacgaaaaaaagagagagaaacaaaacacacgcacaacaatcaagacgacagcaccacacgcgagccaactaggcgcgacgtaagagagcacacgacaaaacgaaacaacacaccacaccccgagccaacacacatcaagagacagaaacgaccacacgacgcacgaaggaaaccagcaggaagaagccgcaactccggaccgcaccggccggcacagcgggcaggacacgacaccacctcacacaaacgagcccgaggaaccacagcgcagacaacacacgaaagacacagaccgaataacacgccacaacacagcaaaacaaagaacaaacgcagaagagcaacagcggacagacacaccagcaccagagacacacgaagcgcagcagaaaagaa

SEQ ID NO: 350466 - DNA, 3319 bp, Homo sapiens
agcgtgagggcggctttcaccctagctccactgcttttttagcgtcggaagggcagccctagtgggagagagaaaaaggagccggcagcggctcttacgcgtcccggggctgcgcgccactctctcggccggtaacgcggtgctttgcggctgtcgtcaagcgcggcgttgggccggcgggcgggggctgaggggctgccatggcggcggcgggccggctcccgagctcctgggccctcttctcgccgctcctcgcagggcttgcactactgggagtcgggccggtcccagcgcgggcgctgcacaacgtcacggccgagctctttggggccgaggcctggggcacccttgcggctttcggggacctcaactccgacaagcagacggatctcttcgtgctgcgggaaagaaatgacttaatcgtctttttggcagaccagaatgcaccctattttaaacccaaagtaaaggtatctttcaagaatcacagtgcattgataacaagtgtagtccctggggattatgatggagattctcaaatggatgtccttctgacatatcttcccaaaaattatgccaagagtgaattaggagctgttatcttctggggacaaaatcaaacattagatcctaacaatatgaccatactcaataggacttttcaagatgagccactaattatggatttcaatggtgatctaattcctgatatttttggtatcacaaatgaatccaaccagccacagatactattaggagggaatttatcatggcatccagcattgaccactacaagtaaaatgcgaattccacattctcatgcatttattgatctgactgaagattttacagcagatttattcctgacgacattgaatgccaccactagtaccttccagtttgaaatatgggaaaatttggatggaaacttctctgtcagtactatattggaaaaacctcaaaatatgatggtggttggacagtcagcatttgcagactttgatggagatggacacatggatcatttactgccaggctgtgaagataaaaattgccaaaagagtaccatctacttagtgagatctgggatgaagcagtgggttccagtcctacaagatttcagcaataagggcacactctggggctttgtgccatttgtggatgaacagcaaccaactgaaataccaattccaattacccttcatattggagactacaatatggatggctatccagacgctctggtcatactaaagaacacatctggaagcaaccagcaggcctttttactggagaacgtcccttgtaataatgcaagctgtgaagaggcgcgtcgaatgtttaaagtctactgggagctgacagacctaaatcaaattaaggatgccatggttgccaccttctttgacatttacgaagatggaatcttggacattgtagtgctaagtaaaggatatacaaagaatgattttgccattcatacactaaaaaataactttgaagcagatgcttattttgttaaagttattgttcttagtggtctgtgttctaatgactgtcctcgtaagataacaccctttggagtgaatcaacctggaccttatatcatgtatacaactgtagatgcaaatgggtatctgaaaaatggatcagctggccaactcagccaatccgcacatttagctctccaactaccatacaacgtgcttggtttaggtcggagcgcaaattttcttgaccatctctacgttggtattccccgtccatctggagaaaaatccataccctcacaatgtccctcgaagttggagtgccaaactgtatcttacaccaagtaatattgttctgcttactgctatagctctcatcggtgtctgtgttttcatcttggcaataattggcattttacattggcaggaaaagaaagcagatgatagagaaaaacgacaagaagcccaccggtttcattttgatgctatgtgacttgcctttaatattacataatggaatggctgttcacttgattagttgaaacacaaattctggcttgaaaaaataggggagattaaatattatttataaatgatgtatcccatggtaattattggaaagtattcaaataaatatggtttgaatatgtcacaaggtctttttttttaaagcactttgtatataaaaatttgggttctctattctgtagtgctgtacatttttgttcctttgtggaatgtgttgcatgtactccagtgtttgtgtatttataatcttatttgcatcatgatgatggaaaaagttgtgtaaataaaaataattaaatgagcaggaatttttgtgtccacttgacttggtcttgcttcttattctaatgatgcaaattatacttttgtgaatatatcacggagtcattaggcattcagcttcatcacagcaggtcaggggtctcactgatggcatacaatatagtgatcgggtactctgacttggtagcacagtaagacagacttgccttaaactcctaattcaaccacttacaaagtcattgtttgaacttggctcttgtttaacctctgtaaacctcagttttcttgtttattcagtggggctaatacttgagttactgtaaacattaaatgggatgatgtatgtgaagtgcttagcttggtgcctagcacagagtaagtggtcaatatgtggtagttgtcattattaatattttagatgatcttattagacttatacatctaattatagaaatacatagacttgatagaattttattttcaggcatgaagaaatattctttggaaaagctaaatttttggtgattgacataaagatttacttgctcatattaactaaaaattatagtactctccaagaattaatgtgccctaaaaattttcctccaaaaacttatccttatcatgtgataatgaagaacatttgatttcttgaaaggaaactgctgtaggcagcatctgggaatgcaaatcttcaatcacatttctattctcaaacacttggagaagtctataatttacattcagacttcaatgcaaattttgtattgtgaacttcacatttccaaaaagttactttaaaaagactttaagactgaaaaaaaaaagtttatcaatgctaataattttctagtatgcaaatggacatgtgatgcctataaaacacaaaaatttctctgaaaacaattttgttcttatttttttctttatagttcactgagattggcatgtgtttttactttgtatctaagcatgttaacatgtcttcttaataaatattccttattgaaacaaagtat

SEQ ID NO: 350467 - DNA, 3486 bp, Homo sapiens
agcgtgagggcggctttcaccctagctccactgcttttttagcgtcggaagggcagccctagtgggagagagaaaaaggagccggcagcggctcttacgcgtcccggggctgcgcgccactctctcggccggtaacgcggtgctttgcggctgtcgtcaagcgcggcgttgggccggcgggcgggggctgaggggctgccatggcggcggcgggccggctcccgagctcctgggccctcttctcgccgctcctcgcagggcttgcactactgggagtcgggccggtcccagcgcgggcgctgcacaacgtcacggccgagctctttggggccgaggcctggggcacccttgcggctttcggggacctcaactccgacaagcagacggatctcttcgtgctgcgggaaagaaatgacttaatcgtctttttggcagaccagaatgcaccctattttaaacccaaagtaaaggtatctttcaagaatcacagtgcattgataacaagtgtagtccctggggattatgatggagattctcaaatggatgtccttctgacatatcttcccaaaaattatgccaagagtgaattaggagctgttatcttctggggacaaaatcaaacattagatcctaacaatatgaccatactcaataggacttttcaagatgagccactaattatggatttcaatggtgatctaattcctgatatttttggtatcacaaatgaatccaaccagccacagatactattaggagggaatttatcatggcatccagcattgaccactacaagtaaaatgcgaattccacattctcatgcatttattgatctgactgaagattttacagcagagtctccctctgtctccaggctggagatcagaatcttggctcactgcaacctccgcctcctgggttcaagtgattcttctgcctcagcctcccaagtggctgggactacagatttattcctgacgacattgaatgccaccactagtaccttccagtttgaaatatgggaaaatttggatggaaacttctctgtcagtactatattggaaaaacctcaaaatatgatggtggttggacagtcagcatttgcagactttgatggagatggacacatggatcatttactgccaggctgtgaagataaaaattgccaaaagagtaccatctacttagtgagatctgggatgaagcagtgggttccagtcctacaagatttcagcaataagggcacactctggggctttgtgccatttgtggatgaacagcaaccaactgaaataccaattccaattacccttcatattggagactacaatatggatggctatccagacgctctggtcatactaaagaacacatctggaagcaaccagcaggcctttttactggagaacgtcccttgtaataatgcaagctgtgaagaggcgcgtcgaatgtttaaagtctactgggagctgacagacctaaatcaaattaaggatgccatggttgccaccttctttgacatttacgaagatggaatcttggacattgtagtgctaagtaaaggatatacaaagaatgattttgccattcatacactaaaaaataactttgaagcagatgcttattttgttaaagttattgttcttagtggtctgtgttctaatgactgtcctcgtaagataacaccctttggagtgaatcaacctggaccttatatcatgtatacaactgtagatgcaaatgggtatctgaaaaatggatcagctggccaactcagccaatccgcacatttagctctccaactaccatacaacgtgcttggtttaggtcggagcgcaaattttcttgaccatctctacgttggtattccccgtccatctggagaaaaatctatacgaaaacaagagtggactgcaatcattccaaattcccagctaattgtcattccataccctcacaatgtccctcgaagttggagtgccaaactgtatcttacaccaagtaatattgttctgcttactgctatagctctcatcggtgtctgtgttttcatcttggcaataattggcattttacattggcaggaaaagaaagcagatgatagagaaaaacgacaagaagcccaccggtttcattttgatgctatgtgacttgcctttaatattacataatggaatggctgttcacttgattagttgaaacacaaattctggcttgaaaaaataggggagattaaatattatttataaatgatgtatcccatggtaattattggaaagtattcaaataaatatggtttgaatatgtcacaaggtctttttttttaaagcactttgtatataaaaatttgggttctctattctgtagtgctgtacatttttgttcctttgtggaatgtgttgcatgtactccagtgtttgtgtatttataatcttatttgcatcatgatgatggaaaaagttgtgtaaataaaaataattaaatgagcaggaatttttgtgtccacttgacttggtcttgcttcttattctaatgatgcaaattatacttttgtgaatatatcacggagtcattaggcattcagcttcatcacagcaggtcaggggtctcactgatggcatacaatatagtgatcgggtactctgacttggtagcacagtaagacagacttgccttaaactcctaattcaaccacttacaaagtcattgtttgaacttggctcttgtttaacctctgtaaacctcagttttcttgtttattcagtggggctaatacttgagttactgtaaacattaaatgggatgatgtatgtgaagtgcttagcttggtgcctagcacagagtaagtggtcaatatgtggtagttgtcattattaatattttagatgatcttattagacttatacatctaattatagaaatacatagacttgatagaattttattttcaggcatgaagaaatattctttggaaaagctaaatttttggtgattgacataaagatttacttgctcatattaactaaaaattatagtactctccaagaattaatgtgccctaaaaattttcctccaaaaacttatccttatcatgtgataatgaagaacatttgatttcttgaaaggaaactgctgtaggcagcatctgggaatgcaaatcttcaatcacatttctattctcaaacacttggagaagtctataatttacattcagacttcaatgcaaattttgtattgtgaacttcacatttccaaaaagttactttaaaaagactttaagactgaaaaaaaaaagtttatcaatgctaataattttctagtatgcaaatggacatgtgatgcctataaaacacaaaaatttctctgaaaacaattttgttcttatttttttctttatagttcactgagattggcatgtgtttttactttgtatctaagcatgttaacatgtcttcttaataaatattccttattgaaacaaagtat

SEQ ID NO: 350468 - DNA, 3330 bp, Homo sapiens
agcgtgagggcggctttcaccctagctccactgcttttttagcgtcggaagggcagccctagtgggagagagaaaaaggagccggcagcggctcttacgcgtcccggggctgcgcgccactctctcggccggtaacgcggtgctttgcggctgtcgtcaagcgcggcgttgggccggcgggcgggggctgaggggctgccatggcggcggcgggccggctcccgagctcctgggccctcttctcgccgctcctcgcagggcttgcactactgggagtcgggccggtcccagcgcgggcgctgcacaacgtcacggccgagctcaactccgacaagcagacggatctcttcgtgctgcgggaaagaaatgacttaatcgtctttttggcagaccagaatgcaccctattttaaacccaaagtaaaggtatctttcaagaatcacagtgcattgataacaagtgtagtccctggggattatgatggagattctcaaatggatgtccttctgacatatcttcccaaaaattatgccaagagtgaattaggagctgttatcttctggggacaaaatcaaacattagatcctaacaatatgaccatactcaataggacttttcaagatgagccactaattatggatttcaatggtgatctaattcctgatatttttggtatcacaaatgaatccaaccagccacagatactattaggagggaatttatcatggcatccagcattgaccactacaagtaaaatgcgaattccacattctcatgcatttattgatctgactgaagattttacagcagatttattcctgacgacattgaatgccaccactagtaccttccagtttgaaatatgggaaaatttggatggaaacttctctgtcagtactatattggaaaaacctcaaaatatgatggtggttggacagtcagcatttgcagactttgatggagatggacacatggatcatttactgccaggctgtgaagataaaaattgccaaaagagtaccatctacttagtgagatctgggatgaagcagtgggttccagtcctacaagatttcagcaataagggcacactctggggctttgtgccatttgtggatgaacagcaaccaactgaaataccaattccaattacccttcatattggagactacaatatggatggctatccagacgctctggtcatactaaagaacacatctggaagcaaccagcaggcctttttactggagaacgtcccttgtaataatgcaagctgtgaagaggcgcgtcgaatgtttaaagtctactgggagctgacagacctaaatcaaattaaggatgccatggttgccaccttctttgacatttacgaagatggaatcttggacattgtagtgctaagtaaaggatatacaaagaatgattttgccattcatacactaaaaaataactttgaagcagatgcttattttgttaaagttattgttcttagtggtctgtgttctaatgactgtcctcgtaagataacaccctttggagtgaatcaacctggaccttatatcatgtatacaactgtagatgcaaatgggtatctgaaaaatggatcagctggccaactcagccaatccgcacatttagctctccaactaccatacaacgtgcttggtttaggtcggagcgcaaattttcttgaccatctctacgttggtattccccgtccatctggagaaaaatctatacgaaaacaagagtggactgcaatcattccaaattcccagctaattgtcattccataccctcacaatgtccctcgaagttggagtgccaaactgtatcttacaccaagtaatattgttctgcttactgctatagctctcatcggtgtctgtgttttcatcttggcaataattggcattttacattggcaggaaaagaaagcagatgatagagaaaaacgacaagaagcccaccggtttcattttgatgctatgtgacttgcctttaatattacataatggaatggctgttcacttgattagttgaaacacaaattctggcttgaaaaaataggggagattaaatattatttataaatgatgtatcccatggtaattattggaaagtattcaaataaatatggtttgaatatgtcacaaggtctttttttttaaagcactttgtatataaaaatttgggttctctattctgtagtgctgtacatttttgttcctttgtggaatgtgttgcatgtactccagtgtttgtgtatttataatcttatttgcatcatgatgatggaaaaagttgtgtaaataaaaataattaaatgagcaggaatttttgtgtccacttgacttggtcttgcttcttattctaatgatgcaaattatacttttgtgaatatatcacggagtcattaggcattcagcttcatcacagcaggtcaggggtctcactgatggcatacaatatagtgatcgggtactctgacttggtagcacagtaagacagacttgccttaaactcctaattcaaccacttacaaagtcattgtttgaacttggctcttgtttaacctctgtaaacctcagttttcttgtttattcagtggggctaatacttgagttactgtaaacattaaatgggatgatgtatgtgaagtgcttagcttggtgcctagcacagagtaagtggtcaatatgtggtagttgtcattattaatattttagatgatcttattagacttatacatctaattatagaaatacatagacttgatagaattttattttcaggcatgaagaaatattctttggaaaagctaaatttttggtgattgacataaagatttacttgctcatattaactaaaaattatagtactctccaagaattaatgtgccctaaaaattttcctccaaaaacttatccttatcatgtgataatgaagaacatttgatttcttgaaaggaaactgctgtaggcagcatctgggaatgcaaatcttcaatcacatttctattctcaaacacttggagaagtctataatttacattcagacttcaatgcaaattttgtattgtgaacttcacatttccaaaaagttactttaaaaagactttaagactgaaaaaaaaaagtttatcaatgctaataattttctagtatgcaaatggacatgtgatgcctataaaacacaaaaatttctctgaaaacaattttgttcttatttttttctttatagttcactgagattggcatgtgtttttactttgtatctaagcatgttaacatgtcttcttaataaatattccttattgaaacaaagtat

SEQ ID NO: 350469 - DNA, 3168 bp, Homo sapiens
aacacaatgcaaagttaaacaaaacaccagccgggtactcaggcctgggcccaccaaagaagaaataaagacataatgatatcttatagtgaaatcaaccttcagaaacaaaggtatttaaaattaccaagtgacccttttggggtctacaacacttaccagaccttaagaaagcggaagacggagagacgactgcatcaggaaatgacttaatcgtctttttggcagaccagaatgcaccctattttaaacccaaagtaaaggtatctttcaagaatcacagtgcattgataacaagtgtagtccctggggattatgatggagattctcaaatggatgtccttctgacatatcttcccaaaaattatgccaagagtgaattaggagctgttatcttctggggacaaaatcaaacattagatcctaacaatatgaccatactcaataggacttttcaagatgagccactaattatggatttcaatggtgatctaattcctgatatttttggtatcacaaatgaatccaaccagccacagatactattaggagggaatttatcatggcatccagcattgaccactacaagtaaaatgcgaattccacattctcatgcatttattgatctgactgaagattttacagcagatttattcctgacgacattgaatgccaccactagtaccttccagtttgaaatatgggaaaatttggatggaaacttctctgtcagtactatattggaaaaacctcaaaatatgatggtggttggacagtcagcatttgcagactttgatggagatggacacatggatcatttactgccaggctgtgaagataaaaattgccaaaagagtaccatctacttagtgagatctgggatgaagcagtgggttccagtcctacaagatttcagcaataagggcacactctggggctttgtgccatttgtggatgaacagcaaccaactgaaataccaattccaattacccttcatattggagactacaatatggatggctatccagacgctctggtcatactaaagaacacatctggaagcaaccagcaggcctttttactggagaacgtcccttgtaataatgcaagctgtgaagaggcgcgtcgaatgtttaaagtctactgggagctgacagacctaaatcaaattaaggatgccatggttgccaccttctttgacatttacgaagatggaatcttggacattgtagtgctaagtaaaggatatacaaagaatgattttgccattcatacactaaaaaataactttgaagcagatgcttattttgttaaagttattgttcttagtggtctgtgttctaatgactgtcctcgtaagataacaccctttggagtgaatcaacctggaccttatatcatgtatacaactgtagatgcaaatgggtatctgaaaaatggatcagctggccaactcagccaatccgcacatttagctctccaactaccatacaacgtgcttggtttaggtcggagcgcaaattttcttgaccatctctacgttggtattccccgtccatctggagaaaaatctatacgaaaacaagagtggactgcaatcattccaaattcccagctaattgtcattccataccctcacaatgtccctcgaagttggagtgccaaactgtatcttacaccaagtaatattgttctgcttactgctatagctctcatcggtgtctgtgttttcatcttggcaataattggcattttacattggcaggaaaagaaagcagatgatagagaaaaacgacaagaagcccaccggtttcattttgatgctatgtgacttgcctttaatattacataatggaatggctgttcacttgattagttgaaacacaaattctggcttgaaaaaataggggagattaaatattatttataaatgatgtatcccatggtaattattggaaagtattcaaataaatatggtttgaatatgtcacaaggtctttttttttaaagcactttgtatataaaaatttgggttctctattctgtagtgctgtacatttttgttcctttgtggaatgtgttgcatgtactccagtgtttgtgtatttataatcttatttgcatcatgatgatggaaaaagttgtgtaaataaaaataattaaatgagcaggaatttttgtgtccacttgacttggtcttgcttcttattctaatgatgcaaattatacttttgtgaatatatcacggagtcattaggcattcagcttcatcacagcaggtcaggggtctcactgatggcatacaatatagtgatcgggtactctgacttggtagcacagtaagacagacttgccttaaactcctaattcaaccacttacaaagtcattgtttgaacttggctcttgtttaacctctgtaaacctcagttttcttgtttattcagtggggctaatacttgagttactgtaaacattaaatgggatgatgtatgtgaagtgcttagcttggtgcctagcacagagtaagtggtcaatatgtggtagttgtcattattaatattttagatgatcttattagacttatacatctaattatagaaatacatagacttgatagaattttattttcaggcatgaagaaatattctttggaaaagctaaatttttggtgattgacataaagatttacttgctcatattaactaaaaattatagtactctccaagaattaatgtgccctaaaaattttcctccaaaaacttatccttatcatgtgataatgaagaacatttgatttcttgaaaggaaactgctgtaggcagcatctgggaatgcaaatcttcaatcacatttctattctcaaacacttggagaagtctataatttacattcagacttcaatgcaaattttgtattgtgaacttcacatttccaaaaagttactttaaaaagactttaagactgaaaaaaaaaagtttatcaatgctaataattttctagtatgcaaatggacatgtgatgcctataaaacacaaaaatttctctgaaaacaattttgttcttatttttttctttatagttcactgagattggcatgtgtttttactttgtatctaagcatgttaacatgtcttcttaataaatattccttattgaaacaaagtat

SEQ ID NO: 350470 - DNA, 2364 bp, Homo sapiens
cctgtgcccctagccatgatggcttcgggtaggggttgatctctgtcaccttctttaccatctggaggcaatgtaagcacccactgcagccctatagtctgctgcaactatgactccatgccagaacttgaagaccagggtggtgattccaggaagcattttgattccctgctcctctgagactccccagctgggcatggccagcctcagcccatcagtgggactccctggacccagatccagcagatctgcataaactcaaccagcaggcctttttactggagaacgtcccttgtaataatgcaagctgtgaagaggcgcgtcgaatgtttaaagtctactgggagctgacagacctaaatcaaattaaggatgccatggttgccaccttctttgacatttacgaagatggaatcttggacattgtagtgctaagtaaaggatatacaaagaatgattttgccattcatacactaaaaaataactttgaagcagatgcttattttgttaaagttattgttcttagtggtctgtgttctaatgactgtcctcgtaagataacaccctttggagtgaatcaacctggaccttatatcatgtatacaactgtagatgcaaatgggtatctgaaaaatggatcagctggccaactcagccaatccgcacatttagctctccaactaccatacaacgtgcttggtttaggtcggagcgcaaattttcttgaccatctctacgttggtattccccgtccatctggagaaaaatctatacgaaaacaagagtggactgcaatcattccaaattcccagctaattgtcattccataccctcacaatgtccctcgaagttggagtgccaaactgtatcttacaccaagtaatattgttctgcttactgctatagctctcatcggtgtctgtgttttcatcttggcaataattggcattttacattggcaggaaaagaaagcagatgatagagaaaaacgacaagaagcccaccggtttcattttgatgctatgtgacttgcctttaatattacataatggaatggctgttcacttgattagttgaaacacaaattctggcttgaaaaaataggggagattaaatattatttataaatgatgtatcccatggtaattattggaaagtattcaaataaatatggtttgaatatgtcacaaggtctttttttttaaagcactttgtatataaaaatttgggttctctattctgtagtgctgtacatttttgttcctttgtggaatgtgttgcatgtactccagtgtttgtgtatttataatcttatttgcatcatgatgatggaaaaagttgtgtaaataaaaataattaaatgagcaggaatttttgtgtccacttgacttggtcttgcttcttattctaatgatgcaaattatacttttgtgaatatatcacggagtcattaggcattcagcttcatcacagcaggtcaggggtctcactgatggcatacaatatagtgatcgggtactctgacttggtagcacagtaagacagacttgccttaaactcctaattcaaccacttacaaagtcattgtttgaacttggctcttgtttaacctctgtaaacctcagttttcttgtttattcagtggggctaatacttgagttactgtaaacattaaatgggatgatgtatgtgaagtgcttagcttggtgcctagcacagagtaagtggtcaatatgtggtagttgtcattattaatattttagatgatcttattagacttatacatctaattatagaaatacatagacttgatagaattttattttcaggcatgaagaaatattctttggaaaagctaaatttttggtgattgacataaagatttacttgctcatattaactaaaaattatagtactctccaagaattaatgtgccctaaaaattttcctccaaaaacttatccttatcatgtgataatgaagaacatttgatttcttgaaaggaaactgctgtaggcagcatctgggaatgcaaatcttcaatcacatttctattctcaaacacttggagaagtctataatttacattcagacttcaatgcaaattttgtattgtgaacttcacatttccaaaaagttactttaaaaagactttaagactgaaaaaaaaaagtttatcaatgctaataattttctagtatgcaaatggacatgtgatgcctataaaacacaaaaatttctctgaaaacaattttgttcttatttttttctttatagttcactgagattggcatgtgtttttactttgtatctaagcatgttaacatgtcttcttaataaatattccttattgaaacaaagtat

SEQ ID NO: 350471 - DNA, 1130 bp, Homo sapiens
agcgtgagggcggctttcaccctagctccactgcttttttagcgtcggaagggcagccctagtgggagagagaaaaaggagccggcagcggctcttacgcgtcccggggctgcgcgccactctctcggccggtaacgcggtgctttgcggctgtcgtcaagcgcggcgttgggccggcgggcgggggctgaggggctgccatggcggcggcgggccggctcccgagctcctgggccctcttctcgccgctcctcgcagggcttgcactactgggagtcgggccggtcccagcgcgggcgctgcacaacgtcacggccgagctctttggggccgaggcctggggcacccttgcggctttcggggacctcaactccgacaagcagacggatctcttcgtgctgcgggaaagaaatgacttaatcgtctttttggcagaccagaatgcaccctattttaaacccaaagtaaaggtatctttcaagaatcacagtgcattgataacaagtgtagtccctggggattatgatggagattctcaaatggatgtccttctgacatatcttcccaaaaattatgccaagagtgaattaggagctgttatcttctggggacaaaatcaaacattagatcctaacaatatgaccatactcaataggacttttcaagatgagccactaattatggatttcaatggtgatctaattcctgatatttttggtatcacaaatgaatccaaccagccacagatactattaggagggaatttatcatggcatccagcattgaccactacaagtaaaatgcgaattccacattctcatgcatttattgatctgactgaagattttacagcagcacatctattcctgacgacattgaatgcccaccactagtaccttccagctcgaccatatgggcaacaattggatgggcacactctctgtaccacactactatttgggacaaaactccacaaaatgactggatggctggaaccaaccagacttgtcagaacttgcagcgagactgcccccatgggtacatttaacctgccgcgcggtgaaaatcgacattgcgcaaaaagtgccacaaatagaggaaaacgggctgacgcctggggcaagcctaca

SEQ ID NO: 350472 - DNA, 345 bp, Homo sapiens
ctctgaaattatggtgatgatttggtaaaagatactagaattgacagcaaggaaagcataccacattcatattttcttcctcaactcacaggagtttcctttgcttcaaaataaaagtgaaacaggagattggaataatttttgtgcaatacaacaaaatactgaagttatttatttccccagttcagttagaatgctttgttttacacttaacaaatgagtggattaagatggtctaattcaaagttttcttcatttaacaggatggaaacttctctgtcagtactatattggaaaaacctcaaaatatgatggtggttggacagtcagcatttgcagactttg

SEQ ID NO: 350473 - DNA, 2213 bp, Homo sapiens
agcgtgagggcggctttcaccctagctccactgcttttttagcgtcggaagggcagccctagtgggagagagaaaaaggagccggcagcggctcttacgcgtcccggggctgcgcgccactctctcggccggtaacgcggtgctttgcggctgtcgtcaagcgcggcgttgggccggcgggcgggggctgaggggctgccatggcggcggcgggccggctcccgagctcctgggccctcttctcgccgctcctcgcagggcttgcactactgggagtcgggccggtcccagcgcgggcgctgcacaacgtcacggccgagctctttggggccgaggcctggggcacccttgcggctttcggggacctcaactccgacaagcagacggatctcttcgtgctgcgggaaagaaatgacttaatcgtctttttggcagaccagaatgcaccctattttaaacccaaagtaaaggtatctttcaagaatcacagtgcattgataacaagtgtagtccctggggattatgatggagattctcaaatggatgtccttctgacatatcttcccaaaaattatgccaagagtgaattaggagctgttatcttctggggacaaaatcaaacattagatcctaacaatatgaccatactcaataggacttttcaagatgagccactaattatggatttcaatggtgatctaattcctgatatttttggtatcacaaatgaatccaaccagccacagatactattaggagggaatttatcatggcatccagcattgaccactacaagtaaaatgcgaattccacattctcatgcatttattgatctgactgaagattttacagcagatttattcctgacgacattgaatgccaccactagtaccttccagtttgaaatatgggaaaatttggatggaaacttctctgtcagtactatattggaaaaacctcaaaatatgatggtggttggacagtcagcatttgcagactttgatggagatggacacatggatcatttactgccaggctgtgaagataaaaattgccaaaagagtaccatctacttagtgagatctgggatgaagcagtgggttccagtcctacaagatttcagcaataagggcacactctggggctttgtgccatttgtggatgaacagcaaccaactgaaataccaattccaattacccttcatattggagactacaatatggatggctatccagacgctctggtcatactaaagaacacatctggaagcaaccagcaggcctttttactggagaacgtcccttgtaataatgcaagctgtgaagaggcgcgtcgaatgtttaaagtctactgggagctgacagacctaaatcaaattaaggatgccatggttgccaccttctttgacatttacgaagatggaatcttggacattgtagtgctaagtaaaggatatacaaagaatgattttgccattcatacactaaaaaataactttgaagcagatgcttattttgttaaagttattgttcttagtggtctgtgttctaatgactgtcctcgtaagataacaccctttggagtgaatcaacctggaccttatatcatgtatacaactgtagatgcaaatgggtatctgaaaaatggatcagctggccaactcagccaatccgcacatttagctctccaactaccatacaacgtgcttggtttaggtcggagcgcaaattttcttgaccatctctacgttggtattccccgtccatctggagaaaaatctatacgaaaacaagagtggactgcaatcattccaaattcccagctaattgtcattccataccctcacaatgtccctcgaagttggagtgccaaactgtatcttacaccaagtaatattgttctgcttactgctatagctctcatcggtgtctgtgttttcatcttggcaataattggcattttacattggcaggaaaagaaagcagatgatagagaaaaacgacaagaagcccaccggtttcattttgatgctatgtgacttgcctttaatattacataatggaatggctgttcacttgattagttgaaacacaaattctggcttgaaaaaataggggagattaaatattatttataaatgatgtatcccatggtaattattggaaagtattcaaataaatatggtttgaatatgtcacaaggtctttttttt

SEQ ID NO: 350474 - DNA, 3375 bp, Homo sapiens
agcgtgagggcggctttcaccctagctccactgcttttttagcgtcggaagggcagccctagtgggagagagaaaaaggagccggcagcggctcttacgcgtcccggggctgcgcgccactctctcggccggtaacgcggtgctttgcggctgtcgtcaagcgcggcgttgggccggcgggcgggggctgaggggctgccatggcggcggcgggccggctcccgagctcctgggccctcttctcgccgctcctcgcagggcttgcactactgggagtcgggccggtcccagcgcgggcgctgcacaacgtcacggccgagctctttggggccgaggcctggggcacccttgcggctttcggggacctcaactccgacaagcagacggatctcttcgtgctgcgggaaagaaatgacttaatcgtctttttggcagaccagaatgcaccctattttaaacccaaagtaaaggtatctttcaagaatcacagtgcattgataacaagtgtagtccctggggattatgatggagattctcaaatggatgtccttctgacatatcttcccaaaaattatgccaagagtgaattaggagctgttatcttctggggacaaaatcaaacattagatcctaacaatatgaccatactcaataggacttttcaagatgagccactaattatggatttcaatggtgatctaattcctgatatttttggtatcacaaatgaatccaaccagccacagatactattaggagggaatttatcatggcatccagcattgaccactacaagtaaaatgcgaattccacattctcatgcatttattgatctgactgaagattttacagcagatttattcctgacgacattgaatgccaccactagtaccttccagtttgaaatatgggaaaatttggatggaaacttctctgtcagtactatattggaaaaacctcaaaatatgatggtggttggacagtcagcatttgcagactttgatggagatggacacatggatcatttactgccaggctgtgaagataaaaattgccaaaagagtaccatctacttagtgagatctgggatgaagcagtgggttccagtcctacaagatttcagcaataagggcacactctggggctttgtgccatttgtggatgaacagcaaccaactgaaataccaattccaattacccttcatattggagactacaatatggatggctatccagacgctctggtcatactaaagaacacatctggaagcaaccagcaggcctttttactggagaacgtcccttgtaataatgcaagctgtgaagaggcgcgtcgaatgtttaaagtctactgggagctgacagacctaaatcaaattaaggatgccatggttgccaccttctttgacatttacgaagatggaatcttggacattgtagtgctaagtaaaggatatacaaagaatgattttgccattcatacactaaaaaataactttgaagcagatgcttattttgttaaagttattgttcttagtggtctgtgttctaatgactgtcctcgtaagataacaccctttggagtgaatcaacctggaccttatatcatgtatacaactgtagatgcaaatgggtatctgaaaaatggatcagctggccaactcagccaatccgcacatttagctctccaactaccatacaacgtgcttggtttaggtcggagcgcaaattttcttgaccatctctacgttggtattccccgtccatctggagaaaaatctatacgaaaacaagagtggactgcaatcattccaaattcccagctaattgtcattccataccctcacaatgtccctcgaagttggagtgccaaactgtatcttacaccaagtaatattgttctgcttactgctatagctctcatcggtgtctgtgttttcatcttggcaataattggcattttacattggcaggaaaagaaagcagatgatagagaaaaacgacaagaagcccaccggtttcattttgatgctatgtgacttgcctttaatattacataatggaatggctgttcacttgattagttgaaacacaaattctggcttgaaaaaataggggagattaaatattatttataaatgatgtatcccatggtaattattggaaagtattcaaataaatatggtttgaatatgtcacaaggtctttttttttaaagcactttgtatataaaaatttgggttctctattctgtagtgctgtacatttttgttcctttgtggaatgtgttgcatgtactccagtgtttgtgtatttataatcttatttgcatcatgatgatggaaaaagttgtgtaaataaaaataattaaatgagcaggaatttttgtgtccacttgacttggtcttgcttcttattctaatgatgcaaattatacttttgtgaatatatcacggagtcattaggcattcagcttcatcacagcaggtcaggggtctcactgatggcatacaatatagtgatcgggtactctgacttggtagcacagtaagacagacttgccttaaactcctaattcaaccacttacaaagtcattgtttgaacttggctcttgtttaacctctgtaaacctcagttttcttgtttattcagtggggctaatacttgagttactgtaaacattaaatgggatgatgtatgtgaagtgcttagcttggtgcctagcacagagtaagtggtcaatatgtggtagttgtcattattaatattttagatgatcttattagacttatacatctaattatagaaatacatagacttgatagaattttattttcaggcatgaagaaatattctttggaaaagctaaatttttggtgattgacataaagatttacttgctcatattaactaaaaattatagtactctccaagaattaatgtgccctaaaaattttcctccaaaaacttatccttatcatgtgataatgaagaacatttgatttcttgaaaggaaactgctgtaggcagcatctgggaatgcaaatcttcaatcacatttctattctcaaacacttggagaagtctataatttacattcagacttcaatgcaaattttgtattgtgaacttcacatttccaaaaagttactttaaaaagactttaagactgaaaaaaaaaagtttatcaatgctaataattttctagtatgcaaatggacatgtgatgcctataaaacacaaaaatttctctgaaaacaattttgttcttatttttttctttatagttcactgagattggcatgtgtttttactttgtatctaagcatgttaacatgtcttcttaataaatattccttattgaaacaaagtat

SEQ ID NO: 350475 - DNA, 3309 bp, Homo sapiens
agcgtgagggcggctttcaccctagctccactgcttttttagcgtcggaagggcagccctagtgggagagagaaaaaggagccggcagcggctcttacgcgtcccggggctgcgcgccactctctcggccggtaacgcggtgctttgcggctgtcgtcaagcgcggcgttgggccggcgggcgggggctgaggggctgccatggcggcggcgggccggctcccgagctcctgggccctcttctcgccgctcctcgcagggcttgcactactgggagtcgggccggtcccagcgcgggcgctgcacaacgtcacggccgagctctttggggccgaggcctggggcacccttgcggctttcggggacctcaactccgacaagcagacggatctcttcgtgctgcgggaaagaaatgacttaatcgtctttttggcagaccagaatgcaccctattttaaacccaaagtaaaggtatctttcaagaatcacagtgcattgataacaagtgtagtccctggggattatgatggagattctcaaatggatgtccttctgacatatcttcccaaaaattatgccaagagtgaattaggagctgttatcttctggggacaaaatcaaacattagatcctaacaatatgaccatactcaataggacttttcaagatgagccactaattatggatttcaatggtgatctaattcctgatatttttggtatcacaaatgaatccaaccagccacagatactattaggagggaatttatcatggcatccagcattgaccactacaagtaaaatgcgaattccacattctcatgcatttattgatctgactgaagattttacagcagatttattcctgacgacattgaatgccaccactagtaccttccagtttgaaatatgggaaaatttggatggaaacttctctgtcagtactatattggaaaaacctcaaaatatgatggtggttggacagtcagcatttgcagactttgatggagatggacacatggatcatttactgccaggctgtgaagataaaaattgccaaaagagtaccatctacttagtgagatctgggatgaagcagtgggttccagtcctacaagatttcagcaataagggcacactctggggctttgtgccatttgtggatgaacagcaaccaactgaaataccaattccaattacccttcatattggagactacaatatggatggctatccagacgctctggtcatactaaagaacacatctggaagcaaccagcaggcctttttactggagaacgtcccttgtaataatgcaagctgtgaagaggcgcgtcgaatgtttaaagtctactgggagctgacagacctaaatcaaattaaggatgccatggttgccaccttctttgacatttacgaagatggaatcttggacattgtagtgctaagtaaaggatatacaaagaatgattttgccattcatacactaaaaaataactttgaagcagatgcttattttgttaaagttattgttcttagtggtctgtgttctaatgactgtcctcgtaagataacaccctttggagtgaatcaacctggaccttatatcatgtatacaactgtagatgcaaatgggtatctgaaaaatggatcagctggccaactcagccaatccgcacatttagctctccaactaccatacaacgtgcttggtttaggtcggagcgcaaattttcttgaccatctctacgttggtattccccgtccatctggagaaaaatctatacgaaaacaagagtggactgcaatcattccaaattcccagctaattgtcattccataccctcacaatgtccctcgaagttggagtgccaaactgtatcttacaccaagtaatattgttctgcttactgctatagctctcatcggtgtctgtgttttcatcttggcaataattggcattttacattggcaggaaaagaaagcagatgatagagaaaaacgacaagaagcccaccggtttcattttgatgctatgtgacttgcctttaatattacataatggaatggctgttcacttgattagttgaaacacaaattctggcttgaaaaaataggggagattaaatattatttataaatgatgtatcccatggtaattattggaaagtattcaaataaatatggtttgaatatgtcacaaggtctttttttttaaagcactttgtatataaaaatttgggttctctattctgtagtgctgtacatttttgttcctttgtggaatgtgttgcatgtactccagtgtttgtgtatttataatcttatttgcatcatgatgatggaaaaagttgtgtaaataaaaataattaaatgagcaggaatttttgtgtccacttgacttggtcttgcttcttattctaatgatgcaaattatacttttgtgaatatatcacggagtcattaggcattcagcttcatcacagcaggtcaggggtctcactgatggcatacaatatagtgatcgggtactctgacttggtagcacagtaagacagacttgccttaaactcctaattcaaccacttacaaagtcattgtttgaacttggctcttgtttaacctctgtaaacctcagttttcttgtttattcagtggggctaatacttgagttactgtaaacattaaatgggatgatgtatgtgaagtgcttagcttggtgcctagcacagagtaagtggtcaatatgtggtagttgtcattattaatattttagatgatcttattagacttatacatctaattatagaaatacatagacttgatagaattttattttcaggcatgaagaaatattctttggaaaagctaaatttttggtgattgacataaagatttacttgctcatattaactaaaaattatagtactctccaagaattaatgtgccctaaaaattttcctccaaaaacttatccttatcatgtgataatgaagaacatttgatttcttgaaaggaaactgctgtaggcagcatctgggaatgcaaatcttcaatcacatttctattctcaaacacttggagaagtctataatttacattcagacttcaatgcaaattttgtattgtgaacttcacatttccaaaaagttactttaaaaagactttaagactgaaaaaaaaaagtttatcaatgaattttgttcttatttttttctttatagttcactgagattggcatgtgtttttactttgtatctaagcatgttaacatgtcttcttaataaatattccttattgaaacaaagtat

SEQ ID NO: 350476 - DNA, 2396 bp, Homo sapiens
agcgtgagggcggctttcaccctagctccactgcttttttagcgtcggaagggcagccctagtgggagagagaaaaaggagccggcagcggctcttacgcgtcccggggctgcgcgccactctctcggccggtaacgcggtgctttgcggctgtcgtcaagcgcggcgttgggccggcgggcgggggctgaggggctgccatggcggcggcgggccggctcccgagctcctgggccctcttctcgccgctcctcgcagggcttgcactactgggagtcgggccggtcccagcgcgggcgctgcacaacgtcacggccgagctctttggggccgaggcctggggcacccttgcggctttcggggacctcaactccgacaagcagacggatctcttcgtgctgcgggaaagaaatgacttaatcgtctttttggcagaccagaatgcaccctattttaaacccaaagtaaaggtatctttcaagaatcacagtgcattgataacaagtgtagtccctggggattatgatggagattctcaaatggatgtccttctgacatatcttcccaaaaattatgccaagagtgaattaggagctgttatcttctggggacaaaatcaaacattagatcctaacaatatgaccatactcaataggacttttcaagatgagccactaattatggatttcaatggtgatctaattcctgatatttttggtatcacaaatgaatccaaccagccacagatactattaggagggaatttatcatggcatccagcattgaccactacaagtaaaatgcgaattccacattctcatgcatttattgatctgactgaagattttacagcagatttattcctgacgacattgaatgccaccactagtaccttccagtttgaaatatgggaaaatttggatggaaacttctctgtcagtactatattggaaaaacctcaaaatatgatggtggttggacagtcagcatttgcagactttgatggagatggacacatggatcatttactgccaggctgtgaagataaaaattgccaaaagagtaccatctacttagtgagatctgggatgaagcagtgggttccagtcctacaagatttcagcaataagggcacactctggggctttgtgccatttgtggatgaacagcaaccaactgaaataccaattccaattacccttcatattggagactacaatatggatggctatccagacgctctggtcatactaaagaacacatctggaagcaaccagcaggcctttttactggagaacgtcccttgtaataatgcaagctgtgaagaggcgcgtcgaatgtttaaagtctactgggagctgacagacctaaatcaaattaaggatgccatggttgccaccttctttgacatttacgaagatggaatcttggacattgtagtgctaagtaaaggatatacaaagaatgattttgccattcatacactaaaaaataactttgaagcagatgcttattttgttaaagttattgttcttagtggtctgtgttctaatgactgtcctcgtaagataacaccctttggagtgaatcaacctggaccttatatcatgtatacaactgtagatgcaaatgggtatctgaaaaatggatcagctggccaactcagccaatccgcacatttagctctccaactaccatacaacgtgcttggtttaggtcggagcgcaaattttcttgaccatctctacgttggtattccccgtccatctggagaaaaatctatacgaaaacaagagtggactgcaatcattccaaattcccagctaattgtcattccataccctcacaatgtccctcgaagttggagtgccaaactgtatcttacaccaagtaatattgttctgcttactgctatagctctcatcggtgtctgtgttttcatcttggcaataattggcattttacattggcaggaaaagaaagccgctgatacagtatgtagccgagaagccctcgggtgtcttgtatgatctttactgtatcaatgcctttagtagaagcatggatggaatggctgctcttctgatgttagtgttaacgcttactatgcgcttgactatataggggggatcacatcttattgatttcgatgcatcccatgctattcatggcaagagtgctcataaataaggtgtgaatccgccacccgggcccgcaatagataagtaggttcatatctgtaatgtggggggagttttgcgcagaaccgatggattgtgcatccattgtggagatgtggggcatgattgccagtggatgggttgtggtgtggtgtattggatggtgattatgaggcaaagttcagtgaataataataatttaatttgctggagaat

SEQ ID NO: 350477 - DNA, 1679 bp, Homo sapiens
agcgtgagggcggctttcaccctagctccactgcttttttagcgtcggaagggcagccctagtgggagagagaaaaaggagccggcagcggctcttacgcgtcccggggctgcgcgccactctctcggccggtaacgcggtgctttgcggctgtcgtcaagcgcggcgttgggccggcgggcgggggctgaggggctgccatggcggcggcgggccggctcccgagctcctgggccctcttctcgccgctcctcgcagggcttgcactactgggagtcgggccggtcccagcgcgggcgctgcacaacgtcacggccgagctctttggggccgaggcctggggcacccttgcggctttcggggacctcaactccgacaagcagacggatctcttcgtgctgcgggaaagaaatgacttaatcgtctttttggcagaccagaatgcaccctattttaaacccaaagtaaaggtatctttcaagaatcacagtgcattgataacaagtgtagtccctggggattatgatggagattctcaaatggatgtccttctgacatatcttcccaaaaattatgccaagagtgaattaggagctgttatcttctggggacaaaatcaaacattagatcctaacaatatgaccatactcaataggacttttcaagatgagccactaattatggatttcaatggtgatctaattcctgatatttttggtatcacaaatgaatccaaccagccacagatactattaggagggaatttatcatggcatccagcattgaccactacaagtaaaatgcgaattccacattctcatgcatttattgatctgactgaagattttacagcagatttattcctgacgacattgaatgccaccactagtaccttccagtttgaaatatgggaaaatttggatggaaacttctctgtcagtactatattggaaaaacctcaaaatatgatggtggttggacagtcagcatttgcagactttgatggagatggacacatggatcatttactgccaggctgtgaagataaaaattgccaaaagagtaccatctacttagtgagatctgggatgaagcagtgggttccagtcctacaagatttcagcaataagggcacactctggggctttgtgccatttgtggatgaacagcaaccaactgaaataccaattccaattacccttcatattggagactacaatatggatggctatccagacgctctggtcatactaaagaacacatctggaagcaaccagcaggcctttttactggagaacgtcccttgtaataatgcaagctgtgaagaggcgcgtcgaatgtttaaagtctactgggagctgacagacctaaatcaaattaaggatgccatggttgccaccttctttgacatttacgaagatggaatcttggacattgtagtgctaagtaaaggatatacaaagaatgattttgccattcatacactaaaaaataactttgaagcagatgcttattttgttaaagttattggtgagtaaagtactaacatttaattttgttctctttctcttcccctctctccacatattccaaagagcaaggacatgctccgatgtacaaccctctagatcagatcaacacgtcagcagcttcaggggggatccttagagtcggccgaa

SEQ ID NO: 350478 - DNA, 1490 bp, Homo sapiens
agcgtgagggcggctttcaccctagctccactgcttttttagcgtcggaagggcagccctagtgggagagagaaaaaggagccggcagcggctcttacgcgtcccggggctgcgcgccactctctcggccggtaacgcggtgctttgcggctgtcgtcaagcgcggcgttgggccggcgggcgggggctgaggggctgccatggcggcggcgggccggctcccgagctcctgggccctcttctcgccgctcctcgcagggcttgcactactgggagtcgggccggtcccagcgcgggcgctgcacaacgtcacggccgagctctttggggccgaggcctggggcacccttgcggctttcggggacctcaactccgacaagcagacggatctcttcgtgctgcgggaaagaaatgacttaatcgtctttttggcagaccagaatgcaccctattttaaacccaaagtaaaggtatctttcaagaatcacagtgcattgataacaagtgtagtccctggggattatgatggagattctcaaatggatgtccttctgacatatcttcccaaaaattatgccaagagtgaattaggagctgttatcttctggggacaaaatcaaacattagatcctaacaatatgaccatactcaataggacttttcaagatgagccactaattatggatttcaatggtgatctaattcctgatatttttggtatcacaaatgaatccaaccagccacagatactattaggagggaatttatcatggcatccagcattgaccactacaagtaaaatgcgaattccacattctcatgcatttattgatctgactgaagattttacagcagatttattcctgacgacattgaatgccaccactagtaccttccagtttgaaatatgggaaaatttggatggaaacttctctgtcagtactatattggaaaaacctcaaaatatgatggtggttggacagtcagcatttgcagactttgatggagatggacacatggatcatttactgccaggctgtgaagataaaaattgccaaaagagtaccatctacttagtgagatctgggatgaagcagtgggttccagtcctacaagatttcagcaataagggcacactctggggctttgtgccatttgtggatgaacagcaaccaactgaaataccaattccaattacccttcatattggagactacaatatggatggctatccagacgctctggtcatactaaagaacacatctggaagcaaccagcaggcctttttactggagaacgtcccttgtaataatgcaagctgtgaagaggcgcgtcgaatgtttaaagtctactgggagctgaggagggttctggtcactagcagactcatttcattcaccccttggaatctgcccagatccatcatccatccattcaaccaatgattcatccatccatccatccatcgatctatcagacatccatcataa

SEQ ID NO: 350479 - DNA, 1908 bp, Homo sapiens
ctgatgaatacaccagcgactaaacaataacttgtgaagcagatgctattagttaagttatagttcttagtggtctgtgttctaatgactgtcctcgtaagataacaccctttggagtgaatcaacctggaccttatatcatgtatacaactgtagatgcaaatgggtatctgaaaaatggatcagctggccaactcagccaatccgcacatttagctctccaactaccatacaacgtgcttggtttaggtcggagcgcaaattttcttgaccatctctacgttggtattccccgtccatctggagaaaaatctatacgaaaacaagagtggactgcaatcattccaaattcccagctaattgtcattccataccctcacaatgtccctcgaagttggagtgccaaactgtatcttacaccaagtaatattgttctgcttactgctatagctctcatcggtgtctgtgttttcatcttggcaataattggcattttacattggcaggaaaagaaagcagatgatagagaaaaacgacaagaagcccaccggtttcattttgatgctatgtgacttgcctttaatattacataatggaatggctgttcacttgattagttgaaacacaaattctggcttgaaaaaataggggagattaaatattatttataaatgatgtatcccatggtaattattggaaagtattcaaataaatatggtttgaatatgtcacaaggtctttttttttaaagcactttgtatataaaaatttgggttctctattctgtagtgctgtacatttttgttcctttgtggaatgtgttgcatgtactccagtgtttgtgtatttataatcttatttgcatcatgatgatggaaaaagttgtgtaaataaaaataattaaatgagcaggaatttttgtgtccacttgacttggtcttgcttcttattctaatgatgcaaattatacttttgtgaatatatcacggagtcattaggcattcagcttcatcacagcaggtcaggggtctcactgatggcatacaatatagtgatcgggtactctgacttggtagcacagtaagacagacttgccttaaactcctaattcaaccacttacaaagtcattgtttgaacttggctcttgtttaacctctgtaaacctcagttttcttgtttattcagtggggctaatacttgagttactgtaaacattaaatgggatgatgtatgtgaagtgcttagcttggtgcctagcacagagtaagtggtcaatatgtggtagttgtcattattaatattttagatgatcttattagacttatacatctaattatagaaatacatagacttgatagaattttattttcaggcatgaagaaatattctttggaaaagctaaatttttggtgattgacataaagatttacttgctcatattaactaaaaattatagtactctccaagaattaatgtgccctaaaaattttcctccaaaaacttatccttatcatgtgataatgaagaacatttgatttcttgaaaggaaactgctgtaggcagcatctgggaatgcaaatcttcaatcacatttctattctcaaacacttggagaagtctataatttacattcagacttcaatgcaaattttgtattgtgaacttcacatttccaaaaagttactttaaaaagactttaagactgaaaaaaaaaagtttatcaatgctaataattttctagtatgcaaatggacatgtgatgcctataaaacacaaaaatttctctgaaaacaattttgttcttatttttttctttatagttcactgagattggcatgtgtttttactttgtatctaagcatgttaacatgtcttcttaataaatattccttattgaaacaaagtat

SEQ ID NO: 350480 - DNA, 612 bp, Homo sapiens
ttttttttttttaaaaaagggaaaaaaaagagggggggttttttcctttttgggggggaaaaagggccttctcaaaaatgcgttcttccacattgataatttagtaaactgagaacattgacatcactacagggcagcataagaggttgcttacatgtggtagcagctctggtttgattcaagttgctaccatgtacattgacagcacatataccataaccagcgtgttgggttgaattgcactttctacctttgtatgagatttacagactttccttctgggtttgtatcatgaccagaggggtactatagggttggtttatactgcaatatagaggatcagaagccatttgatttggtaggtgtgtcagaagggagaatgatggcagacgaactgctggaagaggtcagaagatagccatgctaaaatgcaattatatcctcatgtttatcccaaactaatcttggacttttccactcattagctttgttttgcccttgtttcccttgaaggtttaagttcaaccatattctgtcaactgttcagtttcagtggaatcttgtatttctggttcattataacaaattgttcgcttaaatccaaaaaaaaaa

SEQ ID NO: 350481 - DNA, 964 bp, Homo sapiens
cctgtgtgaaatccggatccgctatcgaggtcgtttgtatcgataagcttgatcttggagggatgcagcaacaacagcagctagccagtgccagaaacagaagactggcccagcagatggagaatagaccctctgtccaggcagcattaaaacttaagcagaagagcttaaagcagcgcctgggtaagagtaacatccaggcacggttaggccgacccataggggccctggccaggggagcaatcggaggacgaggcctacccataatccagagaggcttgcccagaggaggactacgtgggggacgtgccaccagaaccctacttaggggcgggatgtcactccgaggtcagtgctgtgtaccctgataattgtcgggccctactcccttcccttttctcttgggctgcttatggacacgtttgtttaacatctttaagcctgaatttgtattaatataataacttctgaaatcacatatttttaatagtgctgcatgtcttttatcaataccattccttttctgataatgtgcaatggtgagaggctatgacctgcgtaacaacaggtaattcatgtcatctccattccattttaaaacaccctgctgttgcttgaatcaaagcacattcaagttctagaaacaagtcaaacataagaaatttataggtcttttggcctatatctctttgttcctggtgctagtaaaacactgatacagctggagaggacaagttgacccacagcacttacctatatatgttcatttggggcactattactctgttccctgtatagttcttgttccctagaagaatctgttgagatcaggaaccatagcatttatttttaaatttaccataatgctaggcatctatctgattattcagtagatatttattaaatgtatgtacttactaattgaattaactcccaacttcgttcacagatgcagcttgtggtc

SEQ ID NO: 350482 - DNA, 1139 bp, Homo sapiens
gattgaactatagaatgttcttacgaaaacttaagtttcaactggcagtgtatgacttctgtagccaaactagtgaggtaatttgtggagatgcccatttcatgggaccacacttgagcttcttggagtttctgctctggatcaaaattctgctgcttgtataacatgttctgaggcaaaggcttgcttctggtttgggatccttttgacacccacaacaggtttatctcccttcacaccagcatctcacttgcttctttttctctgcactttgagttgccaaatcctgttggattgcttttttgatctcaatcccctaacaccttttcttccagaaagagcttaaagcagcgcctgggtaagagtaacatccaggcacggttaggccgacccataggggccctggccaggggagcaatcggaggacgaggcctacccataatccagagaggcttgcccagaggaggactacgtgggggacgtgccaccagaaccctacttaggggcgggatgtcactccgaggtcagtgctgtgtaccctgataattgtcgggccctactcccttcccttttctcttgggctgcttatggacacgtttgtttaacatctttaagcctgaatttgtattaatataataacttctgaaatcacatatttttaatagtgctgcatgtcttttatcaataccattccttttctgataatgtgcaatggtgagaggctatgacctgcgtaacaacaggtaattcatgtcatctccattccattttaaaacaccctgctgttgcttgaatcaaagcacattcaagttctagaaacaagtcaaacataagaaatttataggtcttttggcctatatctctttgttcctggtgctagtaaaacactgatacagctggagaggacaagttgacccacagcacttacctatatatgttcatttggggcactattactctgttccctgtatagttcttgttccctagaagaatctgttgagatcaggaaccatagcatttatttttaaatttaccataatgctaggcatctatctgattattcagtagatatttattaaatgtatgtacttactaattgaattaactcccaacttcgttcacagatgcagcttgtggtc

SEQ ID NO: 350483 - DNA, 866 bp, Homo sapiens
agagagtagctcccccttactttcctcccttaaaaactcagagccacctttctgcacagcttcaagtcataggcaggcttctttgtttgtcttgttttgttatttgaaactggcttatttttcaaattaccatgctggtagtgcaaaagtctcatgatttttccaagaatcaatcaagtgcatattatagagccagattatatgccatcttcctccaagctcttgcaaatttaaattgtatagttgaaaataccccccaaaatggtcagtttagggttttgcctttctctgcccctgtcccaccaccatcaccaccacataccaccctgtagctccaaatcctggtttgagtcacatgagaatatagaagagagagagagatacaaagatgaagtagagttaagagggtggtgagacttggagctgggcattggctctgaaaccaaataaattcaatgtcacatttggtgcctgtggagaaccagagatgactttttttgcttaaggtagagagcaagatggaattattatcagttaactaactggctcttattgataatcttgcctttgaaatttattgatgtttgtcttgtgacctcatgacccagattgggaaagagtttaatgatgttgctgctgttaatactaaatctcatgggagccttctggtttagagcttagtggaaaactcccaacactgtccagaaaaaaaacactattgaagcccctgtgtatatttgctttggttctcttaaaaggtgtcttgggtcttccataacttatgaccttgaagttgccaaggaataataactgttaggaaagaaaagttgataaccaagggcttgttttcttctctcccattatat

SEQ ID NO: 350484 - DNA, 2114 bp, Homo sapiens
agccggtcagacaagcactggacgtggcggccattttgttttggacaccgagcaggagctggcggccgctgcagacgaaaggcaggaaagggcaggccgggtgagcagacggatcggccgactagacagccaaccagcaacaacgaactgagctcgcatactaccgcttacgcatctaaccaaccgcccatctagctaacccgagcccctccaccgtcaactcaggttcggccggtccccggcccgcctgccggagccgtggtggcagccccgggaggagcactggcgtctgtttccttcgattctcgggattcgaagatggctgcacagtcagcgccgaaagttgtgctaaaaagcaccaccaagatgtctctaaatgagcgctttactaatatgctgaagaacaaacagccgacgccagtgaatattcgggcttcgatgcagcaacaacagcagctagccagtgccagaaacagaagactggcccagcagatggagaatagaccctctgtccaggcagcattaaaacttaagcagaagagcttaaagcagcgcctgggtaagagtaacatccaggcacggttaggccgacccataggggccctggccaggggagcaatcggaggacgaggcctacccataatccagagaggcttgcccagaggaggactacgtgggggacgtgccaccagaaccctacttaggggcgggatgtcactccgaggtcaaaacctgctccgaggtggacgagccgtagctccccgaatgggcttaagaagaggtggtgttcgaggtcgtggaggtcctgggagagggggcctagggcgtggagctatgggtcgtggcggaatcggtggtagaggtcggggtatgataggtcggggaagagggggctttggaggccgaggccgaggccgtggacgagggagaggtgcccttgctcgccctgtattgaccaaggagcagctggacaaccaattggatgcatatatgtcgaaaacaaaaggacacctggatgctgagttggatgcctacatggcgcagacagatcccgaaaccaatgattgaagcctgcccatcctcccatgagagactcttgttagtcaacacatctgtaaataaccttgagataacagatgagaagaaatctgattgatgctggatggacctatcacaataggctgtggacttacttgccaccagcttgtgcatttagtgtgttccttttactttttgatactgtgttgtatgaaacccttttgtcctttgatttggttttttgtttttgtttttttaggggggagggggggtttcccctcctttgcccagacttctctttgaacacaaatgcattagccttgtggctagaacaccctcttcctacctctgtctcccctcacttgtcatatgctctgacatgctaacatttcttttgttcatccctgttgcccccacagaaacatcccagaaaaaccggtcagtgttccttcctccctgatccttaggtttctgaaatagggttctgttacatcctcttcgatagcctgtttaaaatgtttagaaggtctggagctcaaaaatgcgttcttccacattgataatttagtaaactgagaacattgacatcactacagggcagcataagaggttgcttacatgtggtagcagctctggtttgattcaagttgctaccatgtacattgacagcacatataccataaccagcgtgttgggttgaattgcactttctacctttgtatgagatttacagactttccttctgggtttgtatcatgaccagaggggtactatagggttggtttatactgcaatatagaggatcagaagccatttgatttggtaggtgtgtcagaagggagaatgatggcagacgaactgctggaagaggtcagaagatagccatgctaaaatgcaattatatcctcatgtttatcccaaactaatcttggacttttccactcattagctttgttttgcccttgtttcccttgaaggtttaagttcaaccatattctgtcaactgttcagtttcagtggaatcttgtatttctggttcattataacaaattgttcgcttaaatccaaaaaaaaaa

SEQ ID NO: 350485 - DNA, 2114 bp, Homo sapiens
agccggtcagacaagcactggacgtggcggccattttgttttggacaccgagcaggagctggcggccgctgcagacgaaaggcaggaaagggcaggccgggtgagcagacggatcggccgactagacagccaaccagcaacaacgaactgagctcgcatactaccgcttacgcatctaaccaaccgcccatctagctaacccgagcccctccaccgtcaactcaggttcggccggtccccggcccgcctgccggagccgtggtggcagccccgggaggagcactggcgtctgtttccttcgattctcgggattcgaagatggctgcacagtcagcgccgaaagttgtgctaaaaagcaccaccaagatgtctctaaatgagcgctttactaatatgctgaagaacaaacagccgacgccagtgaatattcgggcttcgatgcagcaacaacagcagctagccagtgccagaaacagaagactggcccagcagatggagaatagaccctctgtccaggcagcattaaaacttaagcagaagagcttaaagcagcgcctgggtaagagtaacatccaggcacggttaggccgacccataggggccctggccaggggagcaatcggaggacgaggcctacccataatccagagaggcttgcccagaggaggactacgtgggggacgtgccaccagaaccctacttaggggcgggatgtcactccgaggtcaaaacctgctccgaggtggacgagccgtagctccccgaatgggcttaagaagaggtggtgttcgaggtcgtggaggtcctgggagagggggcctagggcgtggagctatgggtcgtggcggaatcggtggtagaggtcggggtatgataggtcggggaagagggggctttggaggccgaggccgaggccgtggacgagggagaggtgcccttgctcgccctgtattgaccaaggagcagctggacaaccaattggatgcatatatgtcgaaaacaaaaggacacctggatgctgagttggatgcctacatggcgcagacagatcccgaaaccaatgattgaagcctgcccatcctcccatgagagactcttgttagtcaacacatctgtaaataaccttgagataacagatgagaagaaatctgattgatgctggatggacctatcacaataggctgtggacttacttgccaccagcttgtgcatttagtgtgttccttttactttttgatactgtgttgtatgaaacccttttgtcctttgatttggttttttgtttttgtttttttaggggggagggggggtttcccctcctttgcccagacttctctttgaacacaaatgcattagccttgtggctagaacaccctcttcctacctctgtctcccctcacttgtcatatgctctgacatgctaacatttcttttgttcatccctgttgcccccacagaaacatcccagaaaaaccggtcagtgttccttcctccctgatccttaggtttctgaaatagggttctgttacatcctcttcgatagcctgtttaaaatgtttagaaggtctggagctcaaaaatgcgttcttccacattgataatttagtaaactgagaacattgacatcactacagggcagcataagaggttgcttacatgtggtagcagctctggtttgattcaagttgctaccatgtacattgacagcacatataccataaccagcgtgttgggttgaattgcactttctacctttgtatgagatttacagactttccttctgggtttgtatcatgaccagaggggtactatagggttggtttatactgcaatatagaggatcagaagccatttgatttggtaggtgtgtcagaagggagaatgatggcagacgaactgctggaagaggtcagaagatagccatgctaaaatgcaattatatcctcatgtttatcccaaactaatcttggacttttccactcattagctttgttttgccctttctggtgtgccaccagaaagggcattgcacggtggctccacggttgaggctaggttaccccgccagtccccatccagaaaagcacagggcgagctctgacgggctcagtgcg

SEQ ID NO: 350486 - DNA, 1628 bp, Homo sapiens
agccggtcagacaagcactggacgtggcggccattttgttttggacaccgagcaggagctggcggccgctgcagacgaaaggcaggaaagggcaggccgggtgagcagacggatcggccgactagacagccaaccagcaacaacgaactgagctcgcatactaccgcttacgcatctaaccaaccgcccatctagctaacccgagcccctccaccgtcaactcaggttcggccggtccccggcccgcctgccggagccgtggtggcagccccgggaggagcactggcgtctgtttccttcgattctcgggattcgaagatggctgcacagtcagcgccgaaagttgtgctaaaaagcaccaccaagatgtctctaaatgagcgctttactaatatgctgaagaacaaacagccgacgccagtgaatattcgggcttcgatgcagcaacaacagcagctagccagtgccagaaacagaagactggcccagcagatggagaatagaccctctgtccaggcagcattaaaacttaagcagaagagcttaaagcagcgcctgggtaagagtaacatccaggcacggttaggccgacccataggggccctggccaggggagcaatcggaggacgaggcctacccataatccagagaggcttgcccagaggaggactacgtgggggacgtgccaccagaaccctacttaggggcgggatgtcactccgaggtcaaaacctgctccgaggtggacgagccgtagctccccgaatgggcttaagaagaggtggtgttcgaggtcgtggaggtcctgggagagggggcctagggcgtggagctatgggtcgtggcggaatcggtggtagaggtcggggtatgataggtcggggaagagggggctttggaggccgaggccgaggccgtggacgagggagaggtgcccttgctcgccctgtattgaccaaggagcagctggacaaccaattggatgcatatatgtcgaaaacaaaaggacacctggatgctgagttggatgcctacatggcgcagacagatcccgaaaccaatgattgaagcctgcccatcctcccatgagagactcttgttagtcaacacatctgtaaataaccttgagataacagatgagaagaaatctgattgatgctggatggacctatcacaataggctgtggacttacttgccaccagcttgtgcatttagtgtgttccttttactttttgatactgtgttgtatgaaacccttttgtcctttgatttggttttttgtttttgtttttttaggggggagggggggtttcccctcctttgcccagacttctctttgaacacaaatgcattagccttgtggctagaacaccctcttcctacctctgtctcccctcacttgtcatatgctctgacatgctaacatttcttttgttcatccctgttgcccccacagaaacatcccagaaaaaccggtcagtgttccttcctccctgatccttaggtttctgaaatagggttctgttacatcctcttcgatagcctgtttaaaatgtttagaaggtctggagctcaaaaatgcgttcttccacattgataatttagtaaactgagaacattgacatca

SEQ ID NO: 350487 - DNA, 2053 bp, Homo sapiens
agccggtcagacaagcactggacgtggcggccattttgttttggacaccgagcaggagctggcggccgctgcagacgaaaggcaggaaagggcaggccgggtgagcagacggatcggccgactagacagccaaccagcaacaacgaactgagctcgcatactaccgcttacgcatctaaccaaccgcccatctagctaacccgagcccctccaccgtcaactcaggttcggccggtccccggcccgcctgccggagccgtggtggcagccccgggaggagcactggcgtctgtttccttcgattctcgggattcgaagatggctgcacagtcagcgccgaaagttgtgctaaaaagcaccaccaagatgtctctaaatgagcgctttactaatatgctgaagaacaaacagccgacgccagtgaatattcgggcttcgatgcagcaacaacagcagctagccagtgccagaaacagaagactggcccagcagatggagaatagaccctctgtccaggcagcattaaaacttaagcagaagagcttaaagcagcgcctgggtaagagtaacatccaggcacggttaggccgacccataggggccctggccaggggagcaatcggaggacgaggcctacccataatccagagaggcttgcccagaggaggactacgtgggggacgtgccaccagaaccctacttaggggcgggatgtcactccgaggtcaaaacctgctccgaggtggacgagccgtagctccccgaatgggcttaagaagaggtggtgttcgaggtcgtggaggtcctgggagagggggcctagggcgtggagctatgggtcgtggcggaatcggtggtagaggtcggggtatgataggtcggggaagagggggctttggaggccgaggccgaggccgtggacgagggagaggtgcccttgctcgccctgtattgaccaaggagcagctggacaaccaattggatgcatatatgtcgaaaacaaatgaagcctgcccatcctcccatgagagactcttgttagtcaacacatctgtaaataaccttgagataacagatgagaagaaatctgattgatgctggatggacctatcacaataggctgtggacttacttgccaccagcttgtgcatttagtgtgttccttttactttttgatactgtgttgtatgaaacccttttgtcctttgatttggttttttgtttttgtttttttaggggggagggggggtttcccctcctttgcccagacttctctttgaacacaaatgcattagccttgtggctagaacaccctcttcctacctctgtctcccctcacttgtcatatgctctgacatgctaacatttcttttgttcatccctgttgcccccacagaaacatcccagaaaaaccggtcagtgttccttcctccctgatccttaggtttctgaaatagggttctgttacatcctcttcgatagcctgtttaaaatgtttagaaggtctggagctcaaaaatgcgttcttccacattgataatttagtaaactgagaacattgacatcactacagggcagcataagaggttgcttacatgtggtagcagctctggtttgattcaagttgctaccatgtacattgacagcacatataccataaccagcgtgttgggttgaattgcactttctacctttgtatgagatttacagactttccttctgggtttgtatcatgaccagaggggtactatagggttggtttatactgcaatatagaggatcagaagccatttgatttggtaggtgtgtcagaagggagaatgatggcagacgaactgctggaagaggtcagaagatagccatgctaaaatgcaattatatcctcatgtttatcccaaactaatcttggacttttccactcattagctttgttttgcccttgtttcccttgaaggtttaagttcaaccatattctgtcaactgttcagtttcagtggaatcttgtatttctggttcattataacaaattgttcgcttaaatccaaaaaaaaaa

SEQ ID NO: 350488 - DNA, 1491 bp, Homo sapiens
agccggtcagacaagcactggacgtggcggccattttgttttggacaccgagcaggagctggcggccgctgcagacgaaaggcaggaaagggcaggccgggtgagcagacggatcggccgactagacagccaaccagcaacaacgaactgagctcgcatactaccgcttacgcatctaaccaaccgcccatctagctaacccgagcccctccaccgtcaactcaggttcggccggtccccggcccgcctgccggagccgtggtggcagccccgggaggagcactggcgtctgtttccttcgattctcgggattcgaagatggctgcacagtcagcgccgaaagttgtgctaaaaagcaccaccaagatgtctctaaatgagcgctttactaatatgctgaagaacaaacagccgacgccagtgaatattcgggcttcgatgcagcaacaacagcagctagccagtgccagaaacagaagactggcccagcagatggagaatagaccctctgtccaggcagcattaaaacttaagcagaagagcttaaagcagcgcctgggtaagagtaacatccaggcacggttaggccgacccataggggccctggccaggggagcaatcggaggacgaggcctacccataatccagagaggcttgcccagaggaggactacgtgggggacgtgccaccagaaccctacttaggggcgggatgtcactccgaggtcaaaacctgctccgaggtggacgagccgtagctccccgaatgggcttaagaagaggtggtgttcgaggtcgtggaggtcctgggagagggggcctagggcgtggagctatgggtcgtggcggaatcggtggtagaggtcggggtatgataggtcggggaagagggggctttggaggccgaggccgaggccgtggacgagggagaggtgcccttgctcgccctgtattgaccaaggagcagctggacaaccaattggatgcatatatgtcgaaaacaaaaggacacctggatgctgagttggatgcctacatggcgcagacagatcccgaaaccaatgattgaagcctgcccatcctcccatgagagactcttgttagtcaacacatctgtaaataaccttgagataacagatgagaagaaatctgattgatgctggatggacctatcacaataggctgtggacttacttgccaccagcttgtgcatttagtgtgttccttttactttttgatactgtgttgtatgaaacccttttgtcctttgaaaaaaaaaaaaaaaaaaaaaaaaaaaacaaaacaaacccgggcacaatataggcggaggggcagaaaaaagcgcaacaaaagggacaagagggacaaagaggggacaccaggaacccagatttaattggtaacacgaggggaaacacctgggggatccccaaataggggcaaacgaaaaaaaacgaaaaccccaggaacacacggaataaaacaagccaaa

SEQ ID NO: 350489 - DNA, 1989 bp, Homo sapiens
agccggtcagacaagcactggacgtggcggccattttgttttggacaccgagcaggagctggcggccgctgcagacgaaaggcaggaaagggcaggccgggttcggccggtccccggcccgcctgccggagccgtggtggcagccccgggaggagcactggcgtctgtttccttcgattctcgggattcgaagatggctgcacagtcagcgccgaaagttgtgctaaaaagcaccaccaagatgtctctaaatgagcgctttactaatatgctgaagaacaaacagccgacgccagtgaatattcgggcttcgatgcagcaacaacagcagctagccagtgccagaaacagaagactggcccagcagatggagaatagaccctctgtccaggcagcattaaaacttaagcagaagagcttaaagcagcgcctgggtaagagtaacatccaggcacggttaggccgacccataggggccctggccaggggagcaatcggaggacgaggcctacccataatccagagaggcttgcccagaggaggactacgtgggggacgtgccaccagaaccctacttaggggcgggatgtcactccgaggtcaaaacctgctccgaggtggacgagccgtagctccccgaatgggcttaagaagaggtggtgttcgaggtcgtggaggtcctgggagagggggcctagggcgtggagctatgggtcgtggcggaatcggtggtagaggtcggggtatgataggtcggggaagagggggctttggaggccgaggccgaggccgtggacgagggagaggtgcccttgctcgccctgtattgaccaaggagcagctggacaaccaattggatgcatatatgtcgaaaacaaaaggacacctggatgctgagttggatgcctacatggcgcagacagatcccgaaaccaatgattgaagcctgcccatcctcccatgagagactcttgttagtcaacacatctgtaaataaccttgagataacagatgagaagaaatctgattgatgctggatggacctatcacaataggctgtggacttacttgccaccagcttgtgcatttagtgtgttccttttactttttgatactgtgttgtatgaaacccttttgtcctttgatttggttttttgtttttgtttttttaggggggagggggggtttcccctcctttgcccagacttctctttgaacacaaatgcattagccttgtggctagaacaccctcttcctacctctgtctcccctcacttgtcatatgctctgacatgctaacatttcttttgttcatccctgttgcccccacagaaacatcccagaaaaaccggtcagtgttccttcctccctgatccttaggtttctgaaatagggttctgttacatcctcttcgatagcctgtttaaaatgtttagaaggtctggagctcaaaaatgcgttcttccacattgataatttagtaaactgagaacattgacatcactacagggcagcataagaggttgcttacatgtggtagcagctctggtttgattcaagttgctaccatgtacattgacagcacatataccataaccagcgtgttgggttgaattgcactttctacctttgtatgagatttacagactttccttctgggtttgtatcatgaccagaggggtactatagggttggtttatactgcaatatagaggatcagaagccatttgatttggtaggtgtgtcagaagggagaatgatggcagacgaactgctggaagaggtcagaagatagccatgctaaaatgcaattatatcctcatgtttatcccaaactaatcttggacttttccactcattagctttgttttgcccttgtttcccttgaaggtttaagttcaaccatattctgtcaactgttcagtttcagtggaatcttgtatttctggttcattataacaaattgttcgcttaaatccaaaaaaaaaa

SEQ ID NO: 350490 - DNA, 1729 bp, Homo sapiens
agggtaaaacaacgccaagcgaatccgcaatgatgattttagttttttctgcagtgcagcaacaacagcagctagccagtgccagaaacagaagactggcccagcagatggagaatagaccctctgtccaggcagcattaaaacttaagcagaagagcttaaagcagcgcctgggtaagagtaacatccaggcacggttaggccgacccataggggccctggccaggggagcaatcggaggacgaggcctacccataatccagagaggcttgcccagaggaggactacgtgggggacgtgccaccagaaccctacttaggggcgggatgtcactccgaggtcaaaacctgctccgaggtggacgagccgtagctccccgaatgggcttaagaagaggtggtgttcgaggtcgtggaggtcctgggagagggggcctagggcgtggagctatgggtcgtggcggaatcggtggtagaggtcggggtatgataggtcggggaagagggggctttggaggccgaggccgaggccgtggacgagggagaggtgcccttgctcgccctgtattgaccaaggagcagctggacaaccaattggatgcatatatgtcgaaaacaaaaggacacctggatgctgagttggatgcctacatggcgcagacagatcccgaaaccaatgattgaagcctgcccatcctcccatgagagactcttgttagtcaacacatctgtaaataaccttgagataacagatgagaagaaatctgattgatgctggatggacctatcacaataggctgtggacttacttgccaccagcttgtgcatttagtgtgttccttttactttttgatactgtgttgtatgaaacccttttgtcctttgatttggttttttgtttttgtttttttaggggggagggggggtttcccctcctttgcccagacttctctttgaacacaaatgcattagccttgtggctagaacaccctcttcctacctctgtctcccctcacttgtcatatgctctgacatgctaacatttcttttgttcatccctgttgcccccacagaaacatcccagaaaaaccggtcagtgttccttcctccctgatccttaggtttctgaaatagggttctgttacatcctcttcgatagcctgtttaaaatgtttagaaggtctggagctcaaaaatgcgttcttccacattgataatttagtaaactgagaacattgacatcactacagggcagcataagaggttgcttacatgtggtagcagctctggtttgattcaagttgctaccatgtacattgacagcacatataccataaccagcgtgttgggttgaattgcactttctacctttgtatgagatttacagactttccttctgggtttgtatcatgaccagaggggtactatagggttggtttatactgcaatatagaggatcagaagccatttgatttggtaggtgtgtcagaagggagaatgatggcagacgaactgctggaagaggtcagaagatagccatgctaaaatgcaattatatcctcatgtttatcccaaactaatcttggacttttccactcattagctttgttttgcccttgtttcccttgaaggtttaagttcaaccatattctgtcaactgttcagtttcagtggaatcttgtatttctggttcattataacaaattgttcgcttaaatccaaaaaaaaaa

SEQ ID NO: 350491 - DNA, 1878 bp, Homo sapiens
agccggtcagacaagcactggacgtggcggccattttgttttggacaccgagcaggagctggcggccgctgcagacgaaaggcaggaaagggcaggccgggtgagcagacggatcggccgactagacagccaaccagcaacaacgaactgagctcgcatactaccgcttacgcatctaaccaaccgcccatctagctaacccgagcccctccaccgtcaactcaggttcggccggtccccggcccgcctgccggagccgtggtggcagccccgggaggagcactggcgtctgtttccttcgaagagcttaaagcagcgcctgggtaagagtaacatccaggcacggttaggccgacccataggggccctggccaggggagcaatcggaggacgaggcctacccataatccagagaggcttgcccagaggaggactacgtgggggacgtgccaccagaaccctacttaggggcgggatgtcactccgaggtcaaaacctgctccgaggtggacgagccgtagctccccgaatgggcttaagaagaggtggtgttcgaggtcgtggaggtcctgggagagggggcctagggcgtggagctatgggtcgtggcggaatcggtggtagaggtcggggtatgataggtcggggaagagggggctttggaggccgaggccgaggccgtggacgagggagaggtgcccttgctcgccctgtattgaccaaggagcagctggacaaccaattggatgcatatatgtcgaaaacaaaaggacacctggatgctgagttggatgcctacatggcgcagacagatcccgaaaccaatgattgaagcctgcccatcctcccatgagagactcttgttagtcaacacatctgtaaataaccttgagataacagatgagaagaaatctgattgatgctggatggacctatcacaataggctgtggacttacttgccaccagcttgtgcatttagtgtgttccttttactttttgatactgtgttgtatgaaacccttttgtcctttgatttggttttttgtttttgtttttttaggggggagggggggtttcccctcctttgcccagacttctctttgaacacaaatgcattagccttgtggctagaacaccctcttcctacctctgtctcccctcacttgtcatatgctctgacatgctaacatttcttttgttcatccctgttgcccccacagaaacatcccagaaaaaccggtcagtgttccttcctccctgatccttaggtttctgaaatagggttctgttacatcctcttcgatagcctgtttaaaatgtttagaaggtctggagctcaaaaatgcgttcttccacattgataatttagtaaactgagaacattgacatcactacagggcagcataagaggttgcttacatgtggtagcagctctggtttgattcaagttgctaccatgtacattgacagcacatataccataaccagcgtgttgggttgaattgcactttctacctttgtatgagatttacagactttccttctgggtttgtatcatgaccagaggggtactatagggttggtttatactgcaatatagaggatcagaagccatttgatttggtaggtgtgtcagaagggagaatgatggcagacgaactgctggaagaggtcagaagatagccatgctaaaatgcaattatatcctcatgtttatcccaaactaatcttggacttttccactcattagctttgttttgcccttgtttcccttgaaggtttaagttcaaccatattctgtcaactgttcagtttcagtggaatcttgtatttctggttcattataacaaattgttcgcttaaatccaaaaaaaaaa

SEQ ID NO: 350492 - DNA, 1913 bp, Homo sapiens
gattgaactatagaatgttcttacgaaaacttaagtttcaactggcagtgtatgacttctgtagccaaactagtgaggtaatttgtggagatgcccatttcatgggaccacacttgagcttcttggagtttctgctctggatcaaaattctgctgcttgtataacatgttctgaggcaaaggcttgcttctggtttgggatccttttgacacccacaacaggtttatctcccttcacaccagcatctcacttgcttctttttctctgcactttgagttgccaaatcctgttggattgcttttttgatctcaatcccctaacaccttttcttccagaaagagcttaaagcagcgcctgggtaagagtaacatccaggcacggttaggccgacccataggggccctggccaggggagcaatcggaggacgaggcctacccataatccagagaggcttgcccagaggaggactacgtgggggacgtgccaccagaaccctacttaggggcgggatgtcactccgaggtcaaaacctgctccgaggtggacgagccgtagctccccgaatgggcttaagaagaggtggtgttcgaggtcgtggaggtcctgggagagggggcctagggcgtggagctatgggtcgtggcggaatcggtggtagaggtcggggtatgataggtcggggaagagggggctttggaggccgaggccgaggccgtggacgagggagaggtgcccttgctcgccctgtattgaccaaggagcagctggacaaccaattggatgcatatatgtcgaaaacaaaaggacacctggatgctgagttggatgcctacatggcgcagacagatcccgaaaccaatgattgaagcctgcccatcctcccatgagagactcttgttagtcaacacatctgtaaataaccttgagataacagatgagaagaaatctgattgatgctggatggacctatcacaataggctgtggacttacttgccaccagcttgtgcatttagtgtgttccttttactttttgatactgtgttgtatgaaacccttttgtcctttgatttggttttttgtttttgtttttttaggggggagggggggtttcccctcctttgcccagacttctctttgaacacaaatgcattagccttgtggctagaacaccctcttcctacctctgtctcccctcacttgtcatatgctctgacatgctaacatttcttttgttcatccctgttgcccccacagaaacatcccagaaaaaccggtcagtgttccttcctccctgatccttaggtttctgaaatagggttctgttacatcctcttcgatagcctgtttaaaatgtttagaaggtctggagctcaaaaatgcgttcttccacattgataatttagtaaactgagaacattgacatcactacagggcagcataagaggttgcttacatgtggtagcagctctggtttgattcaagttgctaccatgtacattgacagcacatataccataaccagcgtgttgggttgaattgcactttctacctttgtatgagatttacagactttccttctgggtttgtatcatgaccagaggggtactatagggttggtttatactgcaatatagaggatcagaagccatttgatttggtaggtgtgtcagaagggagaatgatggcagacgaactgctggaagaggtcagaagatagccatgctaaaatgcaattatatcctcatgtttatcccaaactaatcttggacttttccactcattagctttgttttgcccttgtttcccttgaaggtttaagttcaaccatattctgtcaactgttcagtttcagtggaatcttgtatttctggttcattataacaaattgttcgcttaaatccaaaaaaaaaa

SEQ ID NO: 350493 - DNA, 2741 bp, Homo sapiens
ggtaccctggctacagtaggcttgctgcccagtccaaggccagcagtgttgtgtctggcctgtaagaggcaggtagcaagccatgaatatgtccaaaggcccttgaatgtcattcttgggccttgtaagaggcactcgctttgctccatttcactttctttccattctgcttttagtttggttttgttttggattcttctacagttaagtgttcttctcttccattccattatacttccttgacagaaataatgagtctcttcacaggctcataaatgatcaaactgatgtaactttgaaaagtaactacttggagtcagaaaaagtgatgattggagactaagaaaagtaaagatattcaaaggcagtttctatctctgacaactttgttcattaagagtgcctttgtttaggcgcggtggctcatgcctgtaatcccagcactttggcaggctgaggcgggcggatcacgaggtcaggagtttgagatcagcctgcccaacatggtgaaaccctgtctctactaaaaatagaaaaattagctgggcgtggtggcgtgtgcctataatcccagctactcaggaggctgaggtaggagaatcacttgaacccgtgaggcgaaggttgcagtgagccaagatcctgccactgcactccagccagggcaacagaggacagagtgaggctccgtttcaaaaaaaagaatgcctttgatcagtgatttcattaagttgactttcgaccacctgaaatttacttaatgtctatttttgcctcttctgaggcatatgtgcttctctccttatctctttggctatgataagctaattatttatgtttgcataatatttatgtttgcatgttagtgacatatattttaaaatgtgatacactcctgtaatttatgagagtatgttcattgctgtgagctttgaaggtgctctaatccttcctcatatttggccttagaatgcacctcggatcccccaaggtttaggctttcttcatttgtctttgaaactatatcttctgtctcttgtcatatctgcttattgcgtgtttttcataccttccacctctctaaaagccgttacctgagccctcgttatcacttttggttgaatgtgctgcacttagctgcatttctaagtttctgattcttgcaagtttgtggaaacagaggagtctttaacccacatcagccttgatctaagtgtaccactttacttaaaagttcgtgggatctggagctcctggtctagcaagccatgaaaatgccaataaatgtttgtaataaagcttttatttaaacatccattttgttcgaccttgaagctttactaatatgctgaagaacaaacagccgacgccagtgaatattcgggcttcgatgcagcaacaacagcagctagccagtgccagaaacagaagactggcccagcagatggagaatagaccctctgtccaggcagcattaaaacttaagcaggtcggggtatgataggtcggggaagagggggctttggaggccgaggccgaggccgtggacgagggagaggtgcccttgctcgccctgtattgaccaaggagcagctggacaaccaattggatgcatatatgtcgaaaacaaaaggacacctggatgctgagttggatgcctacatggcgcagacagatcccgaaaccaatgattgaagcctgcccatcctcccatgagagactcttgttagtcaacacatctgtaaataaccttgagataacagatgagaagaaatctgattgatgctggatggacctatcacaataggctgtggacttacttgccaccagcttgtgcatttagtgtgttccttttactttttgatactgtgttgtatgaaacccttttgtcctttgatttggttttttgtttttgtttttttaggggggagggggggtttcccctcctttgcccagacttctctttgaacacaaatgcattagccttgtggctagaacaccctcttcctacctctgtctcccctcacttgtcatatgctctgacatgctaacatttcttttgttcatccctgttgcccccacagaaacatcccagaaaaaccggtcagtgttccttcctccctgatccttaggtttctgaaatagggttctgttacatcctcttcgatagcctgtttaaaatgtttagaaggtctggagctcaaaaatgcgttcttccacattgataatttagtaaactgagaacattgacatcactacagggcagcataagaggttgcttacatgtggtagcagctctggtttgattcaagttgctaccatgtacattgacagcacatataccataaccagcgtgttgggttgaattgcactttctacctttgtatgagatttacagactttccttctgggtttgtatcatgaccagaggggtactatagggttggtttatactgcaatatagaggatcagaagccatttgatttggtaggtgtgtcagaagggagaatgatggcagacgaactgctggaagaggtcagaagatagccatgctaaaatgcaattatatcctcatgtttatcccaaactaatcttggacttttccactcattagctttgttttgcccttgtttcccttgaaggtttaagttcaaccatattctgtcaactgttcagtttcagtggaatcttgtatttctggttcattataacaaattgttcgcttaaatccaaaaaaaaaa

SEQ ID NO: 350494 - DNA, 1406 bp, Homo sapiens
agccggtcagacaagcactggacgtggcggccattttgttttggacaccgagcaggagctggcggccgctgcagacgaaaggcaggaaagggcaggccgggtgagcagacggatcggccgactagacagccaaccagcaacaacgaactgagctcgcatactaccgcttacgcatctaaccaaccgcccatctagctaacccgaggccgtggacgagggagaggtgcccttgctcgccctgtattgaccaaggagcagctggacaaccaattggatgcatatatgtcgaaaacaaaaggacacctggatgctgagttggatgcctacatggcgcagacagatcccgaaaccaatgattgaagcctgcccatcctcccatgagagactcttgttagtcaacacatctgtaaataaccttgagataacagatgagaagaaatctgattgatgctggatggacctatcacaataggctgtggacttacttgccaccagcttgtgcatttagtgtgttccttttactttttgatactgtgttgtatgaaacccttttgtcctttgatttggttttttgtttttgtttttttaggggggagggggggtttcccctcctttgcccagacttctctttgaacacaaatgcattagccttgtggctagaacaccctcttcctacctctgtctcccctcacttgtcatatgctctgacatgctaacatttcttttgttcatccctgttgcccccacagaaacatcccagaaaaaccggtcagtgttccttcctccctgatccttaggtttctgaaatagggttctgttacatcctcttcgatagcctgtttaaaatgtttagaaggtctggagctcaaaaatgcgttcttccacattgataatttagtaaactgagaacattgacatcactacagggcagcataagaggttgcttacatgtggtagcagctctggtttgattcaagttgctaccatgtacattgacagcacatataccataaccagcgtgttgggttgaattgcactttctacctttgtatgagatttacagactttccttctgggtttgtatcatgaccagaggggtactatagggttggtttatactgcaatatagaggatcagaagccatttgatttggtaggtgtgtcagaagggagaatgatggcagacgaactgctggaagaggtcagaagatagccatgctaaaatgcaattatatcctcatgtttatcccaaactaatcttggacttttccactcattagctttgttttgcccttgtttcccttgaaggtttaagttcaaccatattctgtcaactgttcagtttcagtggaatcttgtatttctggttcattataacaaattgttcgcttaaatccaaaaaaaaaa

SEQ ID NO: 350495 - DNA, 1004 bp, Homo sapiens
  misc_feature (1001)..(1001): n is a, c, g, or t
agccggtcagacaagcactggacgtggcggccattttgttttggacaccgagcaggagctggcggccgctgcagacgaaaggcaggaaagggcaggccgggtgagcagacggatcggccgactagacagccaaccagcaacaacgaactgagctcgcatactaccgcttacgcatctaaccaaccgcccatctagctaacccgagcccctccaccgtcaactcaggttcggccggtccccggcccgcctgccggagccgtggtggcagccccgggaggagcactggcgtctgtttccttcgattctcgggattcgaagatggctgcacagtcagcgccgaaagttgtgctaaaaagcaccaccaagatgtctctaaatgagcgctttactaatatgctgaagaacaaacagccgacgccagtgaatattcgggcttcgatgcagcaacaacagcagctagccagtgccagaaacagaagactggcccagcagatggagaatagaccctctgtccaggcagcattaaaacttaagcagaagagcttaaagcagcgcctgggtaagagtaacatccaggcacggttaggccgacccataggggccctggccaggggagcaatcggaggacgaggcctacccataatccagagaggcttgcccagaggaggactacgtgggggacgtgccaccagaaccctacttaggggcgggatgtcactccgaggtcagtgctgtgtaccctgataattgtcgggccctactcccttcccttttctcttgggctgcttatggacacgtttgtttaacatctttaagcctgaatttgtattaatataataacttctgaaatcacatatttttaatagtgctgcatgtcttttatcaataccattccttttctgataatgtgcaatggtgagaggctatgacctgcgtaacaacaggtaattcatgtcatctccattccattttaaacatgtttatggtcttttggcctattnctc

SEQ ID NO: 350496 - DNA, 1303 bp, Homo sapiens
caggcatggaattagggatttttaagaaatgtaaggaaaggagatttgactttcttgtgtttatttacatcttaaggtaaaaagtggaccgtctggaaatagattctcagaggaaaaatggagcacacgggcctttttgagaaatcaatcttgttcttaagtcacaagaactcaagtgaacttgtaatttaagttttgcccagagtgtgatgaacttcctatggtgtttgagtaagcctttgaagacagtggtatgaagcctgcccatcctcccatgagagactcttgttagtcaacacatctgtaaataaccttgagataacagatgagaagaaatctgattgatgctggatggacctatcacaataggctgtggacttacttgccaccagcttgtgcatttagtgtgttccttttactttttgatactgtgttgtatgaaacccttttgtcctttgatttggttttttgtttttgtttttttaggggggagggggggtttcccctcctttgcccagacttctctttgaacacaaatgcattagccttgtggctagaacaccctcttcctacctctgtctcccctcacttgtcatatgctctgacatgctaacatttcttttgttcatccctgttgcccccacagaaacatcccagaaaaaccggtcagtgttccttcctccctgatccttaggtttctgaaatagggttctgttacatcctcttcgatagcctgtttaaaatgtttagaaggtctggagctcaaaaatgcgttcttccacattgataatttagtaaactgagaacattgacatcactacagggcagcataagaggttgcttacatgtggtagcagctctggtttgattcaagttgctaccatgtacattgacagcacatataccataaccagcgtgttgggttgaattgcactttctacctttgtatgagatttacagactttccttctgggtttgtatcatgaccagaggggtactatagggttggtttatactgcaatatagaggatcagaagccatttgatttggtaggtgtgtcagaagggagaatgatggcagacgaactgctggaagaggtcagaagatagccatgctaaaatgcaattatatcctcatgtttatcccaaactaatcttggacttttccactcattagctttgttttgcccttgtttcccttgaaggtttaagttcaaccatattctgtcaactgttcagtttcagtggaatcttgtatttctggttcattataacaaattgttcgcttaaatccaaaaaaaaaa

SEQ ID NO: 350497 - DNA, 845 bp, Homo sapiens
ttgaataaagagtagcttaatctgttcacagtatgcagcttgccccagccaacctaaaaactaactgaattaccttcatttaaccctcaccgccttcctttggttagaatctactttgtgtctcccctcacttgtcatatgctctgacatgctaacatttcttttgttcatccctgttgcccccacagaaacatcccagaaaaaccggtcagtgttccttcctccctgatccttaggtttctgaaatagggttctgttacatcctcttcgatagcctgtttaaaatgtttagaaggtctggagctcaaaaatgcgttcttccacattgataatttagtaaactgagaacattgacatcactacagggcagcataagaggttgcttacatgtggtagcagctctggtttgattcaagttgctaccatgtacattgacagcacatataccataaccagcgtgttgggttgaattgcactttctacctttgtatgagatttacagactttccttctgggtttgtatcatgaccagaggggtactatagggttggtttatactgcaatatagaggatcagaagccatttgatttggtaggtgtgtcagaagggagaatgatggcagacgaactgctggaagaggtcagaagatagccatgctaaaatgcaattatatcctcatgtttatcccaaactaatcttggacttttccactcattagctttgttttgcccttgtttcccttgaaggtttaagttcaaccatattctgtcaactgttcagtttcagtggaatcttgtatttctggttcattataacaaattgttcgcttaaatccaaaaaaaaaa

SEQ ID NO: 350498 - DNA, 707 bp, Homo sapiens
agccggtcagacaagcactggacgtggcggccattttgttttggacaccgagcaggagctggcggccgctgcagacgaaaggcaggaaagggcaggccgggtgagcagacggatcggccgactagacagccaaccagcaacaacgaactgagctcgcatactaccgcttacgcatctaaccaaccgcccatctagctaacccgagcccctccaccgtcaactcaggttcggccggtccccggcccgcctgccggagccgtggtggcagccccgggaggagcactggcgtctgtttccttcgattctcgggattcgaagatggctgcacagtcagcgccgaaagttgtgctaaaaagcaccaccaagatgtctctaaatgagcgctttactaatatgctgaagaacaaacagccgacgccagtgaatattcgggcttcgatgcagcaacaacagcagctagccagtgccagaaacagaagactggcccagcagatggagaatagaccctctgtccaggcagcattaaaacttaagcaggtgagagaatgggtcttaatgctccagaagcagctggtgatctctgtgagggagtccactgaggctgtcaggacgtgatggatgattgcaaagtggctcagggcaaaaagctgagtctctgatcagggtccttgtggcctgctgcttatcacacaagtccggtccttctc

SEQ ID NO: 350499 - DNA, 1659 bp, Homo sapiens
ggtaccctggctacagtaggcttgctgcccagtccaaggccagcagtgttgtgtctggcctgtaagaggcaggtagcaagccatgaatatgtccaaaggcccttgaatgtcattcttgggccttgtaagaggcactcgctttgctccatttcactttctttccattctgcttttagtttggttttgttttggattcttctacagttaagtgttcttctcttccattccattatacttccttgacagaaataatgagtctcttcacaggctcataaatgatcaaactgatgtaactttgaaaagtaactacttggagtcagaaaaagtgatgattggagactaagaaaagtaaagatattcaaaggcagtttctatctctgacaactttgttcattaagagtgcctttgtttaggcgcggtggctcatgcctgtaatcccagcactttggcaggctgaggcgggcggatcacgaggtcaggagtttgagatcagcctgcccaacatggtgaaaccctgtctctactaaaaatagaaaaattagctgggcgtggtggcgtgtgcctataatcccagctactcaggaggctgaggtaggagaatcacttgaacccgtgaggcgaaggttgcagtgagccaagatcctgccactgcactccagccagggcaacagaggacagagtgaggctccgtttcaaaaaaaagaatgcctttgatcagtgatttcattaagttgactttcgaccacctgaaatttacttaatgtctatttttgcctcttctgaggcatatgtgcttctctccttatctctttggctatgataagctaattatttatgtttgcataatatttatgtttgcatgttagtgacatatattttaaaatgtgatacactcctgtaatttatgagagtatgttcattgctgtgagctttgaaggtgctctaatccttcctcatatttggccttagaatgcacctcggatcccccaaggtttaggctttcttcatttgtctttgaaactatatcttctgtctcttgtcatatctgcttattgcgtgtttttcataccttccacctctctaaaagccgttacctgagccctcgttatcacttttggttgaatgtgctgcacttagctgcatttctaagtttctgattcttgcaagtttgtggaaacagaggagtctttaacccacatcagccttgatctaagtgtaccactttacttaaaagttcgtgggatctggagctcctggtctagcaagccatgaaaatgccaataaatgtttgtaataaagcttttatttaaacatccattttgttcgaccttgaagctttactaatatgctgaagaacaaacagccgacgccagtgaatattcgggcttcgatgcagcaacaacagcagctagccagtgccagaaacagaagactggcccagcagatggagaatagaccctctgtccaggcagcattaaaacttaagcaggtgagagaatgggtcttaatgctccagaagcagctggtgatctctgtgagggagtccactgaggctgtcaggacgtgatggatgattgcaaagtggctcagggcaaaaagctgagtctctgatcagggtccttgtggcctgctgcttatcacacaagtccggtccttctc

SEQ ID NO: 350500 - DNA, 459 bp, Homo sapiens
agccggtcagacaagcactggacgtggcggccattttgttttggacaccgagcaggagctggcggccgctgcagacgaaaggcaggaaagggcaggccgggtgagcagacggatcggccgactagacagccaaccagcaacaacgaactgagctcgcatactaccgcttacgcatctaaccaaccgcccatctagctaacccgagcccctccaccgtcaactcaggttcggccggtccccggcccgcctgccggagccgtggtggcagccccgggaggagcactggcgtctgtttccttcgattctcgggattcgaagatggctgcacagtcagcgccgaaagttgtgctaaaaagcaccaccaagatgtctctaaatgagcggtgaggcagccaacagcaacttcaactccttcctaagaaaacattacttaacttggccctggggtccaatgcacaa

SEQ ID NO: 350501 - DNA, 392 bp, Homo sapiens
ctaactgaattaccttcatttaaccctcaccgccttcctttggttagaatctactttgtgtctcttggatttacctgcatatacattgtatgcctcctctctaaggtcaaaacctgctccgaggtggacgagccgtagctccccgaatgggcttaagaagaggtggtgttcgaggtcgtggaggtcctgggagagggggcctagggcgtggagctatgggtcgtggcggaatcggtggtagaggttagtcagctaccaacttcagagagtagctcccccttactttcctcccttaaaaactcagagccacctttctgcacagcttcaagtcataggcaggcttctttgtttgtcttgttttgttatttgaaactggcttatttttcaaatta

SEQ ID NO: 350502 - DNA, 434 bp, Homo sapiens
ggtcgactactactactaattcgcggccgcgtcgacccgaggccgaggccgtggacgagggagaggtgcccttgctcgccctgtattgaccaaggagcagctggacaaccaattggatgcatatatgtcgaaaacaaaaggacacctggatgctgagttggatgcctacatggcgcagacagatcccgaaaccaatgattgaagcctgcccatcctcccatgagagactcttgttagtcaacacatctgtaaataaccttgagataacagatgagaagaaatctgattgatgctggatggacctatcacaataggctgtggacttacttgccaccagcttgtgcatttagtgtgttccttttactttttgatactgtgttgtatgaaacccttttgtcctttgaaaaaaaaagtcgacgcggccgcgaatttag

SEQ ID NO: 350503 - DNA, 1300 bp, Homo sapiens
agccggtcagacaagcactggacgtggcggccattttgttttggacaccgagcaggagctggcggccgctgcagacgaaaggcaggaaagggcaggccgggtgagcagacggatcggccgactagacagccaaccagcaacaacgaactgagctcgcatactaccgcttacgcatctaaccaaccgcccatctagctaacccgagcccctccaccgtcaactcaggttcggccggtccccggcccgcctgccggagccgtggtggcagccccgggaggagcactggcgtctgtttccttcgattctcgggattcgaagatggctgcacagtcagcgccgaaagttgtgctaaaaagcaccaccaagatgtctctaaatgagcgctttactaatatgctgaagaacaaacagccgacgccagtgaatattcgggcttcgatgcagcaacaacagcagctagccagtgccagaaacagaagactggcccagcagatggagaatagaccctctgtccaggcagcattaaaacttaagcagaagagcttaaagcagcgcctgggtaagagtaacatccaggcacggttaggccgacccataggggccctggccaggggagcaatcggaggacgaggcctacccataatccagagaggcttgcccagaggaggactacgtgggggacgtgccaccagaaccctacttaggggcgggatgtcactccgaggtcaaaacctgctccgaggtggacgagccgtagctccccgaatgggcttaagaagaggtggtgttcgaggtcgtggaggtcctgggagagggggcctagggcgtggagctatgggtcgtggcggaatcggtggtagaggtcggggtatgataggtcggggaagagggggctttggaggccgaggccgaggccgtggacgagggagaggtgcccttgctcgccctgtattgaccaaggagcagctggacaaccaattggatgcatatatgtcgaaaacaaaaggacacctggatgctgagttggatgcctacatggcgcagacagatcccgaaaccaatgattgaagcctgcccatcctcccatgagagactcttgttagtcaacacatctgtaaataaccttgagataacagatgagaagaaatctgattgatgctggatggacctatcacaataggctgtggacttacttgccaccagcttgtgcatttagtgtgttccttttactttttgatactgtgttgtatgaaacccttttgtcctttgaaaaaaaaagtcgacgcggccgcgaatttag

SEQ ID NO: 350504 - DNA, 3066 bp, Homo sapiens
ggtaccctggctacagtaggcttgctgcccagtccaaggccagcagtgttgtgtctggcctgtaagaggcaggtagcaagccatgaatatgtccaaaggcccttgaatgtcattcttgggccttgtaagaggcactcgctttgctccatttcactttctttccattctgcttttagtttggttttgttttggattcttctacagttaagtgttcttctcttccattccattatacttccttgacagaaataatgagtctcttcacaggctcataaatgatcaaactgatgtaactttgaaaagtaactacttggagtcagaaaaagtgatgattggagactaagaaaagtaaagatattcaaaggcagtttctatctctgacaactttgttcattaagagtgcctttgtttaggcgcggtggctcatgcctgtaatcccagcactttggcaggctgaggcgggcggatcacgaggtcaggagtttgagatcagcctgcccaacatggtgaaaccctgtctctactaaaaatagaaaaattagctgggcgtggtggcgtgtgcctataatcccagctactcaggaggctgaggtaggagaatcacttgaacccgtgaggcgaaggttgcagtgagccaagatcctgccactgcactccagccagggcaacagaggacagagtgaggctccgtttcaaaaaaaagaatgcctttgatcagtgatttcattaagttgactttcgaccacctgaaatttacttaatgtctatttttgcctcttctgaggcatatgtgcttctctccttatctctttggctatgataagctaattatttatgtttgcataatatttatgtttgcatgttagtgacatatattttaaaatgtgatacactcctgtaatttatgagagtatgttcattgctgtgagctttgaaggtgctctaatccttcctcatatttggccttagaatgcacctcggatcccccaaggtttaggctttcttcatttgtctttgaaactatatcttctgtctcttgtcatatctgcttattgcgtgtttttcataccttccacctctctaaaagccgttacctgagccctcgttatcacttttggttgaatgtgctgcacttagctgcatttctaagtttctgattcttgcaagtttgtggaaacagaggagtctttaacccacatcagccttgatctaagtgtaccactttacttaaaagttcgtgggatctggagctcctggtctagcaagccatgaaaatgccaataaatgtttgtaataaagcttttatttaaacatccattttgttcgaccttgaagctttactaatatgctgaagaacaaacagccgacgccagtgaatattcgggcttcgatgcagcaacaacagcagctagccagtgccagaaacagaagactggcccagcagatggagaatagaccctctgtccaggcagcattaaaacttaagcagaagagcttaaagcagcgcctgggtaagagtaacatccaggcacggttaggccgacccataggggccctggccaggggagcaatcggaggacgaggcctacccataatccagagaggcttgcccagaggaggactacgtgggggacgtgccaccagaaccctacttaggggcgggatgtcactccgaggtcaaaacctgctccgaggtggacgagccgtagctccccgaatgggcttaagaagaggtggtgttcgaggtcgtggaggtcctgggagagggggcctagggcgtggagctatgggtcgtggcggaatcggtggtagaggtcggggtatgataggtcggggaagagggggctttggaggccgaggccgaggccgtggacgagggagaggtgcccttgctcgccctgtattgaccaaggagcagctggacaaccaattggatgcatatatgtcgaaaacaaaaggacacctggatgctgagttggatgcctacatggcgcagacagatcccgaaaccaatgattgaagcctgcccatcctcccatgagagactcttgttagtcaacacatctgtaaataaccttgagataacagatgagaagaaatctgattgatgctggatggacctatcacaataggctgtggacttacttgccaccagcttgtgcatttagtgtgttccttttactttttgatactgtgttgtatgaaacccttttgtcctttgatttggttttttgtttttgtttttttaggggggagggggggtttcccctcctttgcccagacttctctttgaacacaaatgcattagccttgtggctagaacaccctcttcctacctctgtctcccctcacttgtcatatgctctgacatgctaacatttcttttgttcatccctgttgcccccacagaaacatcccagaaaaaccggtcagtgttccttcctccctgatccttaggtttctgaaatagggttctgttacatcctcttcgatagcctgtttaaaatgtttagaaggtctggagctcaaaaatgcgttcttccacattgataatttagtaaactgagaacattgacatcactacagggcagcataagaggttgcttacatgtggtagcagctctggtttgattcaagttgctaccatgtacattgacagcacatataccataaccagcgtgttgggttgaattgcactttctacctttgtatgagatttacagactttccttctgggtttgtatcatgaccagaggggtactatagggttggtttatactgcaatatagaggatcagaagccatttgatttggtaggtgtgtcagaagggagaatgatggcagacgaactgctggaagaggtcagaagatagccatgctaaaatgcaattatatcctcatgtttatcccaaactaatcttggacttttccactcattagctttgttttgcccttgtttcccttgaaggtttaagttcaaccatattctgtcaactgttcagtttcagtggaatcttgtatttctggttcattataacaaattgttcgcttaaatccaaaaaaaaaa

SEQ ID NO: 350505 - DNA, 2275 bp, Homo sapiens
agccggtcagacaagcactggacgtggcggccattttgttttggacaccgagcaggagctggcggccgctgcagacgaaaggcaggaaagggcaggccgggtgagcagacggatcggccgactagacagccaaccagcaacaacgaactgagctcgcatactaccgcttacgcatctaaccaaccgcccatctagctaacccgagcccctccaccgtcaactcaggttcggccggtccccggcccgcctgccggagccgtggtggcagccccgggaggagcactggcgtctgtttccttcgattctcgggattcgaagatggctgcacagtcagcgccgaaagttgtgctaaaaagcaccaccaagatgtctctaaatgagcgctttactaatatgctgaagaacaaacagccgacgccagtgaatattcgggcttcgatgcagcaacaacagcagctagccagtgccagaaacagaagactggcccagcagatggagaatagaccctctgtccaggcagcattaaaacttaagcaggtgagagaatgggtcttaatgctccagaagcagctggtgatctctgtgagggagtccactgaggctgtcaggacgtgatggatgattgcaaagtggctcagggcaaaaagctgaaacttctctggaagaaagagaagttcagagaattccaattttggcagaagagcttaaagcagcgcctgggtaagagtaacatccaggcacggttaggccgacccataggggccctggccaggggagcaatcggaggacgaggcctacccataatccagagaggcttgcccagaggaggactacgtgggggacgtgccaccagaaccctacttaggggcgggatgtcactccgaggtcaaaacctgctccgaggtggacgagccgtagctccccgaatgggcttaagaagaggtggtgttcgaggtcgtggaggtcctgggagagggggcctagggcgtggagctatgggtcgtggcggaatcggtggtagaggtcggggtatgataggtcggggaagagggggctttggaggccgaggccgaggccgtggacgagggagaggtgcccttgctcgccctgtattgaccaaggagcagctggacaaccaattggatgcatatatgtcgaaaacaaaaggacacctggatgctgagttggatgcctacatggcgcagacagatcccgaaaccaatgattgaagcctgcccatcctcccatgagagactcttgttagtcaacacatctgtaaataaccttgagataacagatgagaagaaatctgattgatgctggatggacctatcacaataggctgtggacttacttgccaccagcttgtgcatttagtgtgttccttttactttttgatactgtgttgtatgaaacccttttgtcctttgatttggttttttgtttttgtttttttaggggggagggggggtttcccctcctttgcccagacttctctttgaacacaaatgcattagccttgtggctagaacaccctcttcctacctctgtctcccctcacttgtcatatgctctgacatgctaacatttcttttgttcatccctgttgcccccacagaaacatcccagaaaaaccggtcagtgttccttcctccctgatccttaggtttctgaaatagggttctgttacatcctcttcgatagcctgtttaaaatgtttagaaggtctggagctcaaaaatgcgttcttccacattgataatttagtaaactgagaacattgacatcactacagggcagcataagaggttgcttacatgtggtagcagctctggtttgattcaagttgctaccatgtacattgacagcacatataccataaccagcgtgttgggttgaattgcactttctacctttgtatgagatttacagactttccttctgggtttgtatcatgaccagaggggtactatagggttggtttatactgcaatatagaggatcagaagccatttgatttggtaggtgtgtcagaagggagaatgatggcagacgaactgctggaagaggtcagaagatagccatgctaaaatgcaattatatcctcatgtttatcccaaactaatcttggacttttccactcattagctttgttttgcccttgtttcccttgaaggtttaagttcaaccatattctgtcaactgttcagtttcagtggaatcttgtatttctggttcattataacaaattgttcgcttaaatccaaaaaaaaaa

SEQ ID NO: 350506 - DNA, 3227 bp, Homo sapiens
ggtaccctggctacagtaggcttgctgcccagtccaaggccagcagtgttgtgtctggcctgtaagaggcaggtagcaagccatgaatatgtccaaaggcccttgaatgtcattcttgggccttgtaagaggcactcgctttgctccatttcactttctttccattctgcttttagtttggttttgttttggattcttctacagttaagtgttcttctcttccattccattatacttccttgacagaaataatgagtctcttcacaggctcataaatgatcaaactgatgtaactttgaaaagtaactacttggagtcagaaaaagtgatgattggagactaagaaaagtaaagatattcaaaggcagtttctatctctgacaactttgttcattaagagtgcctttgtttaggcgcggtggctcatgcctgtaatcccagcactttggcaggctgaggcgggcggatcacgaggtcaggagtttgagatcagcctgcccaacatggtgaaaccctgtctctactaaaaatagaaaaattagctgggcgtggtggcgtgtgcctataatcccagctactcaggaggctgaggtaggagaatcacttgaacccgtgaggcgaaggttgcagtgagccaagatcctgccactgcactccagccagggcaacagaggacagagtgaggctccgtttcaaaaaaaagaatgcctttgatcagtgatttcattaagttgactttcgaccacctgaaatttacttaatgtctatttttgcctcttctgaggcatatgtgcttctctccttatctctttggctatgataagctaattatttatgtttgcataatatttatgtttgcatgttagtgacatatattttaaaatgtgatacactcctgtaatttatgagagtatgttcattgctgtgagctttgaaggtgctctaatccttcctcatatttggccttagaatgcacctcggatcccccaaggtttaggctttcttcatttgtctttgaaactatatcttctgtctcttgtcatatctgcttattgcgtgtttttcataccttccacctctctaaaagccgttacctgagccctcgttatcacttttggttgaatgtgctgcacttagctgcatttctaagtttctgattcttgcaagtttgtggaaacagaggagtctttaacccacatcagccttgatctaagtgtaccactttacttaaaagttcgtgggatctggagctcctggtctagcaagccatgaaaatgccaataaatgtttgtaataaagcttttatttaaacatccattttgttcgaccttgaagctttactaatatgctgaagaacaaacagccgacgccagtgaatattcgggcttcgatgcagcaacaacagcagctagccagtgccagaaacagaagactggcccagcagatggagaatagaccctctgtccaggcagcattaaaacttaagcaggtgagagaatgggtcttaatgctccagaagcagctggtgatctctgtgagggagtccactgaggctgtcaggacgtgatggatgattgcaaagtggctcagggcaaaaagctgaaacttctctggaagaaagagaagttcagagaattccaattttggcagaagagcttaaagcagcgcctgggtaagagtaacatccaggcacggttaggccgacccataggggccctggccaggggagcaatcggaggacgaggcctacccataatccagagaggcttgcccagaggaggactacgtgggggacgtgccaccagaaccctacttaggggcgggatgtcactccgaggtcaaaacctgctccgaggtggacgagccgtagctccccgaatgggcttaagaagaggtggtgttcgaggtcgtggaggtcctgggagagggggcctagggcgtggagctatgggtcgtggcggaatcggtggtagaggtcggggtatgataggtcggggaagagggggctttggaggccgaggccgaggccgtggacgagggagaggtgcccttgctcgccctgtattgaccaaggagcagctggacaaccaattggatgcatatatgtcgaaaacaaaaggacacctggatgctgagttggatgcctacatggcgcagacagatcccgaaaccaatgattgaagcctgcccatcctcccatgagagactcttgttagtcaacacatctgtaaataaccttgagataacagatgagaagaaatctgattgatgctggatggacctatcacaataggctgtggacttacttgccaccagcttgtgcatttagtgtgttccttttactttttgatactgtgttgtatgaaacccttttgtcctttgatttggttttttgtttttgtttttttaggggggagggggggtttcccctcctttgcccagacttctctttgaacacaaatgcattagccttgtggctagaacaccctcttcctacctctgtctcccctcacttgtcatatgctctgacatgctaacatttcttttgttcatccctgttgcccccacagaaacatcccagaaaaaccggtcagtgttccttcctccctgatccttaggtttctgaaatagggttctgttacatcctcttcgatagcctgtttaaaatgtttagaaggtctggagctcaaaaatgcgttcttccacattgataatttagtaaactgagaacattgacatcactacagggcagcataagaggttgcttacatgtggtagcagctctggtttgattcaagttgctaccatgtacattgacagcacatataccataaccagcgtgttgggttgaattgcactttctacctttgtatgagatttacagactttccttctgggtttgtatcatgaccagaggggtactatagggttggtttatactgcaatatagaggatcagaagccatttgatttggtaggtgtgtcagaagggagaatgatggcagacgaactgctggaagaggtcagaagatagccatgctaaaatgcaattatatcctcatgtttatcccaaactaatcttggacttttccactcattagctttgttttgcccttgtttcccttgaaggtttaagttcaaccatattctgtcaactgttcagtttcagtggaatcttgtatttctggttcattataacaaattgttcgcttaaatccaaaaaaaaaa

SEQ ID NO: 350507 - DNA, 1323 bp, Homo sapiens
  misc_feature (881)..(881): n is a, c, g, or t
agccggtcagacaagcactggacgtggcggccattttgttttggacaccgagcaggagctggcggccgctgcagacgaaaggcaggaaagggcaggccgggtgagcagacggatcggccgactagacagccaaccagcaacaacgaactgagctcgcatactaccgcttacgcatctaaccaaccgcccatctagctaacccgagcccctccaccgtcaactcaggttcggccggtccccggcccgcctgccggagccgtggtggcagccccgggaggagcactggcgtctgtttccttcgattctcgggattcgaagatggctgcacagtcagcgccgaaagttgtgctaaaaagcaccaccaagatgtctctaaatgagcgctttactaatatgctgaagaacaaacagccgacgccagtgaatattcgggcttcgatgcagcaacaacagcagctagccagtgccagaaacagaagactggcccagcagatggagaatagaccctctgtccaggcagcattaaaacttaagcagaagagcttaaagcagcgcctgggtaagagtaacatccaggcacggttaggccgacccataggggccctggccaggggagcaatcggaggacgaggcctacccataatccagagaggcttgcccagaggaggactacgtgggggacgtgccaccagaaccctacttaggggcgggatgtcactccgaggtcaaaacctgctccgaggtggacgagccgtagctccccgaatgggcttaagaagaggtggtgttcgaggtcgtggaggtcctgggagagggggcctagggcgtggagctatgggtcgtggcggaatcggtggtagagcggcgtatgataggtcggngaagacgtaactttatataccttaacctaatcttaaactattaacaatacccttactctcctatattaaccaaacatcatctaacaaccacatatatacatatatatctctcaaaccaataattaaattctacccattcgccctatatatactcgtattaatcaacacatctataaataaccttaacattacacattataataaatttcaattattctttatttacctttaacaataatcttttacttactttccaccatctttttcattatatattccttgtacttttaatccttctttatttaaacccttttttccttttatctactcgtaatttcacatttgttaatctgttcttttatttctttcttctccctgtcctttgtcttttgcatgtcattactttttccctttgtcttatcttttttctctttcttgttct

SEQ ID NO: 350508 - DNA, 1524 bp, Homo sapiens
agccggtcagacaagcactggacgtggcggccattttgttttggacaccgagcaggagctggcggccgctgcagacgaaaggcaggaaagggcaggccgggtgagcagacggatcggccgactagacagccaacgtcaaaacctgctccgaggtggacgagccgtagctccccgaatgggcttaagaagaggtggtgttcgaggtcgtggaggtcctgggagagggggcctagggcgtggagctatgggtcgtggcggaatcggtggtagaggtcggggtatgataggtcggggaagagggggctttggaggccgaggccgaggccgtggacgagggagaggtgcccttgctcgccctgtattgaccaaggagcagctggacaaccaattggatgcatatatgtcgaaaacaaaaggacacctggatgctgagttggatgcctacatggcgcagacagatcccgaaaccaatgattgaagcctgcccatcctcccatgagagactcttgttagtcaacacatctgtaaataaccttgagataacagatgagaagaaatctgattgatgctggatggacctatcacaataggctgtggacttacttgccaccagcttgtgcatttagtgtgttccttttactttttgatactgtgttgtatgaaacccttttgtcctttgatttggttttttgtttttgtttttttaggggggagggggggtttcccctcctttgcccagacttctctttgaacacaaatgcattagccttgtggctagaacaccctcttcctacctctgtctcccctcacttgtcatatgctctgacatgctaacatttcttttgttcatccctgttgcccccacagaaacatcccagaaaaaccggtcagtgttccttcctccctgatccttaggtttctgaaatagggttctgttacatcctcttcgatagcctgtttaaaatgtttagaaggtctggagctcaaaaatgcgttcttccacattgataatttagtaaactgagaacattgacatcactacagggcagcataagaggttgcttacatgtggtagcagctctggtttgattcaagttgctaccatgtacattgacagcacatataccataaccagcgtgttgggttgaattgcactttctacctttgtatgagatttacagactttccttctgggtttgtatcatgaccagaggggtactatagggttggtttatactgcaatatagaggatcagaagccatttgatttggtaggtgtgtcagaagggagaatgatggcagacgaactgctggaagaggtcagaagatagccatgctaaaatgcaattatatcctcatgtttatcccaaactaatcttggacttttccactcattagctttgttttgcccttgtttcccttgaaggtttaagttcaaccatattctgtcaactgttcagtttcagtggaatcttgtatttctggttcattataacaaattgttcgcttaaatccaaaaaaaaaa

SEQ ID NO: 350509 - DNA, 1340 bp, Homo sapiens
agccggtcagacaagcactggacgtggcggccattttgttttggacaccgagcaggagctggcggccgctgcagacgaaaggcaggaaagggcaggccgggtgagcagacggatcggccgactagacagccaaccagcaacaacgaactgagctcgcatactaccgcttacgcatctaaccaaccgcccatctagctaacccgagcccctccaccgtcaactcaggttcggccggtccccggcccgcctgccggagccgtggtggcagccccgggaggagcactggcgtctgtttccttcgattctcgggattcgaagatggctgcacagtcagcgccgaaagttgtgctaaaaagcaccaccaagatgtctctaaatgagcgctttactaatatgctgaagaacaaacagccgacgccagtgaatattcgggcttcgatgcagcaacaacagcagctagccagtgccagaaacagaagactggcccagcagatggagaatagaccctctgtccaggcagcattaaaacttaagcagaagagcttaaagcagcgcctgggtaagagtaacatccaggcacggttaggccgacccataggggccctggccaggggagcaatcggaggacgaggcctacccataatccagagaggcttgcccagaggaggactacgtgggggacgtgccaccagaaccctacttaggggcgggatgtcactccgaggtcagtgctgtgtaccctgataattgtcgggccctactcccttcccttttctcttgggctgcttatggacacgtttgtttaacatctttaagcctgaatttgtattaatataataacttctgaaatcacatatttttaatagtgctgcatgtcttttatcaataccattccttttctgataatgtgcaatggtgagaggctatgacctgcgtaacaacaggtaattcatgtcatctccattccattttaaaacaccctgctgttgcttgaatcaaagcacattcaagttctagaaacaagtcaaacataagaaatttataggtcttttggcctatatctctttgttcctggtgctagtaaaacactgatacagctggagaggacaagttgacccacagcacttacctatatatgttcatttggggcactattactctgttccctgtatagttcttgttccctagaagaatctgttgagatcaggaaccatagcatttatttttaaatttaccataatgctaggcatctatctgattattcagtagatatttattaaatgtatgtacttactaattgaattaactcccaacttcgttcacagatgcagcttgtggtc

SEQ ID NO: 350510 - DNA, 1393 bp, Homo sapiens
  misc_feature (824)..(824): n is a, c, g, or t
  misc_feature (1234)..(1234): n is a, c, g, or t
agccggtcagacaagcactggacgtggcggccattttgttttggacaccgagcaggagctggcggccgctgcagacgaaaggcaggaaagggcaggccgggtgagcagacggatcggccgactagacagccaaccagcaacaacgaactgagctcgcatactaccgcttacgcatctaaccaaccgcccatctagctaacccgagcccctccaccgtcaactcaggttcggccggtccccggcccgcctgccggagccgtggtggcagccccgggaggagcactggcgtctgtttccttcgattctcgggattcgaagatggctgcacagtcagcgccgaaagttgtgctaaaaagcaccaccaagatgtctctaaatgagcgctttactaatatgctgaagaacaaacagccgacgccagtgaatattcgggcttcgatgcagcaacaacagcagctagccagtgccagaaacagaagactggcccagcagatggagaatagaccctctgtccaggcagcattaaaacttaagcagaagagcttaaagcagcgcctgggtaagagtaacatccaggcacggttaggccgacccataggggccctggccaggggagcaatcggaggacgaggcctacccataatccagagaggcttgcccagaggaggactacgtgggggacgtgccaccagaaccctacttaggggcgggatgtcactccgaggtggtgttcgaggtcgtggaggtcctgggagagggggcctagggcgtggagctatgggtcgtggcggaatcggtggtagagcggcgtatgataggtcggngaagagggggcttcgtggcccgctgtcctcgtctgtcgctggtggtgccttgcccttgctgccccggtctcgctcctggtcctccttgcccttccgctggctctctctctgtccgccgcgcttggtcgcttcgcctgctgcgcggtctccccctcgcctcgccccgtctccggcccctcgccctcgccccgcccttctctctcgtccccttctccccgcctggctctcgccccgtcccttgccgcccccgtcgccgcccccctccccccgttcgtcgccctttctccgctccctgttcccggctctccgctgccgtgccccctctgggcccttccccggtctttgctcgcttgctcacgccttctctccttctctggccccccgtcgctcttttgtccgtggcttgcccncttctcctcgcggccgccccccgctcgcgcttcttgcctgctcttcgttccgggtgcctcgccttgcgctctgcttggccgcctccctctgcccgttccttctcgcttcgccgtctcttccacgccctcgagctcctcctctgcctctccctccgcccg

SEQ ID NO: 350511 - DNA, 1391 bp, Homo sapiens
agccggtcagacaagcactggacgtggcggccattttgttttggacaccgagcaggagctggcggccgctgcagacgaaaggcaggaaagggcaggccgggtgagcagacggatcggccgactagacagccaaccagcaacaacgaactgagctcgcatactaccgcttacgcatctaaccaaccgcccatctagctaacccgagcccctccaccgtcaactcaggttcggccggtccccggcccgcctgccggagccgtggtggcagccccgggaggagcactggcgtctgtttccttcgattctcgggattcgaagatggctgcacagtcagcgccgaaagttgtgctaaaaagcaccaccaagatgtctctaaatgagcgctttactaatatgctgaagaacaaacagccgacgccagtgaatattcgggcttcgatgcagcaacaacagcagctagccagtgccagaaacagaagactggcccagcagatggagaatagaccctctgtccaggcagcattaaaacttaagcagaagagcttaaagcagcgcctgggtaagagtaacatccaggcacggttaggccgacccataggggccctggccaggggagcaatcggaggacgaggcctacccataatccagagaggcttgcccagaggaggactacgtgggggacgtgccaccagaaccctacttaggggcgggatgtcactccgaggtggtgttcgaggtcgtggaggtcctgggagagggggcctagggcgtggagctatgggtcgtggcggaatcggtggtagagcggcgtatgatacgtcgttcaagatgccctttgccaccccgctcctctcgcacggtcgtctctctatccccccccggcccccttctctgtgtccccctcgctcggccccccctcgccctcttctcgttcgctcctctgtgcgttctcccgctcgttctctctctttgcgccctctctctcccccctctccgccttccctggctctccttctgcgcctcctctctctccaccctcgttcttctccgccccttctgggtattctctccgctgcggcgtcgctccccctgcgcccccctcacctcttccgcccgtcggctttcctctgtcttcctctgcattccctctcgcccctgacttctactcccgcatctgcgcgctctacctcctctcctctggccctctctgctctctctccccctgctctcgctccctctcctccgcctcttccgccgcgctttggtcgtcttctgtctgcttcttctactcgcgtcgctcgtcggcgctctcctctgcctcctcttccccccctacgtcccggtgtgctcgtagctccccctcgctccgtcccgtcggccgcctcgcgcct
